United States Patent Application Publication US 2026/0240958 A1 - sequence listing, part 3

SEQ ID NO: 3370 - RNA, 5419 nt, synthetic construct
  source 1..5419: mol_type = other RNA
aggaaataagagagaaaagaagagtaagaagaaatataagagccaccatggcccctaagaagaagcgtaaagtgagccgggtgaacggcagcggcagcggcggcggcatgaaccacgaccaggagttcgacccccctaaggtgtaccctcccgtccccgccgagaagagaaagcccatccgggtcctgagcctgttcgatggcatcgccaccggtctgctggtgctgaaggacctgggcatccaggtggataggtacattgcctccgaggtgtgcgaggactccatcaccgtgggaatggtgcgtcatcagggcaagatcatgtacgtgggcgacgtgcggagcgtgacacagaagcatatccaggagtggggccctttcgacctggtgatcggcggcagcccttgcaatgacctgagcatcgtgaacccagcccggaagggcctgtacgagggaaccggcagactgttcttcgagttttacagactgctgcacgacgcccggcctaaggaaggcgacgaccggcccttcttttggctgttcgagaatgtggtggccatgggagtcagcgacaagcgggatattagccggttcctggagagcaaccccgtgatgatcgatgccaaggaagtgagcgccgcccaccgggccagatacttctggggcaatctgcctggcatgaacagacccctggccagcaccgtgaacgacaagctggagctgcaggagtgcctggagcacggccggatcgccaagttcagcaaggtgagaaccatcaccacccgaagcaacagcatcaaacaaggcaaggaccagcactttcctgtgttcatgaacgagaaggaggacatcctgtggtgtaccgagatggagagagtgttcgggttcccagtccactacacagatgtcagcaacatgtctagactggccagacagagactgctgggaagaagctggtccgtccctgtgatcagacacctgttcgcccctctgaaggagtacttcgcctgcgtgagcagcggcaacagcaacgccaacagccggggccccagcttctctagcggcctggtgccactgtccctgagagggagccacatgggccccatggagatctacaaaaccgtgagcgcctggaagcggcagcctgtgcgcgtgctgagcctgtttcggaatatcgataaagtcctgaaaagcctgggattcctggagagcggctctggctccggcggtggcaccctgaagtacgtggaggatgtgacaaacgtggtcagacgggatgtggagaagtggggccccttcgatctggtgtacggcagcacccaacccctgggcagctcttgtgaccggtgccctggctggtacatgtttcagttccaccggatcctgcagtacgccctgccgagacaggagtcccagcggccattcttttggattttcatggacaacttgctgctgaccgaggatgaccaggaaactaccactcggttcctgcagaccgaagccgtgaccctgcaggacgtgagaggccgggactaccagaacgccatgcgggtgtggtccaacatccctggactgaaaagcaagcacgcacctctgacccctaaagaagaggagtacctgcaggcccaggtgcggagcagaagcaagctggacgcccctaaggtggatctgctggtgaagaattgcctcctgcccctgagagagtacttcaagtatttcagccagaatagtctgcccctgggcggcccaagcagcggcgcccctcctcccagcggcggcagcccagccggctccccaacctctaccgaggagggcacctctgagtccgccacccccgagagcggccctggcacctccaccgagcccagcgagggcagcgcacccggcagccctgccggcagccccacctccacagaggagggaaccagcaccgagcccagcgaaggcagcgccccaggcaccagcaccgagcctagtgagggcggctctggcggcggcagcgcccaggagattaaacggatcaacaagatcagaagaagacttgtgaaagacagcaacaccaagaaggccggcaagacaggccccatgaaaaccctgctggttagagtgatgacacccgatctgagagagcggctggaaaacctgagaaagaagcctgaaaatatcccccagcccatcagcaatacatctagagccaacctgaataagctgctgaccgattacaccgaaatgaagaaggcgatcctgcatgtgtactgggaagagttccagaaggaccctgtgggcctgatgagccgggtggcccagcctgccagcaagaagatcgatcagaacaagctgaaacctgagatggacgagaagggcaacctgaccaccgccggctttgcctgctctcagtgtggccagcccctgttcgtgtacaagctggagcaggtgtctgagaagggcaaggcttacaccaactacttcggacggtgcaatgtggccgagcacgaaaagctgatcctgctggcccagctgaagcccgagaaggatagcgacgaagccgtgacatatagcctgggaaagtttgggcagagggccctggatttctacagcattcatgtgaccaaggagtccacccaccccgtgaagcccctggcccagatcgccggaaacagatacgcctccggacctgtgggaaaggccctgagcgacgcatgtatgggcacaatcgcctccttcctgtctaagtaccaggacatcatcatcgaacaccagaaggtggtgaagggcaaccagaagagactggagagcctgcgggagctggccggcaaggaaaacctggaataccctagcgtgaccctgccacctcagcctcacaccaaggagggcgttgatgcctacaacgaagtgatcgcccgggtgcgaatgtgggtgaacctgaacctgtggcagaagctgaagctaagcagagatgatgccaagcctctgctgagactgaagggattcccttcctttcctctggtcgagagacaggccaacgaagtggactggtgggacatggtgtgtaacgtgaagaagctgatcaacgagaaaaaggaggatggcaaggtgttttggcagaatctggctggctacaagagacaggaagccctgagaccatacctgagcagcgaggaagatcggaagaagggaaagaaattcgctcggtaccagctgggcgacctgctgctgcacctggaaaagaagcacggcgaggactggggaaaggtgtacgacgaggcctgggagcggattgacaagaaagtggaaggcctgagcaagcacatcaagctggaagaggaacggagaagcgaggacgcccagagcaaggccgccctgaccgactggctgcgggctaaggccagcttcgtgatcgagggcctgaaggaggccgacaaggacgagttctgcagatgcgagctgaagctgcagaagtggtacggggacctgcggggaaagcccttcgccatcgaagccgagaacagcatcctggacatcagcggcttcagcaagcagtacaactgtgccttcatctggcagaaggacggcgtgaagaagctgaacctgtacctgatcatcaactacttcaagggcggcaagctgcggttcaagaagatcaaacctgaagccttcgaagccaacagattctacaccgtgatcaacaaaaagagcggcgagatcgtgcccatggaggtgaacttcaacttcgacgaccccaacctgatcatcctgcctctggcctttggcaagagacagggcagagaattcatctggaacgacctgctgtccctggaaaccggcagcctgaagctggccaacggaagagtgatcgagaagacactgtacaacagaagaacccggcaggatgagcctgccctgttcgtggccctgaccttcgagcggcgggaggtcctggactcctccaatatcaaaccaatgaacctgatcggcgtggcaagaggcgaaaacatccccgccgtgatcgccctgaccgaccccgagggctgcccactgagccggtttaaggatagcctgggaaacccaacccacatcctgagaatcggcgagagctataaggagaagcagcggaccatccaggccaagaaggaggtggagcagcggagagccggcggctacagccggaagtacgccagcaaagccaagaatctggcagacgatatggtgagaaacaccgctagagatctgctgtactacgccgtgacccaggatgccatgctgatcttcgccaacctgagccggggcttcggccggcagggcaagcggaccttcatggccgagagacagtacacacggatggaggactggctgaccgccaagctggcctacgagggcctgagcaagacctacctgtccaagacactggcccagtacacctccaagacatgcagcaactgtgggtttaccatcaccagcgccgactacgacagggtgctggagaagctgaagaagacagcaacaggctggatgaccacaattaacggcaaggagctgaaggtggagggccagattacctactacaacagatacaagagacagaacgtagtcaaggacctgtccgtcgagctggatagactgagcgaagaatctgtgaacaacgacatctcctcctggacaaagggcagaagcggagaagctctgagcctcctgaagaaaagattctcccatagacccgtgcaggagaagttcgtgtgcctgaactgcggcttcgagacacacgcagccgagcaagccgccctgaacatcgccagatcctggctgttcctgcggagccaggagtacaagaaataccagacaaacaagacaaccggcaacaccgataagagagccttcgtcgagacctggcagtccttttaccggaagaagcttaaggaggtgtggaaacctgccgtgcggtctggcggatctggcggaggctccacaagcgagaagggccccctgaccttcagggacgtggccatcgagttcagcctggaggagtggcagtgcctggacaccgcccagcaggacctgtacaggagggtgatgctggagaactacaggaacctggtgttcctgggcatcgccgtgagcaaccccgacctgatcacctgcctggagcagggcaaggagccctggaacatgaagaggcacgccatggccgacgagccccccgtgatgtacagccacaccagccccaagaaaaagagaaaagtctaagctgccttctgcggggcttgccttctggccatgcccttcttctctcccttgcacctgtacctcttggtctttgaataaagcctgagtaggaaggctagcaaaaaaaaaaaaaaaaaaaaaaaaaaaaaaaaaaaaaaaaaaaaaaaaaaaaaaaaaaaaaaaaaaaaaaaaaaaaaaaa

SEQ ID NO: 3371 - RNA, 5419 nt, synthetic construct
  source 1..5419: mol_type = other RNA
aggaaataagagagaaaagaagagtaagaagaaatataagagccaccatggcccctaagaagaagcgtaaagtgagccgggtgaacggcagcggcagcggcggcggcatgaaccacgaccaggagttcgacccccctaaggtgtaccctcccgtccccgccgagaagagaaagcccatccgggtcctgagcctgttcgatggcatcgccaccggtctgctggtgctgaaggacctgggcatccaggtggataggtacattgcctccgaggtgtgcgaggactccatcaccgtgggaatggtgcgtcatcagggcaagatcatgtacgtgggcgacgtgcggagcgtgacacagaagcatatccaggagtggggccctttcgacctggtgatcggcggcagcccttgcaatgacctgagcatcgtgaacccagcccggaagggcctgtacgagggaaccggcagactgttcttcgagttttacagactgctgcacgacgcccggcctaaggaaggcgacgaccggcccttcttttggctgttcgagaatgtggtggccatgggagtcagcgacaagcgggatattagccggttcctggagagcaaccccgtgatgatcgatgccaaggaagtgagcgccgcccaccgggccagatacttctggggcaatctgcctggcatgaacagacccctggccagcaccgtgaacgacaagctggagctgcaggagtgcctggagcacggccggatcgccaagttcagcaaggtgagaaccatcaccacccgaagcaacagcatcaaacaaggcaaggaccagcactttcctgtgttcatgaacgagaaggaggacatcctgtggtgtaccgagatggagagagtgttcgggttcccagtccactacacagatgtcagcaacatgtctagactggccagacagagactgctgggaagaagctggtccgtccctgtgatcagacacctgttcgcccctctgaaggagtacttcgcctgcgtgagcagcggcaacagcaacgccaacagccggggccccagcttctctagcggcctggtgccactgtccctgagagggagccacatgggccccatggagatctacaaaaccgtgagcgcctggaagcggcagcctgtgcgcgtgctgagcctgtttcggaatatcgataaagtcctgaaaagcctgggattcctggagagcggctctggctccggcggtggcaccctgaagtacgtggaggatgtgacaaacgtggtcagacgggatgtggagaagtggggccccttcgatctggtgtacggcagcacccaacccctgggcagctcttgtgaccggtgccctggctggtacatgtttcagttccaccggatcctgcagtacgccctgccgagacaggagtcccagcggccattcttttggattttcatggacaacttgctgctgaccgaggatgaccaggaaactaccactcggttcctgcagaccgaagccgtgaccctgcaggacgtgagaggccgggactaccagaacgccatgcgggtgtggtccaacatccctggactgaaaagcaagcacgcacctctgacccctaaagaagaggagtacctgcaggcccaggtgcggagcagaagcaagctggacgcccctaaggtggatctgctggtgaagaattgcctcctgcccctgagagagtacttcaagtatttcagccagaatagtctgcccctgggcggcccaagcagcggcgcccctcctcccagcggcggcagcccagccggctccccaacctctaccgaggagggcacctctgagtccgccacccccgagagcggccctggcacctccaccgagcccagcgagggcagcgcacccggcagccctgccggcagccccacctccacagaggagggaaccagcaccgagcccagcgaaggcagcgccccaggcaccagcaccgagcctagtgagggcggctctggcggcggcagcgcccaggagattaaacggatcaacaagatcagaagaagacttgtgaaagacagcaacaccaagaaggccggcaagacaggccccatgaaaaccctgctggttagagtgatgacacccgatctgagagagcggctggaaaacctgagaaagaagcctgaaaatatcccccagcccatcagcaatacatctagagccaacctgaataagctgctgaccgattacaccgaaatgaagaaggcgatcctgcatgtgtactgggaagagttccagaaggaccctgtgggcctgatgagccgggtggcccagcctgccagcaagaagatcgatcagaacaagctgaaacctgagatggacgagaagggcaacctgaccaccgccggctttgcctgctctcagtgtggccagcccctgttcgtgtacaagctggagcaggtgtctgagaagggcaaggcttacaccaactacttcggacggtgcaatgtggccgagcacgaaaagctgatcctgctggcccagctgaagcccgagaaggatagcgacgaagccgtgacatatagcctgggaaagtttgggcagagggccctggatttctacagcattcatgtgaccaaggagtccacccaccccgtgaagcccctggcccagatcgccggaaacagatacgcctccggacctgtgggaaaggccctgagcgacgcatgtatgggcacaatcgcctccttcctgtctaagtaccaggacatcatcatcgaacaccagaaggtggtgaagggcaaccagaagagactggagagcctgcgggagctggccggcaaggaaaacctggaataccctagcgtgaccctgccacctcagcctcacaccaaggagggcgttgatgcctacaacgaagtgatcgcccgggtgcgaatgtgggtgaacctgaacctgtggcagaagctgaagctaagcagagatgatgccaagcctctgctgagactgaagggattcccttcctttcctctggtcgagagacaggccaacgaagtggactggtgggacatggtgtgtaacgtgaagaagctgatcaacgagaaaaaggaggatggcaaggtgttttggcagaatctggctggctacaagagacaggaagccctgagaccatacctgagcagcgaggaagatcggaagaagggaaagaaattcgctcggtaccagctgggcgacctgctgctgcacctggaaaagaagcacggcgaggactggggaaaggtgtacgacgaggcctgggagcggattgacaagaaagtggaaggcctgagcaagcacatcaagctggaagaggaacggagaagcgaggacgcccagagcaaggccgccctgaccgactggctgcgggctaaggccagcttcgtgatcgagggcctgaaggaggccgacaaggacgagttctgcagatgcgagctgaagctgcagaagtggtacggggacctgcggggaaagcccttcgccatcgaagccgagaacagcatcctggacatcagcggcttcagcaagcagtacaactgtgccttcatctggcagaaggacggcgtgaagaagctgaacctgtacctgatcatcaactacttcaagggcggcaagctgcggttcaagaagatcaaacctgaagccttcgaagccaacagattctacaccgtgatcaacaaaaagagcggcgagatcgtgcccatggaggtgaacttcaacttcgacgaccccaacctgatcatcctgcctctggcctttggcaagagacagggcagagaattcatctggaacgacctgctgtccctggaaaccggcagcctgaagctggccaacggaagagtgatcgagaagacactgtacaacagaagaacccggcaggatgagcctgccctgttcgtggccctgaccttcgagcggcgggaggtcctggactcctccaatatcaaaccaatgaacctgatcggcgtggcaagaggcgaaaacatccccgccgtgatcgccctgaccgaccccgagggctgcccactgagccggtttaaggatagcctgggaaacccaacccacatcctgagaatcggcgagagctataaggagaagcagcggaccatccaggccaagaaggaggtggagcagcggagagccggcggctacagccggaagtacgccagcaaagccaagaatctggcagacgatatggtgagaaacaccgctagagatctgctgtactacgccgtgacccaggatgccatgctgatcttcgccaacctgagccggggcttcggccggcagggcaagcggaccttcatggccgagagacagtacacacggatggaggactggctgaccgccaagctggcctacgagggcctgagcaagacctacctgtccaagacactggcccagtacacctccaagacatgcagcaactgtgggtttaccatcaccagcgccgactacgacagggtgctggagaagctgaagaagacagcaacaggctggatgaccacaattaacggcaaggagctgaaggtggagggccagattacctactacaacagatacaagagacagaacgtagtcaaggacctgtccgtcgagctggatagactgagcgaagaatctgtgaacaacgacatctcctcctggacaaagggcagaagcggagaagctctgagcctcctgaagaaaagattctcccatagacccgtgcaggagaagttcgtgtgcctgaactgcggcttcgagacacacgcagccgagcaagccgccctgaacatcgccagatcctggctgttcctgcggagccaggagtacaagaaataccagacaaacaagacaaccggcaacaccgataagagagccttcgtcgagacctggcagtccttttaccggaagaagcttaaggaggtgtggaaacctgccgtgcggtctggcggatctggcggaggctccacaagcctgagcacccagctgaccgtggaggacgtggacatcaagttcacccccgaggagtgggagtgcctggaccccgcccagaggaccctgtacagggacgtgatggaggagacctacaggaacctgctgagcgtgggcatcggccccaggctgcccgactgcagcagctgcatccacatgaccaagaagctgcaggccaaggagaacagcggcaagggcgagatcctgcagagggtgatgtgcggcaccagccccaagaaaaagagaaaagtctaagctgccttctgcggggcttgccttctggccatgcccttcttctctcccttgcacctgtacctcttggtctttgaataaagcctgagtaggaaggctagcaaaaaaaaaaaaaaaaaaaaaaaaaaaaaaaaaaaaaaaaaaaaaaaaaaaaaaaaaaaaaaaaaaaaaaaaaaaaaaaa

SEQ ID NO: 3372 - RNA, 5419 nt, synthetic construct
  source 1..5419: mol_type = other RNA
aggaaataagagagaaaagaagagtaagaagaaatataagagccaccatggcccctaagaagaagcgtaaagtgagccgggtgaacggcagcggcagcggcggcggcatgaaccacgaccaggagttcgacccccctaaggtgtaccctcccgtccccgccgagaagagaaagcccatccgggtcctgagcctgttcgatggcatcgccaccggtctgctggtgctgaaggacctgggcatccaggtggataggtacattgcctccgaggtgtgcgaggactccatcaccgtgggaatggtgcgtcatcagggcaagatcatgtacgtgggcgacgtgcggagcgtgacacagaagcatatccaggagtggggccctttcgacctggtgatcggcggcagcccttgcaatgacctgagcatcgtgaacccagcccggaagggcctgtacgagggaaccggcagactgttcttcgagttttacagactgctgcacgacgcccggcctaaggaaggcgacgaccggcccttcttttggctgttcgagaatgtggtggccatgggagtcagcgacaagcgggatattagccggttcctggagagcaaccccgtgatgatcgatgccaaggaagtgagcgccgcccaccgggccagatacttctggggcaatctgcctggcatgaacagacccctggccagcaccgtgaacgacaagctggagctgcaggagtgcctggagcacggccggatcgccaagttcagcaaggtgagaaccatcaccacccgaagcaacagcatcaaacaaggcaaggaccagcactttcctgtgttcatgaacgagaaggaggacatcctgtggtgtaccgagatggagagagtgttcgggttcccagtccactacacagatgtcagcaacatgtctagactggccagacagagactgctgggaagaagctggtccgtccctgtgatcagacacctgttcgcccctctgaaggagtacttcgcctgcgtgagcagcggcaacagcaacgccaacagccggggccccagcttctctagcggcctggtgccactgtccctgagagggagccacatgggccccatggagatctacaaaaccgtgagcgcctggaagcggcagcctgtgcgcgtgctgagcctgtttcggaatatcgataaagtcctgaaaagcctgggattcctggagagcggctctggctccggcggtggcaccctgaagtacgtggaggatgtgacaaacgtggtcagacgggatgtggagaagtggggccccttcgatctggtgtacggcagcacccaacccctgggcagctcttgtgaccggtgccctggctggtacatgtttcagttccaccggatcctgcagtacgccctgccgagacaggagtcccagcggccattcttttggattttcatggacaacttgctgctgaccgaggatgaccaggaaactaccactcggttcctgcagaccgaagccgtgaccctgcaggacgtgagaggccgggactaccagaacgccatgcgggtgtggtccaacatccctggactgaaaagcaagcacgcacctctgacccctaaagaagaggagtacctgcaggcccaggtgcggagcagaagcaagctggacgcccctaaggtggatctgctggtgaagaattgcctcctgcccctgagagagtacttcaagtatttcagccagaatagtctgcccctgggcggcccaagcagcggcgcccctcctcccagcggcggcagcccagccggctccccaacctctaccgaggagggcacctctgagtccgccacccccgagagcggccctggcacctccaccgagcccagcgagggcagcgcacccggcagccctgccggcagccccacctccacagaggagggaaccagcaccgagcccagcgaaggcagcgccccaggcaccagcaccgagcctagtgagggcggctctggcggcggcagcgcccaggagattaaacggatcaacaagatcagaagaagacttgtgaaagacagcaacaccaagaaggccggcaagacaggccccatgaaaaccctgctggttagagtgatgacacccgatctgagagagcggctggaaaacctgagaaagaagcctgaaaatatcccccagcccatcagcaatacatctagagccaacctgaataagctgctgaccgattacaccgaaatgaagaaggcgatcctgcatgtgtactgggaagagttccagaaggaccctgtgggcctgatgagccgggtggcccagcctgccagcaagaagatcgatcagaacaagctgaaacctgagatggacgagaagggcaacctgaccaccgccggctttgcctgctctcagtgtggccagcccctgttcgtgtacaagctggagcaggtgtctgagaagggcaaggcttacaccaactacttcggacggtgcaatgtggccgagcacgaaaagctgatcctgctggcccagctgaagcccgagaaggatagcgacgaagccgtgacatatagcctgggaaagtttgggcagagggccctggatttctacagcattcatgtgaccaaggagtccacccaccccgtgaagcccctggcccagatcgccggaaacagatacgcctccggacctgtgggaaaggccctgagcgacgcatgtatgggcacaatcgcctccttcctgtctaagtaccaggacatcatcatcgaacaccagaaggtggtgaagggcaaccagaagagactggagagcctgcgggagctggccggcaaggaaaacctggaataccctagcgtgaccctgccacctcagcctcacaccaaggagggcgttgatgcctacaacgaagtgatcgcccgggtgcgaatgtgggtgaacctgaacctgtggcagaagctgaagctaagcagagatgatgccaagcctctgctgagactgaagggattcccttcctttcctctggtcgagagacaggccaacgaagtggactggtgggacatggtgtgtaacgtgaagaagctgatcaacgagaaaaaggaggatggcaaggtgttttggcagaatctggctggctacaagagacaggaagccctgagaccatacctgagcagcgaggaagatcggaagaagggaaagaaattcgctcggtaccagctgggcgacctgctgctgcacctggaaaagaagcacggcgaggactggggaaaggtgtacgacgaggcctgggagcggattgacaagaaagtggaaggcctgagcaagcacatcaagctggaagaggaacggagaagcgaggacgcccagagcaaggccgccctgaccgactggctgcgggctaaggccagcttcgtgatcgagggcctgaaggaggccgacaaggacgagttctgcagatgcgagctgaagctgcagaagtggtacggggacctgcggggaaagcccttcgccatcgaagccgagaacagcatcctggacatcagcggcttcagcaagcagtacaactgtgccttcatctggcagaaggacggcgtgaagaagctgaacctgtacctgatcatcaactacttcaagggcggcaagctgcggttcaagaagatcaaacctgaagccttcgaagccaacagattctacaccgtgatcaacaaaaagagcggcgagatcgtgcccatggaggtgaacttcaacttcgacgaccccaacctgatcatcctgcctctggcctttggcaagagacagggcagagaattcatctggaacgacctgctgtccctggaaaccggcagcctgaagctggccaacggaagagtgatcgagaagacactgtacaacagaagaacccggcaggatgagcctgccctgttcgtggccctgaccttcgagcggcgggaggtcctggactcctccaatatcaaaccaatgaacctgatcggcgtggcaagaggcgaaaacatccccgccgtgatcgccctgaccgaccccgagggctgcccactgagccggtttaaggatagcctgggaaacccaacccacatcctgagaatcggcgagagctataaggagaagcagcggaccatccaggccaagaaggaggtggagcagcggagagccggcggctacagccggaagtacgccagcaaagccaagaatctggcagacgatatggtgagaaacaccgctagagatctgctgtactacgccgtgacccaggatgccatgctgatcttcgccaacctgagccggggcttcggccggcagggcaagcggaccttcatggccgagagacagtacacacggatggaggactggctgaccgccaagctggcctacgagggcctgagcaagacctacctgtccaagacactggcccagtacacctccaagacatgcagcaactgtgggtttaccatcaccagcgccgactacgacagggtgctggagaagctgaagaagacagcaacaggctggatgaccacaattaacggcaaggagctgaaggtggagggccagattacctactacaacagatacaagagacagaacgtagtcaaggacctgtccgtcgagctggatagactgagcgaagaatctgtgaacaacgacatctcctcctggacaaagggcagaagcggagaagctctgagcctcctgaagaaaagattctcccatagacccgtgcaggagaagttcgtgtgcctgaactgcggcttcgagacacacgcagccgagcaagccgccctgaacatcgccagatcctggctgttcctgcggagccaggagtacaagaaataccagacaaacaagacaaccggcaacaccgataagagagccttcgtcgagacctggcagtccttttaccggaagaagcttaaggaggtgtggaaacctgccgtgcggtctggcggatctggcggaggctccacaagcgcccaggaggtggtgaccttccaggacgtggccgtggacttcaccagggaggagtggaggctgctgagccccccccagaaggagctgtacaaggaggtgatgctggagaacgccaggaacctgctgagcgtgggcctgcccgccccccccgacgacgtggtgagctacctggagcagagggagggccccagcatgctggaccaggaggacctgaggacctgcggccccgagggcgagatcaggaccagccccaagaaaaagagaaaagtctaagctgccttctgcggggcttgccttctggccatgcccttcttctctcccttgcacctgtacctcttggtctttgaataaagcctgagtaggaaggctagcaaaaaaaaaaaaaaaaaaaaaaaaaaaaaaaaaaaaaaaaaaaaaaaaaaaaaaaaaaaaaaaaaaaaaaaaaaaaaaaa

SEQ ID NO: 3373 - RNA, 5419 nt, synthetic construct
  source 1..5419: mol_type = other RNA
aggaaataagagagaaaagaagagtaagaagaaatataagagccaccatggcccctaagaagaagcgtaaagtgagccgggtgaacggcagcggcagcggcggcggcatgaaccacgaccaggagttcgacccccctaaggtgtaccctcccgtccccgccgagaagagaaagcccatccgggtcctgagcctgttcgatggcatcgccaccggtctgctggtgctgaaggacctgggcatccaggtggataggtacattgcctccgaggtgtgcgaggactccatcaccgtgggaatggtgcgtcatcagggcaagatcatgtacgtgggcgacgtgcggagcgtgacacagaagcatatccaggagtggggccctttcgacctggtgatcggcggcagcccttgcaatgacctgagcatcgtgaacccagcccggaagggcctgtacgagggaaccggcagactgttcttcgagttttacagactgctgcacgacgcccggcctaaggaaggcgacgaccggcccttcttttggctgttcgagaatgtggtggccatgggagtcagcgacaagcgggatattagccggttcctggagagcaaccccgtgatgatcgatgccaaggaagtgagcgccgcccaccgggccagatacttctggggcaatctgcctggcatgaacagacccctggccagcaccgtgaacgacaagctggagctgcaggagtgcctggagcacggccggatcgccaagttcagcaaggtgagaaccatcaccacccgaagcaacagcatcaaacaaggcaaggaccagcactttcctgtgttcatgaacgagaaggaggacatcctgtggtgtaccgagatggagagagtgttcgggttcccagtccactacacagatgtcagcaacatgtctagactggccagacagagactgctgggaagaagctggtccgtccctgtgatcagacacctgttcgcccctctgaaggagtacttcgcctgcgtgagcagcggcaacagcaacgccaacagccggggccccagcttctctagcggcctggtgccactgtccctgagagggagccacatgggccccatggagatctacaaaaccgtgagcgcctggaagcggcagcctgtgcgcgtgctgagcctgtttcggaatatcgataaagtcctgaaaagcctgggattcctggagagcggctctggctccggcggtggcaccctgaagtacgtggaggatgtgacaaacgtggtcagacgggatgtggagaagtggggccccttcgatctggtgtacggcagcacccaacccctgggcagctcttgtgaccggtgccctggctggtacatgtttcagttccaccggatcctgcagtacgccctgccgagacaggagtcccagcggccattcttttggattttcatggacaacttgctgctgaccgaggatgaccaggaaactaccactcggttcctgcagaccgaagccgtgaccctgcaggacgtgagaggccgggactaccagaacgccatgcgggtgtggtccaacatccctggactgaaaagcaagcacgcacctctgacccctaaagaagaggagtacctgcaggcccaggtgcggagcagaagcaagctggacgcccctaaggtggatctgctggtgaagaattgcctcctgcccctgagagagtacttcaagtatttcagccagaatagtctgcccctgggcggcccaagcagcggcgcccctcctcccagcggcggcagcccagccggctccccaacctctaccgaggagggcacctctgagtccgccacccccgagagcggccctggcacctccaccgagcccagcgagggcagcgcacccggcagccctgccggcagccccacctccacagaggagggaaccagcaccgagcccagcgaaggcagcgccccaggcaccagcaccgagcctagtgagggcggctctggcggcggcagcgcccaggagattaaacggatcaacaagatcagaagaagacttgtgaaagacagcaacaccaagaaggccggcaagacaggccccatgaaaaccctgctggttagagtgatgacacccgatctgagagagcggctggaaaacctgagaaagaagcctgaaaatatcccccagcccatcagcaatacatctagagccaacctgaataagctgctgaccgattacaccgaaatgaagaaggcgatcctgcatgtgtactgggaagagttccagaaggaccctgtgggcctgatgagccgggtggcccagcctgccagcaagaagatcgatcagaacaagctgaaacctgagatggacgagaagggcaacctgaccaccgccggctttgcctgctctcagtgtggccagcccctgttcgtgtacaagctggagcaggtgtctgagaagggcaaggcttacaccaactacttcggacggtgcaatgtggccgagcacgaaaagctgatcctgctggcccagctgaagcccgagaaggatagcgacgaagccgtgacatatagcctgggaaagtttgggcagagggccctggatttctacagcattcatgtgaccaaggagtccacccaccccgtgaagcccctggcccagatcgccggaaacagatacgcctccggacctgtgggaaaggccctgagcgacgcatgtatgggcacaatcgcctccttcctgtctaagtaccaggacatcatcatcgaacaccagaaggtggtgaagggcaaccagaagagactggagagcctgcgggagctggccggcaaggaaaacctggaataccctagcgtgaccctgccacctcagcctcacaccaaggagggcgttgatgcctacaacgaagtgatcgcccgggtgcgaatgtgggtgaacctgaacctgtggcagaagctgaagctaagcagagatgatgccaagcctctgctgagactgaagggattcccttcctttcctctggtcgagagacaggccaacgaagtggactggtgggacatggtgtgtaacgtgaagaagctgatcaacgagaaaaaggaggatggcaaggtgttttggcagaatctggctggctacaagagacaggaagccctgagaccatacctgagcagcgaggaagatcggaagaagggaaagaaattcgctcggtaccagctgggcgacctgctgctgcacctggaaaagaagcacggcgaggactggggaaaggtgtacgacgaggcctgggagcggattgacaagaaagtggaaggcctgagcaagcacatcaagctggaagaggaacggagaagcgaggacgcccagagcaaggccgccctgaccgactggctgcgggctaaggccagcttcgtgatcgagggcctgaaggaggccgacaaggacgagttctgcagatgcgagctgaagctgcagaagtggtacggggacctgcggggaaagcccttcgccatcgaagccgagaacagcatcctggacatcagcggcttcagcaagcagtacaactgtgccttcatctggcagaaggacggcgtgaagaagctgaacctgtacctgatcatcaactacttcaagggcggcaagctgcggttcaagaagatcaaacctgaagccttcgaagccaacagattctacaccgtgatcaacaaaaagagcggcgagatcgtgcccatggaggtgaacttcaacttcgacgaccccaacctgatcatcctgcctctggcctttggcaagagacagggcagagaattcatctggaacgacctgctgtccctggaaaccggcagcctgaagctggccaacggaagagtgatcgagaagacactgtacaacagaagaacccggcaggatgagcctgccctgttcgtggccctgaccttcgagcggcgggaggtcctggactcctccaatatcaaaccaatgaacctgatcggcgtggcaagaggcgaaaacatccccgccgtgatcgccctgaccgaccccgagggctgcccactgagccggtttaaggatagcctgggaaacccaacccacatcctgagaatcggcgagagctataaggagaagcagcggaccatccaggccaagaaggaggtggagcagcggagagccggcggctacagccggaagtacgccagcaaagccaagaatctggcagacgatatggtgagaaacaccgctagagatctgctgtactacgccgtgacccaggatgccatgctgatcttcgccaacctgagccggggcttcggccggcagggcaagcggaccttcatggccgagagacagtacacacggatggaggactggctgaccgccaagctggcctacgagggcctgagcaagacctacctgtccaagacactggcccagtacacctccaagacatgcagcaactgtgggtttaccatcaccagcgccgactacgacagggtgctggagaagctgaagaagacagcaacaggctggatgaccacaattaacggcaaggagctgaaggtggagggccagattacctactacaacagatacaagagacagaacgtagtcaaggacctgtccgtcgagctggatagactgagcgaagaatctgtgaacaacgacatctcctcctggacaaagggcagaagcggagaagctctgagcctcctgaagaaaagattctcccatagacccgtgcaggagaagttcgtgtgcctgaactgcggcttcgagacacacgcagccgagcaagccgccctgaacatcgccagatcctggctgttcctgcggagccaggagtacaagaaataccagacaaacaagacaaccggcaacaccgataagagagccttcgtcgagacctggcagtccttttaccggaagaagcttaaggaggtgtggaaacctgccgtgcggtctggcggatctggcggaggctccacaagcttccaggaggccgtgaccttcaaggacgtggccgtggtgttcagcgaggaggagctgggcctgctgggccccgcccagaggaagctgtacagggacgtgatgctggagaacttcaggaacctggtgagcgtgggccacagcagcagcaagcccgacgtgatcagccagctggagagggaggagaagctgtgcaccaaggagttccacacccagggcggcggcaggaaccagaaggagatggagaccagccccaagaaaaagagaaaagtctaagctgccttctgcggggcttgccttctggccatgcccttcttctctcccttgcacctgtacctcttggtctttgaataaagcctgagtaggaaggctagcaaaaaaaaaaaaaaaaaaaaaaaaaaaaaaaaaaaaaaaaaaaaaaaaaaaaaaaaaaaaaaaaaaaaaaaaaaaaaaaa

SEQ ID NO: 3374 - RNA, 5419 nt, synthetic construct
  source 1..5419: mol_type = other RNA
aggaaataagagagaaaagaagagtaagaagaaatataagagccaccatggcccctaagaagaagcgtaaagtgagccgggtgaacggcagcggcagcggcggcggcatgaaccacgaccaggagttcgacccccctaaggtgtaccctcccgtccccgccgagaagagaaagcccatccgggtcctgagcctgttcgatggcatcgccaccggtctgctggtgctgaaggacctgggcatccaggtggataggtacattgcctccgaggtgtgcgaggactccatcaccgtgggaatggtgcgtcatcagggcaagatcatgtacgtgggcgacgtgcggagcgtgacacagaagcatatccaggagtggggccctttcgacctggtgatcggcggcagcccttgcaatgacctgagcatcgtgaacccagcccggaagggcctgtacgagggaaccggcagactgttcttcgagttttacagactgctgcacgacgcccggcctaaggaaggcgacgaccggcccttcttttggctgttcgagaatgtggtggccatgggagtcagcgacaagcgggatattagccggttcctggagagcaaccccgtgatgatcgatgccaaggaagtgagcgccgcccaccgggccagatacttctggggcaatctgcctggcatgaacagacccctggccagcaccgtgaacgacaagctggagctgcaggagtgcctggagcacggccggatcgccaagttcagcaaggtgagaaccatcaccacccgaagcaacagcatcaaacaaggcaaggaccagcactttcctgtgttcatgaacgagaaggaggacatcctgtggtgtaccgagatggagagagtgttcgggttcccagtccactacacagatgtcagcaacatgtctagactggccagacagagactgctgggaagaagctggtccgtccctgtgatcagacacctgttcgcccctctgaaggagtacttcgcctgcgtgagcagcggcaacagcaacgccaacagccggggccccagcttctctagcggcctggtgccactgtccctgagagggagccacatgggccccatggagatctacaaaaccgtgagcgcctggaagcggcagcctgtgcgcgtgctgagcctgtttcggaatatcgataaagtcctgaaaagcctgggattcctggagagcggctctggctccggcggtggcaccctgaagtacgtggaggatgtgacaaacgtggtcagacgggatgtggagaagtggggccccttcgatctggtgtacggcagcacccaacccctgggcagctcttgtgaccggtgccctggctggtacatgtttcagttccaccggatcctgcagtacgccctgccgagacaggagtcccagcggccattcttttggattttcatggacaacttgctgctgaccgaggatgaccaggaaactaccactcggttcctgcagaccgaagccgtgaccctgcaggacgtgagaggccgggactaccagaacgccatgcgggtgtggtccaacatccctggactgaaaagcaagcacgcacctctgacccctaaagaagaggagtacctgcaggcccaggtgcggagcagaagcaagctggacgcccctaaggtggatctgctggtgaagaattgcctcctgcccctgagagagtacttcaagtatttcagccagaatagtctgcccctgggcggcccaagcagcggcgcccctcctcccagcggcggcagcccagccggctccccaacctctaccgaggagggcacctctgagtccgccacccccgagagcggccctggcacctccaccgagcccagcgagggcagcgcacccggcagccctgccggcagccccacctccacagaggagggaaccagcaccgagcccagcgaaggcagcgccccaggcaccagcaccgagcctagtgagggcggctctggcggcggcagcgcccaggagattaaacggatcaacaagatcagaagaagacttgtgaaagacagcaacaccaagaaggccggcaagacaggccccatgaaaaccctgctggttagagtgatgacacccgatctgagagagcggctggaaaacctgagaaagaagcctgaaaatatcccccagcccatcagcaatacatctagagccaacctgaataagctgctgaccgattacaccgaaatgaagaaggcgatcctgcatgtgtactgggaagagttccagaaggaccctgtgggcctgatgagccgggtggcccagcctgccagcaagaagatcgatcagaacaagctgaaacctgagatggacgagaagggcaacctgaccaccgccggctttgcctgctctcagtgtggccagcccctgttcgtgtacaagctggagcaggtgtctgagaagggcaaggcttacaccaactacttcggacggtgcaatgtggccgagcacgaaaagctgatcctgctggcccagctgaagcccgagaaggatagcgacgaagccgtgacatatagcctgggaaagtttgggcagagggccctggatttctacagcattcatgtgaccaaggagtccacccaccccgtgaagcccctggcccagatcgccggaaacagatacgcctccggacctgtgggaaaggccctgagcgacgcatgtatgggcacaatcgcctccttcctgtctaagtaccaggacatcatcatcgaacaccagaaggtggtgaagggcaaccagaagagactggagagcctgcgggagctggccggcaaggaaaacctggaataccctagcgtgaccctgccacctcagcctcacaccaaggagggcgttgatgcctacaacgaagtgatcgcccgggtgcgaatgtgggtgaacctgaacctgtggcagaagctgaagctaagcagagatgatgccaagcctctgctgagactgaagggattcccttcctttcctctggtcgagagacaggccaacgaagtggactggtgggacatggtgtgtaacgtgaagaagctgatcaacgagaaaaaggaggatggcaaggtgttttggcagaatctggctggctacaagagacaggaagccctgagaccatacctgagcagcgaggaagatcggaagaagggaaagaaattcgctcggtaccagctgggcgacctgctgctgcacctggaaaagaagcacggcgaggactggggaaaggtgtacgacgaggcctgggagcggattgacaagaaagtggaaggcctgagcaagcacatcaagctggaagaggaacggagaagcgaggacgcccagagcaaggccgccctgaccgactggctgcgggctaaggccagcttcgtgatcgagggcctgaaggaggccgacaaggacgagttctgcagatgcgagctgaagctgcagaagtggtacggggacctgcggggaaagcccttcgccatcgaagccgagaacagcatcctggacatcagcggcttcagcaagcagtacaactgtgccttcatctggcagaaggacggcgtgaagaagctgaacctgtacctgatcatcaactacttcaagggcggcaagctgcggttcaagaagatcaaacctgaagccttcgaagccaacagattctacaccgtgatcaacaaaaagagcggcgagatcgtgcccatggaggtgaacttcaacttcgacgaccccaacctgatcatcctgcctctggcctttggcaagagacagggcagagaattcatctggaacgacctgctgtccctggaaaccggcagcctgaagctggccaacggaagagtgatcgagaagacactgtacaacagaagaacccggcaggatgagcctgccctgttcgtggccctgaccttcgagcggcgggaggtcctggactcctccaatatcaaaccaatgaacctgatcggcgtggcaagaggcgaaaacatccccgccgtgatcgccctgaccgaccccgagggctgcccactgagccggtttaaggatagcctgggaaacccaacccacatcctgagaatcggcgagagctataaggagaagcagcggaccatccaggccaagaaggaggtggagcagcggagagccggcggctacagccggaagtacgccagcaaagccaagaatctggcagacgatatggtgagaaacaccgctagagatctgctgtactacgccgtgacccaggatgccatgctgatcttcgccaacctgagccggggcttcggccggcagggcaagcggaccttcatggccgagagacagtacacacggatggaggactggctgaccgccaagctggcctacgagggcctgagcaagacctacctgtccaagacactggcccagtacacctccaagacatgcagcaactgtgggtttaccatcaccagcgccgactacgacagggtgctggagaagctgaagaagacagcaacaggctggatgaccacaattaacggcaaggagctgaaggtggagggccagattacctactacaacagatacaagagacagaacgtagtcaaggacctgtccgtcgagctggatagactgagcgaagaatctgtgaacaacgacatctcctcctggacaaagggcagaagcggagaagctctgagcctcctgaagaaaagattctcccatagacccgtgcaggagaagttcgtgtgcctgaactgcggcttcgagacacacgcagccgagcaagccgccctgaacatcgccagatcctggctgttcctgcggagccaggagtacaagaaataccagacaaacaagacaaccggcaacaccgataagagagccttcgtcgagacctggcagtccttttaccggaagaagcttaaggaggtgtggaaacctgccgtgcggtctggcggatctggcggaggctccacaagcatgatcaagttccagatggtgaccttcaaggacgtggccgtggtgttcaccgaggaggagctgggcctgctggacagcgtgcagaggaagctgtacagggacgtgatgctggagaacttcaggaacctgctgctggtggcccaccagcccttcaagcccgacctgatcagccagctggagagggaggagaagctgctgatggtggagaccgagacccccggcgacggctgcagcggcaggaagaccagccccaagaaaaagagaaaagtctaagctgccttctgcggggcttgccttctggccatgcccttcttctctcccttgcacctgtacctcttggtctttgaataaagcctgagtaggaaggctagcaaaaaaaaaaaaaaaaaaaaaaaaaaaaaaaaaaaaaaaaaaaaaaaaaaaaaaaaaaaaaaaaaaaaaaaaaaaaaaaa

SEQ ID NO: 3375 - RNA, 5419 nt, synthetic construct
  source 1..5419: mol_type = other RNA
aggaaataagagagaaaagaagagtaagaagaaatataagagccaccatggcccctaagaagaagcgtaaagtgagccgggtgaacggcagcggcagcggcggcggcatgaaccacgaccaggagttcgacccccctaaggtgtaccctcccgtccccgccgagaagagaaagcccatccgggtcctgagcctgttcgatggcatcgccaccggtctgctggtgctgaaggacctgggcatccaggtggataggtacattgcctccgaggtgtgcgaggactccatcaccgtgggaatggtgcgtcatcagggcaagatcatgtacgtgggcgacgtgcggagcgtgacacagaagcatatccaggagtggggccctttcgacctggtgatcggcggcagcccttgcaatgacctgagcatcgtgaacccagcccggaagggcctgtacgagggaaccggcagactgttcttcgagttttacagactgctgcacgacgcccggcctaaggaaggcgacgaccggcccttcttttggctgttcgagaatgtggtggccatgggagtcagcgacaagcgggatattagccggttcctggagagcaaccccgtgatgatcgatgccaaggaagtgagcgccgcccaccgggccagatacttctggggcaatctgcctggcatgaacagacccctggccagcaccgtgaacgacaagctggagctgcaggagtgcctggagcacggccggatcgccaagttcagcaaggtgagaaccatcaccacccgaagcaacagcatcaaacaaggcaaggaccagcactttcctgtgttcatgaacgagaaggaggacatcctgtggtgtaccgagatggagagagtgttcgggttcccagtccactacacagatgtcagcaacatgtctagactggccagacagagactgctgggaagaagctggtccgtccctgtgatcagacacctgttcgcccctctgaaggagtacttcgcctgcgtgagcagcggcaacagcaacgccaacagccggggccccagcttctctagcggcctggtgccactgtccctgagagggagccacatgggccccatggagatctacaaaaccgtgagcgcctggaagcggcagcctgtgcgcgtgctgagcctgtttcggaatatcgataaagtcctgaaaagcctgggattcctggagagcggctctggctccggcggtggcaccctgaagtacgtggaggatgtgacaaacgtggtcagacgggatgtggagaagtggggccccttcgatctggtgtacggcagcacccaacccctgggcagctcttgtgaccggtgccctggctggtacatgtttcagttccaccggatcctgcagtacgccctgccgagacaggagtcccagcggccattcttttggattttcatggacaacttgctgctgaccgaggatgaccaggaaactaccactcggttcctgcagaccgaagccgtgaccctgcaggacgtgagaggccgggactaccagaacgccatgcgggtgtggtccaacatccctggactgaaaagcaagcacgcacctctgacccctaaagaagaggagtacctgcaggcccaggtgcggagcagaagcaagctggacgcccctaaggtggatctgctggtgaagaattgcctcctgcccctgagagagtacttcaagtatttcagccagaatagtctgcccctgggcggcccaagcagcggcgcccctcctcccagcggcggcagcccagccggctccccaacctctaccgaggagggcacctctgagtccgccacccccgagagcggccctggcacctccaccgagcccagcgagggcagcgcacccggcagccctgccggcagccccacctccacagaggagggaaccagcaccgagcccagcgaaggcagcgccccaggcaccagcaccgagcctagtgagggcggctctggcggcggcagcgcccaggagattaaacggatcaacaagatcagaagaagacttgtgaaagacagcaacaccaagaaggccggcaagacaggccccatgaaaaccctgctggttagagtgatgacacccgatctgagagagcggctggaaaacctgagaaagaagcctgaaaatatcccccagcccatcagcaatacatctagagccaacctgaataagctgctgaccgattacaccgaaatgaagaaggcgatcctgcatgtgtactgggaagagttccagaaggaccctgtgggcctgatgagccgggtggcccagcctgccagcaagaagatcgatcagaacaagctgaaacctgagatggacgagaagggcaacctgaccaccgccggctttgcctgctctcagtgtggccagcccctgttcgtgtacaagctggagcaggtgtctgagaagggcaaggcttacaccaactacttcggacggtgcaatgtggccgagcacgaaaagctgatcctgctggcccagctgaagcccgagaaggatagcgacgaagccgtgacatatagcctgggaaagtttgggcagagggccctggatttctacagcattcatgtgaccaaggagtccacccaccccgtgaagcccctggcccagatcgccggaaacagatacgcctccggacctgtgggaaaggccctgagcgacgcatgtatgggcacaatcgcctccttcctgtctaagtaccaggacatcatcatcgaacaccagaaggtggtgaagggcaaccagaagagactggagagcctgcgggagctggccggcaaggaaaacctggaataccctagcgtgaccctgccacctcagcctcacaccaaggagggcgttgatgcctacaacgaagtgatcgcccgggtgcgaatgtgggtgaacctgaacctgtggcagaagctgaagctaagcagagatgatgccaagcctctgctgagactgaagggattcccttcctttcctctggtcgagagacaggccaacgaagtggactggtgggacatggtgtgtaacgtgaagaagctgatcaacgagaaaaaggaggatggcaaggtgttttggcagaatctggctggctacaagagacaggaagccctgagaccatacctgagcagcgaggaagatcggaagaagggaaagaaattcgctcggtaccagctgggcgacctgctgctgcacctggaaaagaagcacggcgaggactggggaaaggtgtacgacgaggcctgggagcggattgacaagaaagtggaaggcctgagcaagcacatcaagctggaagaggaacggagaagcgaggacgcccagagcaaggccgccctgaccgactggctgcgggctaaggccagcttcgtgatcgagggcctgaaggaggccgacaaggacgagttctgcagatgcgagctgaagctgcagaagtggtacggggacctgcggggaaagcccttcgccatcgaagccgagaacagcatcctggacatcagcggcttcagcaagcagtacaactgtgccttcatctggcagaaggacggcgtgaagaagctgaacctgtacctgatcatcaactacttcaagggcggcaagctgcggttcaagaagatcaaacctgaagccttcgaagccaacagattctacaccgtgatcaacaaaaagagcggcgagatcgtgcccatggaggtgaacttcaacttcgacgaccccaacctgatcatcctgcctctggcctttggcaagagacagggcagagaattcatctggaacgacctgctgtccctggaaaccggcagcctgaagctggccaacggaagagtgatcgagaagacactgtacaacagaagaacccggcaggatgagcctgccctgttcgtggccctgaccttcgagcggcgggaggtcctggactcctccaatatcaaaccaatgaacctgatcggcgtggcaagaggcgaaaacatccccgccgtgatcgccctgaccgaccccgagggctgcccactgagccggtttaaggatagcctgggaaacccaacccacatcctgagaatcggcgagagctataaggagaagcagcggaccatccaggccaagaaggaggtggagcagcggagagccggcggctacagccggaagtacgccagcaaagccaagaatctggcagacgatatggtgagaaacaccgctagagatctgctgtactacgccgtgacccaggatgccatgctgatcttcgccaacctgagccggggcttcggccggcagggcaagcggaccttcatggccgagagacagtacacacggatggaggactggctgaccgccaagctggcctacgagggcctgagcaagacctacctgtccaagacactggcccagtacacctccaagacatgcagcaactgtgggtttaccatcaccagcgccgactacgacagggtgctggagaagctgaagaagacagcaacaggctggatgaccacaattaacggcaaggagctgaaggtggagggccagattacctactacaacagatacaagagacagaacgtagtcaaggacctgtccgtcgagctggatagactgagcgaagaatctgtgaacaacgacatctcctcctggacaaagggcagaagcggagaagctctgagcctcctgaagaaaagattctcccatagacccgtgcaggagaagttcgtgtgcctgaactgcggcttcgagacacacgcagccgagcaagccgccctgaacatcgccagatcctggctgttcctgcggagccaggagtacaagaaataccagacaaacaagacaaccggcaacaccgataagagagccttcgtcgagacctggcagtccttttaccggaagaagcttaaggaggtgtggaaacctgccgtgcggtctggcggatctggcggaggctccacaagcagccagggcctgctgaccttcaaggacatcagcgtggacttcacccaggaggagtggggccagctggcccccgcccacaggaacctgtacagggaggtgatgctggagaactacggcaacctggtgagcgtggccggctaccagctgagcaagcccagcgtgatcagccagctggagaagggccaggagccctggatgaccgagaaggagggccccggcgacagcagcagcgacctgaagaacaccagccccaagaaaaagagaaaagtctaagctgccttctgcggggcttgccttctggccatgcccttcttctctcccttgcacctgtacctcttggtctttgaataaagcctgagtaggaaggctagcaaaaaaaaaaaaaaaaaaaaaaaaaaaaaaaaaaaaaaaaaaaaaaaaaaaaaaaaaaaaaaaaaaaaaaaaaaaaaaaa

SEQ ID NO: 3376 - RNA, 5419 nt, synthetic construct
  source 1..5419: mol_type = other RNA
aggaaataagagagaaaagaagagtaagaagaaatataagagccaccatggcccctaagaagaagcgtaaagtgagccgggtgaacggcagcggcagcggcggcggcatgaaccacgaccaggagttcgacccccctaaggtgtaccctcccgtccccgccgagaagagaaagcccatccgggtcctgagcctgttcgatggcatcgccaccggtctgctggtgctgaaggacctgggcatccaggtggataggtacattgcctccgaggtgtgcgaggactccatcaccgtgggaatggtgcgtcatcagggcaagatcatgtacgtgggcgacgtgcggagcgtgacacagaagcatatccaggagtggggccctttcgacctggtgatcggcggcagcccttgcaatgacctgagcatcgtgaacccagcccggaagggcctgtacgagggaaccggcagactgttcttcgagttttacagactgctgcacgacgcccggcctaaggaaggcgacgaccggcccttcttttggctgttcgagaatgtggtggccatgggagtcagcgacaagcgggatattagccggttcctggagagcaaccccgtgatgatcgatgccaaggaagtgagcgccgcccaccgggccagatacttctggggcaatctgcctggcatgaacagacccctggccagcaccgtgaacgacaagctggagctgcaggagtgcctggagcacggccggatcgccaagttcagcaaggtgagaaccatcaccacccgaagcaacagcatcaaacaaggcaaggaccagcactttcctgtgttcatgaacgagaaggaggacatcctgtggtgtaccgagatggagagagtgttcgggttcccagtccactacacagatgtcagcaacatgtctagactggccagacagagactgctgggaagaagctggtccgtccctgtgatcagacacctgttcgcccctctgaaggagtacttcgcctgcgtgagcagcggcaacagcaacgccaacagccggggccccagcttctctagcggcctggtgccactgtccctgagagggagccacatgggccccatggagatctacaaaaccgtgagcgcctggaagcggcagcctgtgcgcgtgctgagcctgtttcggaatatcgataaagtcctgaaaagcctgggattcctggagagcggctctggctccggcggtggcaccctgaagtacgtggaggatgtgacaaacgtggtcagacgggatgtggagaagtggggccccttcgatctggtgtacggcagcacccaacccctgggcagctcttgtgaccggtgccctggctggtacatgtttcagttccaccggatcctgcagtacgccctgccgagacaggagtcccagcggccattcttttggattttcatggacaacttgctgctgaccgaggatgaccaggaaactaccactcggttcctgcagaccgaagccgtgaccctgcaggacgtgagaggccgggactaccagaacgccatgcgggtgtggtccaacatccctggactgaaaagcaagcacgcacctctgacccctaaagaagaggagtacctgcaggcccaggtgcggagcagaagcaagctggacgcccctaaggtggatctgctggtgaagaattgcctcctgcccctgagagagtacttcaagtatttcagccagaatagtctgcccctgggcggcccaagcagcggcgcccctcctcccagcggcggcagcccagccggctccccaacctctaccgaggagggcacctctgagtccgccacccccgagagcggccctggcacctccaccgagcccagcgagggcagcgcacccggcagccctgccggcagccccacctccacagaggagggaaccagcaccgagcccagcgaaggcagcgccccaggcaccagcaccgagcctagtgagggcggctctggcggcggcagcgcccaggagattaaacggatcaacaagatcagaagaagacttgtgaaagacagcaacaccaagaaggccggcaagacaggccccatgaaaaccctgctggttagagtgatgacacccgatctgagagagcggctggaaaacctgagaaagaagcctgaaaatatcccccagcccatcagcaatacatctagagccaacctgaataagctgctgaccgattacaccgaaatgaagaaggcgatcctgcatgtgtactgggaagagttccagaaggaccctgtgggcctgatgagccgggtggcccagcctgccagcaagaagatcgatcagaacaagctgaaacctgagatggacgagaagggcaacctgaccaccgccggctttgcctgctctcagtgtggccagcccctgttcgtgtacaagctggagcaggtgtctgagaagggcaaggcttacaccaactacttcggacggtgcaatgtggccgagcacgaaaagctgatcctgctggcccagctgaagcccgagaaggatagcgacgaagccgtgacatatagcctgggaaagtttgggcagagggccctggatttctacagcattcatgtgaccaaggagtccacccaccccgtgaagcccctggcccagatcgccggaaacagatacgcctccggacctgtgggaaaggccctgagcgacgcatgtatgggcacaatcgcctccttcctgtctaagtaccaggacatcatcatcgaacaccagaaggtggtgaagggcaaccagaagagactggagagcctgcgggagctggccggcaaggaaaacctggaataccctagcgtgaccctgccacctcagcctcacaccaaggagggcgttgatgcctacaacgaagtgatcgcccgggtgcgaatgtgggtgaacctgaacctgtggcagaagctgaagctaagcagagatgatgccaagcctctgctgagactgaagggattcccttcctttcctctggtcgagagacaggccaacgaagtggactggtgggacatggtgtgtaacgtgaagaagctgatcaacgagaaaaaggaggatggcaaggtgttttggcagaatctggctggctacaagagacaggaagccctgagaccatacctgagcagcgaggaagatcggaagaagggaaagaaattcgctcggtaccagctgggcgacctgctgctgcacctggaaaagaagcacggcgaggactggggaaaggtgtacgacgaggcctgggagcggattgacaagaaagtggaaggcctgagcaagcacatcaagctggaagaggaacggagaagcgaggacgcccagagcaaggccgccctgaccgactggctgcgggctaaggccagcttcgtgatcgagggcctgaaggaggccgacaaggacgagttctgcagatgcgagctgaagctgcagaagtggtacggggacctgcggggaaagcccttcgccatcgaagccgagaacagcatcctggacatcagcggcttcagcaagcagtacaactgtgccttcatctggcagaaggacggcgtgaagaagctgaacctgtacctgatcatcaactacttcaagggcggcaagctgcggttcaagaagatcaaacctgaagccttcgaagccaacagattctacaccgtgatcaacaaaaagagcggcgagatcgtgcccatggaggtgaacttcaacttcgacgaccccaacctgatcatcctgcctctggcctttggcaagagacagggcagagaattcatctggaacgacctgctgtccctggaaaccggcagcctgaagctggccaacggaagagtgatcgagaagacactgtacaacagaagaacccggcaggatgagcctgccctgttcgtggccctgaccttcgagcggcgggaggtcctggactcctccaatatcaaaccaatgaacctgatcggcgtggcaagaggcgaaaacatccccgccgtgatcgccctgaccgaccccgagggctgcccactgagccggtttaaggatagcctgggaaacccaacccacatcctgagaatcggcgagagctataaggagaagcagcggaccatccaggccaagaaggaggtggagcagcggagagccggcggctacagccggaagtacgccagcaaagccaagaatctggcagacgatatggtgagaaacaccgctagagatctgctgtactacgccgtgacccaggatgccatgctgatcttcgccaacctgagccggggcttcggccggcagggcaagcggaccttcatggccgagagacagtacacacggatggaggactggctgaccgccaagctggcctacgagggcctgagcaagacctacctgtccaagacactggcccagtacacctccaagacatgcagcaactgtgggtttaccatcaccagcgccgactacgacagggtgctggagaagctgaagaagacagcaacaggctggatgaccacaattaacggcaaggagctgaaggtggagggccagattacctactacaacagatacaagagacagaacgtagtcaaggacctgtccgtcgagctggatagactgagcgaagaatctgtgaacaacgacatctcctcctggacaaagggcagaagcggagaagctctgagcctcctgaagaaaagattctcccatagacccgtgcaggagaagttcgtgtgcctgaactgcggcttcgagacacacgcagccgagcaagccgccctgaacatcgccagatcctggctgttcctgcggagccaggagtacaagaaataccagacaaacaagacaaccggcaacaccgataagagagccttcgtcgagacctggcagtccttttaccggaagaagcttaaggaggtgtggaaacctgccgtgcggtctggcggatctggcggaggctccacaagcatgctgttccaggagctggtgaccttcaaggacgtggccgtggacttcacccaggaggagtggaagtgcctggcccccagccagaaggagctgtacagggaggtgatgctggagaactacaggaacctggtgagcctgggcagggccgtgagcaagcccgagctgatccaccagctggagaggggcgagaccccctggaggcccaagggcgacggctggaggaacagcctgaggcccggcgagaccagccccaagaaaaagagaaaagtctaagctgccttctgcggggcttgccttctggccatgcccttcttctctcccttgcacctgtacctcttggtctttgaataaagcctgagtaggaaggctagcaaaaaaaaaaaaaaaaaaaaaaaaaaaaaaaaaaaaaaaaaaaaaaaaaaaaaaaaaaaaaaaaaaaaaaaaaaaaaaaa

SEQ ID NO: 3377 - RNA, 5419 nt, synthetic construct
  source 1..5419: mol_type = other RNA
aggaaataagagagaaaagaagagtaagaagaaatataagagccaccatggcccctaagaagaagcgtaaagtgagccgggtgaacggcagcggcagcggcggcggcatgaaccacgaccaggagttcgacccccctaaggtgtaccctcccgtccccgccgagaagagaaagcccatccgggtcctgagcctgttcgatggcatcgccaccggtctgctggtgctgaaggacctgggcatccaggtggataggtacattgcctccgaggtgtgcgaggactccatcaccgtgggaatggtgcgtcatcagggcaagatcatgtacgtgggcgacgtgcggagcgtgacacagaagcatatccaggagtggggccctttcgacctggtgatcggcggcagcccttgcaatgacctgagcatcgtgaacccagcccggaagggcctgtacgagggaaccggcagactgttcttcgagttttacagactgctgcacgacgcccggcctaaggaaggcgacgaccggcccttcttttggctgttcgagaatgtggtggccatgggagtcagcgacaagcgggatattagccggttcctggagagcaaccccgtgatgatcgatgccaaggaagtgagcgccgcccaccgggccagatacttctggggcaatctgcctggcatgaacagacccctggccagcaccgtgaacgacaagctggagctgcaggagtgcctggagcacggccggatcgccaagttcagcaaggtgagaaccatcaccacccgaagcaacagcatcaaacaaggcaaggaccagcactttcctgtgttcatgaacgagaaggaggacatcctgtggtgtaccgagatggagagagtgttcgggttcccagtccactacacagatgtcagcaacatgtctagactggccagacagagactgctgggaagaagctggtccgtccctgtgatcagacacctgttcgcccctctgaaggagtacttcgcctgcgtgagcagcggcaacagcaacgccaacagccggggccccagcttctctagcggcctggtgccactgtccctgagagggagccacatgggccccatggagatctacaaaaccgtgagcgcctggaagcggcagcctgtgcgcgtgctgagcctgtttcggaatatcgataaagtcctgaaaagcctgggattcctggagagcggctctggctccggcggtggcaccctgaagtacgtggaggatgtgacaaacgtggtcagacgggatgtggagaagtggggccccttcgatctggtgtacggcagcacccaacccctgggcagctcttgtgaccggtgccctggctggtacatgtttcagttccaccggatcctgcagtacgccctgccgagacaggagtcccagcggccattcttttggattttcatggacaacttgctgctgaccgaggatgaccaggaaactaccactcggttcctgcagaccgaagccgtgaccctgcaggacgtgagaggccgggactaccagaacgccatgcgggtgtggtccaacatccctggactgaaaagcaagcacgcacctctgacccctaaagaagaggagtacctgcaggcccaggtgcggagcagaagcaagctggacgcccctaaggtggatctgctggtgaagaattgcctcctgcccctgagagagtacttcaagtatttcagccagaatagtctgcccctgggcggcccaagcagcggcgcccctcctcccagcggcggcagcccagccggctccccaacctctaccgaggagggcacctctgagtccgccacccccgagagcggccctggcacctccaccgagcccagcgagggcagcgcacccggcagccctgccggcagccccacctccacagaggagggaaccagcaccgagcccagcgaaggcagcgccccaggcaccagcaccgagcctagtgagggcggctctggcggcggcagcgcccaggagattaaacggatcaacaagatcagaagaagacttgtgaaagacagcaacaccaagaaggccggcaagacaggccccatgaaaaccctgctggttagagtgatgacacccgatctgagagagcggctggaaaacctgagaaagaagcctgaaaatatcccccagcccatcagcaatacatctagagccaacctgaataagctgctgaccgattacaccgaaatgaagaaggcgatcctgcatgtgtactgggaagagttccagaaggaccctgtgggcctgatgagccgggtggcccagcctgccagcaagaagatcgatcagaacaagctgaaacctgagatggacgagaagggcaacctgaccaccgccggctttgcctgctctcagtgtggccagcccctgttcgtgtacaagctggagcaggtgtctgagaagggcaaggcttacaccaactacttcggacggtgcaatgtggccgagcacgaaaagctgatcctgctggcccagctgaagcccgagaaggatagcgacgaagccgtgacatatagcctgggaaagtttgggcagagggccctggatttctacagcattcatgtgaccaaggagtccacccaccccgtgaagcccctggcccagatcgccggaaacagatacgcctccggacctgtgggaaaggccctgagcgacgcatgtatgggcacaatcgcctccttcctgtctaagtaccaggacatcatcatcgaacaccagaaggtggtgaagggcaaccagaagagactggagagcctgcgggagctggccggcaaggaaaacctggaataccctagcgtgaccctgccacctcagcctcacaccaaggagggcgttgatgcctacaacgaagtgatcgcccgggtgcgaatgtgggtgaacctgaacctgtggcagaagctgaagctaagcagagatgatgccaagcctctgctgagactgaagggattcccttcctttcctctggtcgagagacaggccaacgaagtggactggtgggacatggtgtgtaacgtgaagaagctgatcaacgagaaaaaggaggatggcaaggtgttttggcagaatctggctggctacaagagacaggaagccctgagaccatacctgagcagcgaggaagatcggaagaagggaaagaaattcgctcggtaccagctgggcgacctgctgctgcacctggaaaagaagcacggcgaggactggggaaaggtgtacgacgaggcctgggagcggattgacaagaaagtggaaggcctgagcaagcacatcaagctggaagaggaacggagaagcgaggacgcccagagcaaggccgccctgaccgactggctgcgggctaaggccagcttcgtgatcgagggcctgaaggaggccgacaaggacgagttctgcagatgcgagctgaagctgcagaagtggtacggggacctgcggggaaagcccttcgccatcgaagccgagaacagcatcctggacatcagcggcttcagcaagcagtacaactgtgccttcatctggcagaaggacggcgtgaagaagctgaacctgtacctgatcatcaactacttcaagggcggcaagctgcggttcaagaagatcaaacctgaagccttcgaagccaacagattctacaccgtgatcaacaaaaagagcggcgagatcgtgcccatggaggtgaacttcaacttcgacgaccccaacctgatcatcctgcctctggcctttggcaagagacagggcagagaattcatctggaacgacctgctgtccctggaaaccggcagcctgaagctggccaacggaagagtgatcgagaagacactgtacaacagaagaacccggcaggatgagcctgccctgttcgtggccctgaccttcgagcggcgggaggtcctggactcctccaatatcaaaccaatgaacctgatcggcgtggcaagaggcgaaaacatccccgccgtgatcgccctgaccgaccccgagggctgcccactgagccggtttaaggatagcctgggaaacccaacccacatcctgagaatcggcgagagctataaggagaagcagcggaccatccaggccaagaaggaggtggagcagcggagagccggcggctacagccggaagtacgccagcaaagccaagaatctggcagacgatatggtgagaaacaccgctagagatctgctgtactacgccgtgacccaggatgccatgctgatcttcgccaacctgagccggggcttcggccggcagggcaagcggaccttcatggccgagagacagtacacacggatggaggactggctgaccgccaagctggcctacgagggcctgagcaagacctacctgtccaagacactggcccagtacacctccaagacatgcagcaactgtgggtttaccatcaccagcgccgactacgacagggtgctggagaagctgaagaagacagcaacaggctggatgaccacaattaacggcaaggagctgaaggtggagggccagattacctactacaacagatacaagagacagaacgtagtcaaggacctgtccgtcgagctggatagactgagcgaagaatctgtgaacaacgacatctcctcctggacaaagggcagaagcggagaagctctgagcctcctgaagaaaagattctcccatagacccgtgcaggagaagttcgtgtgcctgaactgcggcttcgagacacacgcagccgagcaagccgccctgaacatcgccagatcctggctgttcctgcggagccaggagtacaagaaataccagacaaacaagacaaccggcaacaccgataagagagccttcgtcgagacctggcagtccttttaccggaagaagcttaaggaggtgtggaaacctgccgtgcggtctggcggatctggcggaggctccacaagcatggagcccagggacgccttcgaggacgtggccgtgtacttcaccagggaggagtgggccctgctggacgacggcgacaagggcctgtacagggaccagatgctgaggaactaccaggccctggtgagcctgggctacaggggccccacccccgacctgatctgctgcatccagaggggcaaggtggagctgtgggtgagggacggcgaggaccacggcgagatcagcggcagcgaggacctgaccagccccaagaaaaagagaaaagtctaagctgccttctgcggggcttgccttctggccatgcccttcttctctcccttgcacctgtacctcttggtctttgaataaagcctgagtaggaaggctagcaaaaaaaaaaaaaaaaaaaaaaaaaaaaaaaaaaaaaaaaaaaaaaaaaaaaaaaaaaaaaaaaaaaaaaaaaaaaaaaa

SEQ ID NO: 3378 - RNA, 5419 nt, synthetic construct
  source 1..5419: mol_type = other RNA
aggaaataagagagaaaagaagagtaagaagaaatataagagccaccatggcccctaagaagaagcgtaaagtgagccgggtgaacggcagcggcagcggcggcggcatgaaccacgaccaggagttcgacccccctaaggtgtaccctcccgtccccgccgagaagagaaagcccatccgggtcctgagcctgttcgatggcatcgccaccggtctgctggtgctgaaggacctgggcatccaggtggataggtacattgcctccgaggtgtgcgaggactccatcaccgtgggaatggtgcgtcatcagggcaagatcatgtacgtgggcgacgtgcggagcgtgacacagaagcatatccaggagtggggccctttcgacctggtgatcggcggcagcccttgcaatgacctgagcatcgtgaacccagcccggaagggcctgtacgagggaaccggcagactgttcttcgagttttacagactgctgcacgacgcccggcctaaggaaggcgacgaccggcccttcttttggctgttcgagaatgtggtggccatgggagtcagcgacaagcgggatattagccggttcctggagagcaaccccgtgatgatcgatgccaaggaagtgagcgccgcccaccgggccagatacttctggggcaatctgcctggcatgaacagacccctggccagcaccgtgaacgacaagctggagctgcaggagtgcctggagcacggccggatcgccaagttcagcaaggtgagaaccatcaccacccgaagcaacagcatcaaacaaggcaaggaccagcactttcctgtgttcatgaacgagaaggaggacatcctgtggtgtaccgagatggagagagtgttcgggttcccagtccactacacagatgtcagcaacatgtctagactggccagacagagactgctgggaagaagctggtccgtccctgtgatcagacacctgttcgcccctctgaaggagtacttcgcctgcgtgagcagcggcaacagcaacgccaacagccggggccccagcttctctagcggcctggtgccactgtccctgagagggagccacatgggccccatggagatctacaaaaccgtgagcgcctggaagcggcagcctgtgcgcgtgctgagcctgtttcggaatatcgataaagtcctgaaaagcctgggattcctggagagcggctctggctccggcggtggcaccctgaagtacgtggaggatgtgacaaacgtggtcagacgggatgtggagaagtggggccccttcgatctggtgtacggcagcacccaacccctgggcagctcttgtgaccggtgccctggctggtacatgtttcagttccaccggatcctgcagtacgccctgccgagacaggagtcccagcggccattcttttggattttcatggacaacttgctgctgaccgaggatgaccaggaaactaccactcggttcctgcagaccgaagccgtgaccctgcaggacgtgagaggccgggactaccagaacgccatgcgggtgtggtccaacatccctggactgaaaagcaagcacgcacctctgacccctaaagaagaggagtacctgcaggcccaggtgcggagcagaagcaagctggacgcccctaaggtggatctgctggtgaagaattgcctcctgcccctgagagagtacttcaagtatttcagccagaatagtctgcccctgggcggcccaagcagcggcgcccctcctcccagcggcggcagcccagccggctccccaacctctaccgaggagggcacctctgagtccgccacccccgagagcggccctggcacctccaccgagcccagcgagggcagcgcacccggcagccctgccggcagccccacctccacagaggagggaaccagcaccgagcccagcgaaggcagcgccccaggcaccagcaccgagcctagtgagggcggctctggcggcggcagcgcccaggagattaaacggatcaacaagatcagaagaagacttgtgaaagacagcaacaccaagaaggccggcaagacaggccccatgaaaaccctgctggttagagtgatgacacccgatctgagagagcggctggaaaacctgagaaagaagcctgaaaatatcccccagcccatcagcaatacatctagagccaacctgaataagctgctgaccgattacaccgaaatgaagaaggcgatcctgcatgtgtactgggaagagttccagaaggaccctgtgggcctgatgagccgggtggcccagcctgccagcaagaagatcgatcagaacaagctgaaacctgagatggacgagaagggcaacctgaccaccgccggctttgcctgctctcagtgtggccagcccctgttcgtgtacaagctggagcaggtgtctgagaagggcaaggcttacaccaactacttcggacggtgcaatgtggccgagcacgaaaagctgatcctgctggcccagctgaagcccgagaaggatagcgacgaagccgtgacatatagcctgggaaagtttgggcagagggccctggatttctacagcattcatgtgaccaaggagtccacccaccccgtgaagcccctggcccagatcgccggaaacagatacgcctccggacctgtgggaaaggccctgagcgacgcatgtatgggcacaatcgcctccttcctgtctaagtaccaggacatcatcatcgaacaccagaaggtggtgaagggcaaccagaagagactggagagcctgcgggagctggccggcaaggaaaacctggaataccctagcgtgaccctgccacctcagcctcacaccaaggagggcgttgatgcctacaacgaagtgatcgcccgggtgcgaatgtgggtgaacctgaacctgtggcagaagctgaagctaagcagagatgatgccaagcctctgctgagactgaagggattcccttcctttcctctggtcgagagacaggccaacgaagtggactggtgggacatggtgtgtaacgtgaagaagctgatcaacgagaaaaaggaggatggcaaggtgttttggcagaatctggctggctacaagagacaggaagccctgagaccatacctgagcagcgaggaagatcggaagaagggaaagaaattcgctcggtaccagctgggcgacctgctgctgcacctggaaaagaagcacggcgaggactggggaaaggtgtacgacgaggcctgggagcggattgacaagaaagtggaaggcctgagcaagcacatcaagctggaagaggaacggagaagcgaggacgcccagagcaaggccgccctgaccgactggctgcgggctaaggccagcttcgtgatcgagggcctgaaggaggccgacaaggacgagttctgcagatgcgagctgaagctgcagaagtggtacggggacctgcggggaaagcccttcgccatcgaagccgagaacagcatcctggacatcagcggcttcagcaagcagtacaactgtgccttcatctggcagaaggacggcgtgaagaagctgaacctgtacctgatcatcaactacttcaagggcggcaagctgcggttcaagaagatcaaacctgaagccttcgaagccaacagattctacaccgtgatcaacaaaaagagcggcgagatcgtgcccatggaggtgaacttcaacttcgacgaccccaacctgatcatcctgcctctggcctttggcaagagacagggcagagaattcatctggaacgacctgctgtccctggaaaccggcagcctgaagctggccaacggaagagtgatcgagaagacactgtacaacagaagaacccggcaggatgagcctgccctgttcgtggccctgaccttcgagcggcgggaggtcctggactcctccaatatcaaaccaatgaacctgatcggcgtggcaagaggcgaaaacatccccgccgtgatcgccctgaccgaccccgagggctgcccactgagccggtttaaggatagcctgggaaacccaacccacatcctgagaatcggcgagagctataaggagaagcagcggaccatccaggccaagaaggaggtggagcagcggagagccggcggctacagccggaagtacgccagcaaagccaagaatctggcagacgatatggtgagaaacaccgctagagatctgctgtactacgccgtgacccaggatgccatgctgatcttcgccaacctgagccggggcttcggccggcagggcaagcggaccttcatggccgagagacagtacacacggatggaggactggctgaccgccaagctggcctacgagggcctgagcaagacctacctgtccaagacactggcccagtacacctccaagacatgcagcaactgtgggtttaccatcaccagcgccgactacgacagggtgctggagaagctgaagaagacagcaacaggctggatgaccacaattaacggcaaggagctgaaggtggagggccagattacctactacaacagatacaagagacagaacgtagtcaaggacctgtccgtcgagctggatagactgagcgaagaatctgtgaacaacgacatctcctcctggacaaagggcagaagcggagaagctctgagcctcctgaagaaaagattctcccatagacccgtgcaggagaagttcgtgtgcctgaactgcggcttcgagacacacgcagccgagcaagccgccctgaacatcgccagatcctggctgttcctgcggagccaggagtacaagaaataccagacaaacaagacaaccggcaacaccgataagagagccttcgtcgagacctggcagtccttttaccggaagaagcttaaggaggtgtggaaacctgccgtgcggtctggcggatctggcggaggctccacaagcgcccaggcccccctgagcttcgaggacgtggccgtgagcttcagcagggaggagtggaggctgctggtgcccgcccagaaggacctgtacagggacgtgatgctggagaactacaggaacctggtgagcgtgggctaccaggccagcgagcccgacagcctgttcaggctggagcacggcggccccctgtgggtggtggagggcgccgcccccaggcccccctgccccggcgagtacgtggccaccagccccaagaaaaagagaaaagtctaagctgccttctgcggggcttgccttctggccatgcccttcttctctcccttgcacctgtacctcttggtctttgaataaagcctgagtaggaaggctagcaaaaaaaaaaaaaaaaaaaaaaaaaaaaaaaaaaaaaaaaaaaaaaaaaaaaaaaaaaaaaaaaaaaaaaaaaaaaaaaa

SEQ ID NO: 3379 - RNA, 5419 nt, synthetic construct
  source 1..5419: mol_type = other RNA
aggaaataagagagaaaagaagagtaagaagaaatataagagccaccatggcccctaagaagaagcgtaaagtgagccgggtgaacggcagcggcagcggcggcggcatgaaccacgaccaggagttcgacccccctaaggtgtaccctcccgtccccgccgagaagagaaagcccatccgggtcctgagcctgttcgatggcatcgccaccggtctgctggtgctgaaggacctgggcatccaggtggataggtacattgcctccgaggtgtgcgaggactccatcaccgtgggaatggtgcgtcatcagggcaagatcatgtacgtgggcgacgtgcggagcgtgacacagaagcatatccaggagtggggccctttcgacctggtgatcggcggcagcccttgcaatgacctgagcatcgtgaacccagcccggaagggcctgtacgagggaaccggcagactgttcttcgagttttacagactgctgcacgacgcccggcctaaggaaggcgacgaccggcccttcttttggctgttcgagaatgtggtggccatgggagtcagcgacaagcgggatattagccggttcctggagagcaaccccgtgatgatcgatgccaaggaagtgagcgccgcccaccgggccagatacttctggggcaatctgcctggcatgaacagacccctggccagcaccgtgaacgacaagctggagctgcaggagtgcctggagcacggccggatcgccaagttcagcaaggtgagaaccatcaccacccgaagcaacagcatcaaacaaggcaaggaccagcactttcctgtgttcatgaacgagaaggaggacatcctgtggtgtaccgagatggagagagtgttcgggttcccagtccactacacagatgtcagcaacatgtctagactggccagacagagactgctgggaagaagctggtccgtccctgtgatcagacacctgttcgcccctctgaaggagtacttcgcctgcgtgagcagcggcaacagcaacgccaacagccggggccccagcttctctagcggcctggtgccactgtccctgagagggagccacatgggccccatggagatctacaaaaccgtgagcgcctggaagcggcagcctgtgcgcgtgctgagcctgtttcggaatatcgataaagtcctgaaaagcctgggattcctggagagcggctctggctccggcggtggcaccctgaagtacgtggaggatgtgacaaacgtggtcagacgggatgtggagaagtggggccccttcgatctggtgtacggcagcacccaacccctgggcagctcttgtgaccggtgccctggctggtacatgtttcagttccaccggatcctgcagtacgccctgccgagacaggagtcccagcggccattcttttggattttcatggacaacttgctgctgaccgaggatgaccaggaaactaccactcggttcctgcagaccgaagccgtgaccctgcaggacgtgagaggccgggactaccagaacgccatgcgggtgtggtccaacatccctggactgaaaagcaagcacgcacctctgacccctaaagaagaggagtacctgcaggcccaggtgcggagcagaagcaagctggacgcccctaaggtggatctgctggtgaagaattgcctcctgcccctgagagagtacttcaagtatttcagccagaatagtctgcccctgggcggcccaagcagcggcgcccctcctcccagcggcggcagcccagccggctccccaacctctaccgaggagggcacctctgagtccgccacccccgagagcggccctggcacctccaccgagcccagcgagggcagcgcacccggcagccctgccggcagccccacctccacagaggagggaaccagcaccgagcccagcgaaggcagcgccccaggcaccagcaccgagcctagtgagggcggctctggcggcggcagcgcccaggagattaaacggatcaacaagatcagaagaagacttgtgaaagacagcaacaccaagaaggccggcaagacaggccccatgaaaaccctgctggttagagtgatgacacccgatctgagagagcggctggaaaacctgagaaagaagcctgaaaatatcccccagcccatcagcaatacatctagagccaacctgaataagctgctgaccgattacaccgaaatgaagaaggcgatcctgcatgtgtactgggaagagttccagaaggaccctgtgggcctgatgagccgggtggcccagcctgccagcaagaagatcgatcagaacaagctgaaacctgagatggacgagaagggcaacctgaccaccgccggctttgcctgctctcagtgtggccagcccctgttcgtgtacaagctggagcaggtgtctgagaagggcaaggcttacaccaactacttcggacggtgcaatgtggccgagcacgaaaagctgatcctgctggcccagctgaagcccgagaaggatagcgacgaagccgtgacatatagcctgggaaagtttgggcagagggccctggatttctacagcattcatgtgaccaaggagtccacccaccccgtgaagcccctggcccagatcgccggaaacagatacgcctccggacctgtgggaaaggccctgagcgacgcatgtatgggcacaatcgcctccttcctgtctaagtaccaggacatcatcatcgaacaccagaaggtggtgaagggcaaccagaagagactggagagcctgcgggagctggccggcaaggaaaacctggaataccctagcgtgaccctgccacctcagcctcacaccaaggagggcgttgatgcctacaacgaagtgatcgcccgggtgcgaatgtgggtgaacctgaacctgtggcagaagctgaagctaagcagagatgatgccaagcctctgctgagactgaagggattcccttcctttcctctggtcgagagacaggccaacgaagtggactggtgggacatggtgtgtaacgtgaagaagctgatcaacgagaaaaaggaggatggcaaggtgttttggcagaatctggctggctacaagagacaggaagccctgagaccatacctgagcagcgaggaagatcggaagaagggaaagaaattcgctcggtaccagctgggcgacctgctgctgcacctggaaaagaagcacggcgaggactggggaaaggtgtacgacgaggcctgggagcggattgacaagaaagtggaaggcctgagcaagcacatcaagctggaagaggaacggagaagcgaggacgcccagagcaaggccgccctgaccgactggctgcgggctaaggccagcttcgtgatcgagggcctgaaggaggccgacaaggacgagttctgcagatgcgagctgaagctgcagaagtggtacggggacctgcggggaaagcccttcgccatcgaagccgagaacagcatcctggacatcagcggcttcagcaagcagtacaactgtgccttcatctggcagaaggacggcgtgaagaagctgaacctgtacctgatcatcaactacttcaagggcggcaagctgcggttcaagaagatcaaacctgaagccttcgaagccaacagattctacaccgtgatcaacaaaaagagcggcgagatcgtgcccatggaggtgaacttcaacttcgacgaccccaacctgatcatcctgcctctggcctttggcaagagacagggcagagaattcatctggaacgacctgctgtccctggaaaccggcagcctgaagctggccaacggaagagtgatcgagaagacactgtacaacagaagaacccggcaggatgagcctgccctgttcgtggccctgaccttcgagcggcgggaggtcctggactcctccaatatcaaaccaatgaacctgatcggcgtggcaagaggcgaaaacatccccgccgtgatcgccctgaccgaccccgagggctgcccactgagccggtttaaggatagcctgggaaacccaacccacatcctgagaatcggcgagagctataaggagaagcagcggaccatccaggccaagaaggaggtggagcagcggagagccggcggctacagccggaagtacgccagcaaagccaagaatctggcagacgatatggtgagaaacaccgctagagatctgctgtactacgccgtgacccaggatgccatgctgatcttcgccaacctgagccggggcttcggccggcagggcaagcggaccttcatggccgagagacagtacacacggatggaggactggctgaccgccaagctggcctacgagggcctgagcaagacctacctgtccaagacactggcccagtacacctccaagacatgcagcaactgtgggtttaccatcaccagcgccgactacgacagggtgctggagaagctgaagaagacagcaacaggctggatgaccacaattaacggcaaggagctgaaggtggagggccagattacctactacaacagatacaagagacagaacgtagtcaaggacctgtccgtcgagctggatagactgagcgaagaatctgtgaacaacgacatctcctcctggacaaagggcagaagcggagaagctctgagcctcctgaagaaaagattctcccatagacccgtgcaggagaagttcgtgtgcctgaactgcggcttcgagacacacgcagccgagcaagccgccctgaacatcgccagatcctggctgttcctgcggagccaggagtacaagaaataccagacaaacaagacaaccggcaacaccgataagagagccttcgtcgagacctggcagtccttttaccggaagaagcttaaggaggtgtggaaacctgccgtgcggtctggcggatctggcggaggctccacaagccaccagggcagcgtgaccttcggcgacgtggccgtggacttcagccaggacgagtggggccacctggaccccgcccagaaggagctgtacagggaggtgatgctggagaactacggcaacctggtgtgcctgggcctggccgtgagcaggccccacgtgatcgagcagctggagaggggcgaggccccctggctgcccaggggcgccgtgcccaggagctgcgacctggactggatgaccaggaccagccccaagaaaaagagaaaagtctaagctgccttctgcggggcttgccttctggccatgcccttcttctctcccttgcacctgtacctcttggtctttgaataaagcctgagtaggaaggctagcaaaaaaaaaaaaaaaaaaaaaaaaaaaaaaaaaaaaaaaaaaaaaaaaaaaaaaaaaaaaaaaaaaaaaaaaaaaaaaaa

SEQ ID NO: 3380 - RNA, 5419 nt, synthetic construct
  source 1..5419: mol_type = other RNA
aggaaataagagagaaaagaagagtaagaagaaatataagagccaccatggcccctaagaagaagcgtaaagtgagccgggtgaacggcagcggcagcggcggcggcatgaaccacgaccaggagttcgacccccctaaggtgtaccctcccgtccccgccgagaagagaaagcccatccgggtcctgagcctgttcgatggcatcgccaccggtctgctggtgctgaaggacctgggcatccaggtggataggtacattgcctccgaggtgtgcgaggactccatcaccgtgggaatggtgcgtcatcagggcaagatcatgtacgtgggcgacgtgcggagcgtgacacagaagcatatccaggagtggggccctttcgacctggtgatcggcggcagcccttgcaatgacctgagcatcgtgaacccagcccggaagggcctgtacgagggaaccggcagactgttcttcgagttttacagactgctgcacgacgcccggcctaaggaaggcgacgaccggcccttcttttggctgttcgagaatgtggtggccatgggagtcagcgacaagcgggatattagccggttcctggagagcaaccccgtgatgatcgatgccaaggaagtgagcgccgcccaccgggccagatacttctggggcaatctgcctggcatgaacagacccctggccagcaccgtgaacgacaagctggagctgcaggagtgcctggagcacggccggatcgccaagttcagcaaggtgagaaccatcaccacccgaagcaacagcatcaaacaaggcaaggaccagcactttcctgtgttcatgaacgagaaggaggacatcctgtggtgtaccgagatggagagagtgttcgggttcccagtccactacacagatgtcagcaacatgtctagactggccagacagagactgctgggaagaagctggtccgtccctgtgatcagacacctgttcgcccctctgaaggagtacttcgcctgcgtgagcagcggcaacagcaacgccaacagccggggccccagcttctctagcggcctggtgccactgtccctgagagggagccacatgggccccatggagatctacaaaaccgtgagcgcctggaagcggcagcctgtgcgcgtgctgagcctgtttcggaatatcgataaagtcctgaaaagcctgggattcctggagagcggctctggctccggcggtggcaccctgaagtacgtggaggatgtgacaaacgtggtcagacgggatgtggagaagtggggccccttcgatctggtgtacggcagcacccaacccctgggcagctcttgtgaccggtgccctggctggtacatgtttcagttccaccggatcctgcagtacgccctgccgagacaggagtcccagcggccattcttttggattttcatggacaacttgctgctgaccgaggatgaccaggaaactaccactcggttcctgcagaccgaagccgtgaccctgcaggacgtgagaggccgggactaccagaacgccatgcgggtgtggtccaacatccctggactgaaaagcaagcacgcacctctgacccctaaagaagaggagtacctgcaggcccaggtgcggagcagaagcaagctggacgcccctaaggtggatctgctggtgaagaattgcctcctgcccctgagagagtacttcaagtatttcagccagaatagtctgcccctgggcggcccaagcagcggcgcccctcctcccagcggcggcagcccagccggctccccaacctctaccgaggagggcacctctgagtccgccacccccgagagcggccctggcacctccaccgagcccagcgagggcagcgcacccggcagccctgccggcagccccacctccacagaggagggaaccagcaccgagcccagcgaaggcagcgccccaggcaccagcaccgagcctagtgagggcggctctggcggcggcagcgcccaggagattaaacggatcaacaagatcagaagaagacttgtgaaagacagcaacaccaagaaggccggcaagacaggccccatgaaaaccctgctggttagagtgatgacacccgatctgagagagcggctggaaaacctgagaaagaagcctgaaaatatcccccagcccatcagcaatacatctagagccaacctgaataagctgctgaccgattacaccgaaatgaagaaggcgatcctgcatgtgtactgggaagagttccagaaggaccctgtgggcctgatgagccgggtggcccagcctgccagcaagaagatcgatcagaacaagctgaaacctgagatggacgagaagggcaacctgaccaccgccggctttgcctgctctcagtgtggccagcccctgttcgtgtacaagctggagcaggtgtctgagaagggcaaggcttacaccaactacttcggacggtgcaatgtggccgagcacgaaaagctgatcctgctggcccagctgaagcccgagaaggatagcgacgaagccgtgacatatagcctgggaaagtttgggcagagggccctggatttctacagcattcatgtgaccaaggagtccacccaccccgtgaagcccctggcccagatcgccggaaacagatacgcctccggacctgtgggaaaggccctgagcgacgcatgtatgggcacaatcgcctccttcctgtctaagtaccaggacatcatcatcgaacaccagaaggtggtgaagggcaaccagaagagactggagagcctgcgggagctggccggcaaggaaaacctggaataccctagcgtgaccctgccacctcagcctcacaccaaggagggcgttgatgcctacaacgaagtgatcgcccgggtgcgaatgtgggtgaacctgaacctgtggcagaagctgaagctaagcagagatgatgccaagcctctgctgagactgaagggattcccttcctttcctctggtcgagagacaggccaacgaagtggactggtgggacatggtgtgtaacgtgaagaagctgatcaacgagaaaaaggaggatggcaaggtgttttggcagaatctggctggctacaagagacaggaagccctgagaccatacctgagcagcgaggaagatcggaagaagggaaagaaattcgctcggtaccagctgggcgacctgctgctgcacctggaaaagaagcacggcgaggactggggaaaggtgtacgacgaggcctgggagcggattgacaagaaagtggaaggcctgagcaagcacatcaagctggaagaggaacggagaagcgaggacgcccagagcaaggccgccctgaccgactggctgcgggctaaggccagcttcgtgatcgagggcctgaaggaggccgacaaggacgagttctgcagatgcgagctgaagctgcagaagtggtacggggacctgcggggaaagcccttcgccatcgaagccgagaacagcatcctggacatcagcggcttcagcaagcagtacaactgtgccttcatctggcagaaggacggcgtgaagaagctgaacctgtacctgatcatcaactacttcaagggcggcaagctgcggttcaagaagatcaaacctgaagccttcgaagccaacagattctacaccgtgatcaacaaaaagagcggcgagatcgtgcccatggaggtgaacttcaacttcgacgaccccaacctgatcatcctgcctctggcctttggcaagagacagggcagagaattcatctggaacgacctgctgtccctggaaaccggcagcctgaagctggccaacggaagagtgatcgagaagacactgtacaacagaagaacccggcaggatgagcctgccctgttcgtggccctgaccttcgagcggcgggaggtcctggactcctccaatatcaaaccaatgaacctgatcggcgtggcaagaggcgaaaacatccccgccgtgatcgccctgaccgaccccgagggctgcccactgagccggtttaaggatagcctgggaaacccaacccacatcctgagaatcggcgagagctataaggagaagcagcggaccatccaggccaagaaggaggtggagcagcggagagccggcggctacagccggaagtacgccagcaaagccaagaatctggcagacgatatggtgagaaacaccgctagagatctgctgtactacgccgtgacccaggatgccatgctgatcttcgccaacctgagccggggcttcggccggcagggcaagcggaccttcatggccgagagacagtacacacggatggaggactggctgaccgccaagctggcctacgagggcctgagcaagacctacctgtccaagacactggcccagtacacctccaagacatgcagcaactgtgggtttaccatcaccagcgccgactacgacagggtgctggagaagctgaagaagacagcaacaggctggatgaccacaattaacggcaaggagctgaaggtggagggccagattacctactacaacagatacaagagacagaacgtagtcaaggacctgtccgtcgagctggatagactgagcgaagaatctgtgaacaacgacatctcctcctggacaaagggcagaagcggagaagctctgagcctcctgaagaaaagattctcccatagacccgtgcaggagaagttcgtgtgcctgaactgcggcttcgagacacacgcagccgagcaagccgccctgaacatcgccagatcctggctgttcctgcggagccaggagtacaagaaataccagacaaacaagacaaccggcaacaccgataagagagccttcgtcgagacctggcagtccttttaccggaagaagcttaaggaggtgtggaaacctgccgtgcggtctggcggatctggcggaggctccacaagcagccaggtgaccgtgaccttcgaggacgtggccgtgctgttcagcagggacgagtggaggaagctgggccccagccagaagaacctgtaccaggacgtgatgctggagaactacagcaacctggtgagcctgggcctgcccttcagcaagcccaaggtgatcagcctgctgcagcagggcgaggacccctggaaggtggagaaggagagccccggcagcttcagccccggctggaagagcagcaccagccccaagaaaaagagaaaagtctaagctgccttctgcggggcttgccttctggccatgcccttcttctctcccttgcacctgtacctcttggtctttgaataaagcctgagtaggaaggctagcaaaaaaaaaaaaaaaaaaaaaaaaaaaaaaaaaaaaaaaaaaaaaaaaaaaaaaaaaaaaaaaaaaaaaaaaaaaaaaaa

SEQ ID NO: 3381 - RNA, 5419 nt, synthetic construct
  source 1..5419: mol_type = other RNA
aggaaataagagagaaaagaagagtaagaagaaatataagagccaccatggcccctaagaagaagcgtaaagtgagccgggtgaacggcagcggcagcggcggcggcatgaaccacgaccaggagttcgacccccctaaggtgtaccctcccgtccccgccgagaagagaaagcccatccgggtcctgagcctgttcgatggcatcgccaccggtctgctggtgctgaaggacctgggcatccaggtggataggtacattgcctccgaggtgtgcgaggactccatcaccgtgggaatggtgcgtcatcagggcaagatcatgtacgtgggcgacgtgcggagcgtgacacagaagcatatccaggagtggggccctttcgacctggtgatcggcggcagcccttgcaatgacctgagcatcgtgaacccagcccggaagggcctgtacgagggaaccggcagactgttcttcgagttttacagactgctgcacgacgcccggcctaaggaaggcgacgaccggcccttcttttggctgttcgagaatgtggtggccatgggagtcagcgacaagcgggatattagccggttcctggagagcaaccccgtgatgatcgatgccaaggaagtgagcgccgcccaccgggccagatacttctggggcaatctgcctggcatgaacagacccctggccagcaccgtgaacgacaagctggagctgcaggagtgcctggagcacggccggatcgccaagttcagcaaggtgagaaccatcaccacccgaagcaacagcatcaaacaaggcaaggaccagcactttcctgtgttcatgaacgagaaggaggacatcctgtggtgtaccgagatggagagagtgttcgggttcccagtccactacacagatgtcagcaacatgtctagactggccagacagagactgctgggaagaagctggtccgtccctgtgatcagacacctgttcgcccctctgaaggagtacttcgcctgcgtgagcagcggcaacagcaacgccaacagccggggccccagcttctctagcggcctggtgccactgtccctgagagggagccacatgggccccatggagatctacaaaaccgtgagcgcctggaagcggcagcctgtgcgcgtgctgagcctgtttcggaatatcgataaagtcctgaaaagcctgggattcctggagagcggctctggctccggcggtggcaccctgaagtacgtggaggatgtgacaaacgtggtcagacgggatgtggagaagtggggccccttcgatctggtgtacggcagcacccaacccctgggcagctcttgtgaccggtgccctggctggtacatgtttcagttccaccggatcctgcagtacgccctgccgagacaggagtcccagcggccattcttttggattttcatggacaacttgctgctgaccgaggatgaccaggaaactaccactcggttcctgcagaccgaagccgtgaccctgcaggacgtgagaggccgggactaccagaacgccatgcgggtgtggtccaacatccctggactgaaaagcaagcacgcacctctgacccctaaagaagaggagtacctgcaggcccaggtgcggagcagaagcaagctggacgcccctaaggtggatctgctggtgaagaattgcctcctgcccctgagagagtacttcaagtatttcagccagaatagtctgcccctgggcggcccaagcagcggcgcccctcctcccagcggcggcagcccagccggctccccaacctctaccgaggagggcacctctgagtccgccacccccgagagcggccctggcacctccaccgagcccagcgagggcagcgcacccggcagccctgccggcagccccacctccacagaggagggaaccagcaccgagcccagcgaaggcagcgccccaggcaccagcaccgagcctagtgagggcggctctggcggcggcagcgcccaggagattaaacggatcaacaagatcagaagaagacttgtgaaagacagcaacaccaagaaggccggcaagacaggccccatgaaaaccctgctggttagagtgatgacacccgatctgagagagcggctggaaaacctgagaaagaagcctgaaaatatcccccagcccatcagcaatacatctagagccaacctgaataagctgctgaccgattacaccgaaatgaagaaggcgatcctgcatgtgtactgggaagagttccagaaggaccctgtgggcctgatgagccgggtggcccagcctgccagcaagaagatcgatcagaacaagctgaaacctgagatggacgagaagggcaacctgaccaccgccggctttgcctgctctcagtgtggccagcccctgttcgtgtacaagctggagcaggtgtctgagaagggcaaggcttacaccaactacttcggacggtgcaatgtggccgagcacgaaaagctgatcctgctggcccagctgaagcccgagaaggatagcgacgaagccgtgacatatagcctgggaaagtttgggcagagggccctggatttctacagcattcatgtgaccaaggagtccacccaccccgtgaagcccctggcccagatcgccggaaacagatacgcctccggacctgtgggaaaggccctgagcgacgcatgtatgggcacaatcgcctccttcctgtctaagtaccaggacatcatcatcgaacaccagaaggtggtgaagggcaaccagaagagactggagagcctgcgggagctggccggcaaggaaaacctggaataccctagcgtgaccctgccacctcagcctcacaccaaggagggcgttgatgcctacaacgaagtgatcgcccgggtgcgaatgtgggtgaacctgaacctgtggcagaagctgaagctaagcagagatgatgccaagcctctgctgagactgaagggattcccttcctttcctctggtcgagagacaggccaacgaagtggactggtgggacatggtgtgtaacgtgaagaagctgatcaacgagaaaaaggaggatggcaaggtgttttggcagaatctggctggctacaagagacaggaagccctgagaccatacctgagcagcgaggaagatcggaagaagggaaagaaattcgctcggtaccagctgggcgacctgctgctgcacctggaaaagaagcacggcgaggactggggaaaggtgtacgacgaggcctgggagcggattgacaagaaagtggaaggcctgagcaagcacatcaagctggaagaggaacggagaagcgaggacgcccagagcaaggccgccctgaccgactggctgcgggctaaggccagcttcgtgatcgagggcctgaaggaggccgacaaggacgagttctgcagatgcgagctgaagctgcagaagtggtacggggacctgcggggaaagcccttcgccatcgaagccgagaacagcatcctggacatcagcggcttcagcaagcagtacaactgtgccttcatctggcagaaggacggcgtgaagaagctgaacctgtacctgatcatcaactacttcaagggcggcaagctgcggttcaagaagatcaaacctgaagccttcgaagccaacagattctacaccgtgatcaacaaaaagagcggcgagatcgtgcccatggaggtgaacttcaacttcgacgaccccaacctgatcatcctgcctctggcctttggcaagagacagggcagagaattcatctggaacgacctgctgtccctggaaaccggcagcctgaagctggccaacggaagagtgatcgagaagacactgtacaacagaagaacccggcaggatgagcctgccctgttcgtggccctgaccttcgagcggcgggaggtcctggactcctccaatatcaaaccaatgaacctgatcggcgtggcaagaggcgaaaacatccccgccgtgatcgccctgaccgaccccgagggctgcccactgagccggtttaaggatagcctgggaaacccaacccacatcctgagaatcggcgagagctataaggagaagcagcggaccatccaggccaagaaggaggtggagcagcggagagccggcggctacagccggaagtacgccagcaaagccaagaatctggcagacgatatggtgagaaacaccgctagagatctgctgtactacgccgtgacccaggatgccatgctgatcttcgccaacctgagccggggcttcggccggcagggcaagcggaccttcatggccgagagacagtacacacggatggaggactggctgaccgccaagctggcctacgagggcctgagcaagacctacctgtccaagacactggcccagtacacctccaagacatgcagcaactgtgggtttaccatcaccagcgccgactacgacagggtgctggagaagctgaagaagacagcaacaggctggatgaccacaattaacggcaaggagctgaaggtggagggccagattacctactacaacagatacaagagacagaacgtagtcaaggacctgtccgtcgagctggatagactgagcgaagaatctgtgaacaacgacatctcctcctggacaaagggcagaagcggagaagctctgagcctcctgaagaaaagattctcccatagacccgtgcaggagaagttcgtgtgcctgaactgcggcttcgagacacacgcagccgagcaagccgccctgaacatcgccagatcctggctgttcctgcggagccaggagtacaagaaataccagacaaacaagacaaccggcaacaccgataagagagccttcgtcgagacctggcagtccttttaccggaagaagcttaaggaggtgtggaaacctgccgtgcggtctggcggatctggcggaggctccacaagctgcaaggagagcgtgaccttcaaggacgtggccgtggagttcacctgggaggagtgggtgcacctgaacagcagccagaagaccctgtacagggacgtgatgctggagaactacaggaacctggtgagcctgggcttcgccgtgagcaagcccgacgtgatctaccagctggagaggaaggaggccagctggatccccggcgccgacatccccaggagcagctgccccgagagcaaggagttcaccagccccaagaaaaagagaaaagtctaagctgccttctgcggggcttgccttctggccatgcccttcttctctcccttgcacctgtacctcttggtctttgaataaagcctgagtaggaaggctagcaaaaaaaaaaaaaaaaaaaaaaaaaaaaaaaaaaaaaaaaaaaaaaaaaaaaaaaaaaaaaaaaaaaaaaaaaaaaaaaa

SEQ ID NO: 3382 - RNA, 5419 nt, synthetic construct
  source 1..5419: mol_type = other RNA
aggaaataagagagaaaagaagagtaagaagaaatataagagccaccatggcccctaagaagaagcgtaaagtgagccgggtgaacggcagcggcagcggcggcggcatgaaccacgaccaggagttcgacccccctaaggtgtaccctcccgtccccgccgagaagagaaagcccatccgggtcctgagcctgttcgatggcatcgccaccggtctgctggtgctgaaggacctgggcatccaggtggataggtacattgcctccgaggtgtgcgaggactccatcaccgtgggaatggtgcgtcatcagggcaagatcatgtacgtgggcgacgtgcggagcgtgacacagaagcatatccaggagtggggccctttcgacctggtgatcggcggcagcccttgcaatgacctgagcatcgtgaacccagcccggaagggcctgtacgagggaaccggcagactgttcttcgagttttacagactgctgcacgacgcccggcctaaggaaggcgacgaccggcccttcttttggctgttcgagaatgtggtggccatgggagtcagcgacaagcgggatattagccggttcctggagagcaaccccgtgatgatcgatgccaaggaagtgagcgccgcccaccgggccagatacttctggggcaatctgcctggcatgaacagacccctggccagcaccgtgaacgacaagctggagctgcaggagtgcctggagcacggccggatcgccaagttcagcaaggtgagaaccatcaccacccgaagcaacagcatcaaacaaggcaaggaccagcactttcctgtgttcatgaacgagaaggaggacatcctgtggtgtaccgagatggagagagtgttcgggttcccagtccactacacagatgtcagcaacatgtctagactggccagacagagactgctgggaagaagctggtccgtccctgtgatcagacacctgttcgcccctctgaaggagtacttcgcctgcgtgagcagcggcaacagcaacgccaacagccggggccccagcttctctagcggcctggtgccactgtccctgagagggagccacatgggccccatggagatctacaaaaccgtgagcgcctggaagcggcagcctgtgcgcgtgctgagcctgtttcggaatatcgataaagtcctgaaaagcctgggattcctggagagcggctctggctccggcggtggcaccctgaagtacgtggaggatgtgacaaacgtggtcagacgggatgtggagaagtggggccccttcgatctggtgtacggcagcacccaacccctgggcagctcttgtgaccggtgccctggctggtacatgtttcagttccaccggatcctgcagtacgccctgccgagacaggagtcccagcggccattcttttggattttcatggacaacttgctgctgaccgaggatgaccaggaaactaccactcggttcctgcagaccgaagccgtgaccctgcaggacgtgagaggccgggactaccagaacgccatgcgggtgtggtccaacatccctggactgaaaagcaagcacgcacctctgacccctaaagaagaggagtacctgcaggcccaggtgcggagcagaagcaagctggacgcccctaaggtggatctgctggtgaagaattgcctcctgcccctgagagagtacttcaagtatttcagccagaatagtctgcccctgggcggcccaagcagcggcgcccctcctcccagcggcggcagcccagccggctccccaacctctaccgaggagggcacctctgagtccgccacccccgagagcggccctggcacctccaccgagcccagcgagggcagcgcacccggcagccctgccggcagccccacctccacagaggagggaaccagcaccgagcccagcgaaggcagcgccccaggcaccagcaccgagcctagtgagggcggctctggcggcggcagcgcccaggagattaaacggatcaacaagatcagaagaagacttgtgaaagacagcaacaccaagaaggccggcaagacaggccccatgaaaaccctgctggttagagtgatgacacccgatctgagagagcggctggaaaacctgagaaagaagcctgaaaatatcccccagcccatcagcaatacatctagagccaacctgaataagctgctgaccgattacaccgaaatgaagaaggcgatcctgcatgtgtactgggaagagttccagaaggaccctgtgggcctgatgagccgggtggcccagcctgccagcaagaagatcgatcagaacaagctgaaacctgagatggacgagaagggcaacctgaccaccgccggctttgcctgctctcagtgtggccagcccctgttcgtgtacaagctggagcaggtgtctgagaagggcaaggcttacaccaactacttcggacggtgcaatgtggccgagcacgaaaagctgatcctgctggcccagctgaagcccgagaaggatagcgacgaagccgtgacatatagcctgggaaagtttgggcagagggccctggatttctacagcattcatgtgaccaaggagtccacccaccccgtgaagcccctggcccagatcgccggaaacagatacgcctccggacctgtgggaaaggccctgagcgacgcatgtatgggcacaatcgcctccttcctgtctaagtaccaggacatcatcatcgaacaccagaaggtggtgaagggcaaccagaagagactggagagcctgcgggagctggccggcaaggaaaacctggaataccctagcgtgaccctgccacctcagcctcacaccaaggagggcgttgatgcctacaacgaagtgatcgcccgggtgcgaatgtgggtgaacctgaacctgtggcagaagctgaagctaagcagagatgatgccaagcctctgctgagactgaagggattcccttcctttcctctggtcgagagacaggccaacgaagtggactggtgggacatggtgtgtaacgtgaagaagctgatcaacgagaaaaaggaggatggcaaggtgttttggcagaatctggctggctacaagagacaggaagccctgagaccatacctgagcagcgaggaagatcggaagaagggaaagaaattcgctcggtaccagctgggcgacctgctgctgcacctggaaaagaagcacggcgaggactggggaaaggtgtacgacgaggcctgggagcggattgacaagaaagtggaaggcctgagcaagcacatcaagctggaagaggaacggagaagcgaggacgcccagagcaaggccgccctgaccgactggctgcgggctaaggccagcttcgtgatcgagggcctgaaggaggccgacaaggacgagttctgcagatgcgagctgaagctgcagaagtggtacggggacctgcggggaaagcccttcgccatcgaagccgagaacagcatcctggacatcagcggcttcagcaagcagtacaactgtgccttcatctggcagaaggacggcgtgaagaagctgaacctgtacctgatcatcaactacttcaagggcggcaagctgcggttcaagaagatcaaacctgaagccttcgaagccaacagattctacaccgtgatcaacaaaaagagcggcgagatcgtgcccatggaggtgaacttcaacttcgacgaccccaacctgatcatcctgcctctggcctttggcaagagacagggcagagaattcatctggaacgacctgctgtccctggaaaccggcagcctgaagctggccaacggaagagtgatcgagaagacactgtacaacagaagaacccggcaggatgagcctgccctgttcgtggccctgaccttcgagcggcgggaggtcctggactcctccaatatcaaaccaatgaacctgatcggcgtggcaagaggcgaaaacatccccgccgtgatcgccctgaccgaccccgagggctgcccactgagccggtttaaggatagcctgggaaacccaacccacatcctgagaatcggcgagagctataaggagaagcagcggaccatccaggccaagaaggaggtggagcagcggagagccggcggctacagccggaagtacgccagcaaagccaagaatctggcagacgatatggtgagaaacaccgctagagatctgctgtactacgccgtgacccaggatgccatgctgatcttcgccaacctgagccggggcttcggccggcagggcaagcggaccttcatggccgagagacagtacacacggatggaggactggctgaccgccaagctggcctacgagggcctgagcaagacctacctgtccaagacactggcccagtacacctccaagacatgcagcaactgtgggtttaccatcaccagcgccgactacgacagggtgctggagaagctgaagaagacagcaacaggctggatgaccacaattaacggcaaggagctgaaggtggagggccagattacctactacaacagatacaagagacagaacgtagtcaaggacctgtccgtcgagctggatagactgagcgaagaatctgtgaacaacgacatctcctcctggacaaagggcagaagcggagaagctctgagcctcctgaagaaaagattctcccatagacccgtgcaggagaagttcgtgtgcctgaactgcggcttcgagacacacgcagccgagcaagccgccctgaacatcgccagatcctggctgttcctgcggagccaggagtacaagaaataccagacaaacaagacaaccggcaacaccgataagagagccttcgtcgagacctggcagtccttttaccggaagaagcttaaggaggtgtggaaacctgccgtgcggtctggcggatctggcggaggctccacaagccaccaggaggtggtgaccttcgaggacgtggccgtgtacttcaccaggaccgagtgggccggcctgagccccgcccagagggccctgtacaggagcgtgatgctggagatctacggcagcctgaccagcctgggctaccccgtgcccaagcccgccctgatcagcctgctggagaggggcgacctgcccgtgggcctggagacccaggacaacccccccgcccagggcaccagggacatctacaccagccccaagaaaaagagaaaagtctaagctgccttctgcggggcttgccttctggccatgcccttcttctctcccttgcacctgtacctcttggtctttgaataaagcctgagtaggaaggctagcaaaaaaaaaaaaaaaaaaaaaaaaaaaaaaaaaaaaaaaaaaaaaaaaaaaaaaaaaaaaaaaaaaaaaaaaaaaaaaaa

SEQ ID NO: 3383 - RNA, 5419 nt, synthetic construct
  source 1..5419: mol_type = other RNA
aggaaataagagagaaaagaagagtaagaagaaatataagagccaccatggcccctaagaagaagcgtaaagtgagccgggtgaacggcagcggcagcggcggcggcatgaaccacgaccaggagttcgacccccctaaggtgtaccctcccgtccccgccgagaagagaaagcccatccgggtcctgagcctgttcgatggcatcgccaccggtctgctggtgctgaaggacctgggcatccaggtggataggtacattgcctccgaggtgtgcgaggactccatcaccgtgggaatggtgcgtcatcagggcaagatcatgtacgtgggcgacgtgcggagcgtgacacagaagcatatccaggagtggggccctttcgacctggtgatcggcggcagcccttgcaatgacctgagcatcgtgaacccagcccggaagggcctgtacgagggaaccggcagactgttcttcgagttttacagactgctgcacgacgcccggcctaaggaaggcgacgaccggcccttcttttggctgttcgagaatgtggtggccatgggagtcagcgacaagcgggatattagccggttcctggagagcaaccccgtgatgatcgatgccaaggaagtgagcgccgcccaccgggccagatacttctggggcaatctgcctggcatgaacagacccctggccagcaccgtgaacgacaagctggagctgcaggagtgcctggagcacggccggatcgccaagttcagcaaggtgagaaccatcaccacccgaagcaacagcatcaaacaaggcaaggaccagcactttcctgtgttcatgaacgagaaggaggacatcctgtggtgtaccgagatggagagagtgttcgggttcccagtccactacacagatgtcagcaacatgtctagactggccagacagagactgctgggaagaagctggtccgtccctgtgatcagacacctgttcgcccctctgaaggagtacttcgcctgcgtgagcagcggcaacagcaacgccaacagccggggccccagcttctctagcggcctggtgccactgtccctgagagggagccacatgggccccatggagatctacaaaaccgtgagcgcctggaagcggcagcctgtgcgcgtgctgagcctgtttcggaatatcgataaagtcctgaaaagcctgggattcctggagagcggctctggctccggcggtggcaccctgaagtacgtggaggatgtgacaaacgtggtcagacgggatgtggagaagtggggccccttcgatctggtgtacggcagcacccaacccctgggcagctcttgtgaccggtgccctggctggtacatgtttcagttccaccggatcctgcagtacgccctgccgagacaggagtcccagcggccattcttttggattttcatggacaacttgctgctgaccgaggatgaccaggaaactaccactcggttcctgcagaccgaagccgtgaccctgcaggacgtgagaggccgggactaccagaacgccatgcgggtgtggtccaacatccctggactgaaaagcaagcacgcacctctgacccctaaagaagaggagtacctgcaggcccaggtgcggagcagaagcaagctggacgcccctaaggtggatctgctggtgaagaattgcctcctgcccctgagagagtacttcaagtatttcagccagaatagtctgcccctgggcggcccaagcagcggcgcccctcctcccagcggcggcagcccagccggctccccaacctctaccgaggagggcacctctgagtccgccacccccgagagcggccctggcacctccaccgagcccagcgagggcagcgcacccggcagccctgccggcagccccacctccacagaggagggaaccagcaccgagcccagcgaaggcagcgccccaggcaccagcaccgagcctagtgagggcggctctggcggcggcagcgcccaggagattaaacggatcaacaagatcagaagaagacttgtgaaagacagcaacaccaagaaggccggcaagacaggccccatgaaaaccctgctggttagagtgatgacacccgatctgagagagcggctggaaaacctgagaaagaagcctgaaaatatcccccagcccatcagcaatacatctagagccaacctgaataagctgctgaccgattacaccgaaatgaagaaggcgatcctgcatgtgtactgggaagagttccagaaggaccctgtgggcctgatgagccgggtggcccagcctgccagcaagaagatcgatcagaacaagctgaaacctgagatggacgagaagggcaacctgaccaccgccggctttgcctgctctcagtgtggccagcccctgttcgtgtacaagctggagcaggtgtctgagaagggcaaggcttacaccaactacttcggacggtgcaatgtggccgagcacgaaaagctgatcctgctggcccagctgaagcccgagaaggatagcgacgaagccgtgacatatagcctgggaaagtttgggcagagggccctggatttctacagcattcatgtgaccaaggagtccacccaccccgtgaagcccctggcccagatcgccggaaacagatacgcctccggacctgtgggaaaggccctgagcgacgcatgtatgggcacaatcgcctccttcctgtctaagtaccaggacatcatcatcgaacaccagaaggtggtgaagggcaaccagaagagactggagagcctgcgggagctggccggcaaggaaaacctggaataccctagcgtgaccctgccacctcagcctcacaccaaggagggcgttgatgcctacaacgaagtgatcgcccgggtgcgaatgtgggtgaacctgaacctgtggcagaagctgaagctaagcagagatgatgccaagcctctgctgagactgaagggattcccttcctttcctctggtcgagagacaggccaacgaagtggactggtgggacatggtgtgtaacgtgaagaagctgatcaacgagaaaaaggaggatggcaaggtgttttggcagaatctggctggctacaagagacaggaagccctgagaccatacctgagcagcgaggaagatcggaagaagggaaagaaattcgctcggtaccagctgggcgacctgctgctgcacctggaaaagaagcacggcgaggactggggaaaggtgtacgacgaggcctgggagcggattgacaagaaagtggaaggcctgagcaagcacatcaagctggaagaggaacggagaagcgaggacgcccagagcaaggccgccctgaccgactggctgcgggctaaggccagcttcgtgatcgagggcctgaaggaggccgacaaggacgagttctgcagatgcgagctgaagctgcagaagtggtacggggacctgcggggaaagcccttcgccatcgaagccgagaacagcatcctggacatcagcggcttcagcaagcagtacaactgtgccttcatctggcagaaggacggcgtgaagaagctgaacctgtacctgatcatcaactacttcaagggcggcaagctgcggttcaagaagatcaaacctgaagccttcgaagccaacagattctacaccgtgatcaacaaaaagagcggcgagatcgtgcccatggaggtgaacttcaacttcgacgaccccaacctgatcatcctgcctctggcctttggcaagagacagggcagagaattcatctggaacgacctgctgtccctggaaaccggcagcctgaagctggccaacggaagagtgatcgagaagacactgtacaacagaagaacccggcaggatgagcctgccctgttcgtggccctgaccttcgagcggcgggaggtcctggactcctccaatatcaaaccaatgaacctgatcggcgtggcaagaggcgaaaacatccccgccgtgatcgccctgaccgaccccgagggctgcccactgagccggtttaaggatagcctgggaaacccaacccacatcctgagaatcggcgagagctataaggagaagcagcggaccatccaggccaagaaggaggtggagcagcggagagccggcggctacagccggaagtacgccagcaaagccaagaatctggcagacgatatggtgagaaacaccgctagagatctgctgtactacgccgtgacccaggatgccatgctgatcttcgccaacctgagccggggcttcggccggcagggcaagcggaccttcatggccgagagacagtacacacggatggaggactggctgaccgccaagctggcctacgagggcctgagcaagacctacctgtccaagacactggcccagtacacctccaagacatgcagcaactgtgggtttaccatcaccagcgccgactacgacagggtgctggagaagctgaagaagacagcaacaggctggatgaccacaattaacggcaaggagctgaaggtggagggccagattacctactacaacagatacaagagacagaacgtagtcaaggacctgtccgtcgagctggatagactgagcgaagaatctgtgaacaacgacatctcctcctggacaaagggcagaagcggagaagctctgagcctcctgaagaaaagattctcccatagacccgtgcaggagaagttcgtgtgcctgaactgcggcttcgagacacacgcagccgagcaagccgccctgaacatcgccagatcctggctgttcctgcggagccaggagtacaagaaataccagacaaacaagacaaccggcaacaccgataagagagccttcgtcgagacctggcagtccttttaccggaagaagcttaaggaggtgtggaaacctgccgtgcggtctggcggatctggcggaggctccacaagcccccaggagcccgtgaccttcgaggacgtggccgtgtacttcacccagaaccagtgggccagcctggaccccatgcagagggccctgtacagggaggtgatgctggagaactacaccaacatggccagcctggccttccccttccccaagcccgtgctggtgagccacctggagaggggcgaggccccctggggccccgacccctgggaggccgaggtgctgaggggcatctgccccggcggcaccagccccaagaaaaagagaaaagtctaagctgccttctgcggggcttgccttctggccatgcccttcttctctcccttgcacctgtacctcttggtctttgaataaagcctgagtaggaaggctagcaaaaaaaaaaaaaaaaaaaaaaaaaaaaaaaaaaaaaaaaaaaaaaaaaaaaaaaaaaaaaaaaaaaaaaaaaaaaaaaa

SEQ ID NO: 3384 - RNA, 5419 nt, synthetic construct
  source 1..5419: mol_type = other RNA
aggaaataagagagaaaagaagagtaagaagaaatataagagccaccatggcccctaagaagaagcgtaaagtgagccgggtgaacggcagcggcagcggcggcggcatgaaccacgaccaggagttcgacccccctaaggtgtaccctcccgtccccgccgagaagagaaagcccatccgggtcctgagcctgttcgatggcatcgccaccggtctgctggtgctgaaggacctgggcatccaggtggataggtacattgcctccgaggtgtgcgaggactccatcaccgtgggaatggtgcgtcatcagggcaagatcatgtacgtgggcgacgtgcggagcgtgacacagaagcatatccaggagtggggccctttcgacctggtgatcggcggcagcccttgcaatgacctgagcatcgtgaacccagcccggaagggcctgtacgagggaaccggcagactgttcttcgagttttacagactgctgcacgacgcccggcctaaggaaggcgacgaccggcccttcttttggctgttcgagaatgtggtggccatgggagtcagcgacaagcgggatattagccggttcctggagagcaaccccgtgatgatcgatgccaaggaagtgagcgccgcccaccgggccagatacttctggggcaatctgcctggcatgaacagacccctggccagcaccgtgaacgacaagctggagctgcaggagtgcctggagcacggccggatcgccaagttcagcaaggtgagaaccatcaccacccgaagcaacagcatcaaacaaggcaaggaccagcactttcctgtgttcatgaacgagaaggaggacatcctgtggtgtaccgagatggagagagtgttcgggttcccagtccactacacagatgtcagcaacatgtctagactggccagacagagactgctgggaagaagctggtccgtccctgtgatcagacacctgttcgcccctctgaaggagtacttcgcctgcgtgagcagcggcaacagcaacgccaacagccggggccccagcttctctagcggcctggtgccactgtccctgagagggagccacatgggccccatggagatctacaaaaccgtgagcgcctggaagcggcagcctgtgcgcgtgctgagcctgtttcggaatatcgataaagtcctgaaaagcctgggattcctggagagcggctctggctccggcggtggcaccctgaagtacgtggaggatgtgacaaacgtggtcagacgggatgtggagaagtggggccccttcgatctggtgtacggcagcacccaacccctgggcagctcttgtgaccggtgccctggctggtacatgtttcagttccaccggatcctgcagtacgccctgccgagacaggagtcccagcggccattcttttggattttcatggacaacttgctgctgaccgaggatgaccaggaaactaccactcggttcctgcagaccgaagccgtgaccctgcaggacgtgagaggccgggactaccagaacgccatgcgggtgtggtccaacatccctggactgaaaagcaagcacgcacctctgacccctaaagaagaggagtacctgcaggcccaggtgcggagcagaagcaagctggacgcccctaaggtggatctgctggtgaagaattgcctcctgcccctgagagagtacttcaagtatttcagccagaatagtctgcccctgggcggcccaagcagcggcgcccctcctcccagcggcggcagcccagccggctccccaacctctaccgaggagggcacctctgagtccgccacccccgagagcggccctggcacctccaccgagcccagcgagggcagcgcacccggcagccctgccggcagccccacctccacagaggagggaaccagcaccgagcccagcgaaggcagcgccccaggcaccagcaccgagcctagtgagggcggctctggcggcggcagcgcccaggagattaaacggatcaacaagatcagaagaagacttgtgaaagacagcaacaccaagaaggccggcaagacaggccccatgaaaaccctgctggttagagtgatgacacccgatctgagagagcggctggaaaacctgagaaagaagcctgaaaatatcccccagcccatcagcaatacatctagagccaacctgaataagctgctgaccgattacaccgaaatgaagaaggcgatcctgcatgtgtactgggaagagttccagaaggaccctgtgggcctgatgagccgggtggcccagcctgccagcaagaagatcgatcagaacaagctgaaacctgagatggacgagaagggcaacctgaccaccgccggctttgcctgctctcagtgtggccagcccctgttcgtgtacaagctggagcaggtgtctgagaagggcaaggcttacaccaactacttcggacggtgcaatgtggccgagcacgaaaagctgatcctgctggcccagctgaagcccgagaaggatagcgacgaagccgtgacatatagcctgggaaagtttgggcagagggccctggatttctacagcattcatgtgaccaaggagtccacccaccccgtgaagcccctggcccagatcgccggaaacagatacgcctccggacctgtgggaaaggccctgagcgacgcatgtatgggcacaatcgcctccttcctgtctaagtaccaggacatcatcatcgaacaccagaaggtggtgaagggcaaccagaagagactggagagcctgcgggagctggccggcaaggaaaacctggaataccctagcgtgaccctgccacctcagcctcacaccaaggagggcgttgatgcctacaacgaagtgatcgcccgggtgcgaatgtgggtgaacctgaacctgtggcagaagctgaagctaagcagagatgatgccaagcctctgctgagactgaagggattcccttcctttcctctggtcgagagacaggccaacgaagtggactggtgggacatggtgtgtaacgtgaagaagctgatcaacgagaaaaaggaggatggcaaggtgttttggcagaatctggctggctacaagagacaggaagccctgagaccatacctgagcagcgaggaagatcggaagaagggaaagaaattcgctcggtaccagctgggcgacctgctgctgcacctggaaaagaagcacggcgaggactggggaaaggtgtacgacgaggcctgggagcggattgacaagaaagtggaaggcctgagcaagcacatcaagctggaagaggaacggagaagcgaggacgcccagagcaaggccgccctgaccgactggctgcgggctaaggccagcttcgtgatcgagggcctgaaggaggccgacaaggacgagttctgcagatgcgagctgaagctgcagaagtggtacggggacctgcggggaaagcccttcgccatcgaagccgagaacagcatcctggacatcagcggcttcagcaagcagtacaactgtgccttcatctggcagaaggacggcgtgaagaagctgaacctgtacctgatcatcaactacttcaagggcggcaagctgcggttcaagaagatcaaacctgaagccttcgaagccaacagattctacaccgtgatcaacaaaaagagcggcgagatcgtgcccatggaggtgaacttcaacttcgacgaccccaacctgatcatcctgcctctggcctttggcaagagacagggcagagaattcatctggaacgacctgctgtccctggaaaccggcagcctgaagctggccaacggaagagtgatcgagaagacactgtacaacagaagaacccggcaggatgagcctgccctgttcgtggccctgaccttcgagcggcgggaggtcctggactcctccaatatcaaaccaatgaacctgatcggcgtggcaagaggcgaaaacatccccgccgtgatcgccctgaccgaccccgagggctgcccactgagccggtttaaggatagcctgggaaacccaacccacatcctgagaatcggcgagagctataaggagaagcagcggaccatccaggccaagaaggaggtggagcagcggagagccggcggctacagccggaagtacgccagcaaagccaagaatctggcagacgatatggtgagaaacaccgctagagatctgctgtactacgccgtgacccaggatgccatgctgatcttcgccaacctgagccggggcttcggccggcagggcaagcggaccttcatggccgagagacagtacacacggatggaggactggctgaccgccaagctggcctacgagggcctgagcaagacctacctgtccaagacactggcccagtacacctccaagacatgcagcaactgtgggtttaccatcaccagcgccgactacgacagggtgctggagaagctgaagaagacagcaacaggctggatgaccacaattaacggcaaggagctgaaggtggagggccagattacctactacaacagatacaagagacagaacgtagtcaaggacctgtccgtcgagctggatagactgagcgaagaatctgtgaacaacgacatctcctcctggacaaagggcagaagcggagaagctctgagcctcctgaagaaaagattctcccatagacccgtgcaggagaagttcgtgtgcctgaactgcggcttcgagacacacgcagccgagcaagccgccctgaacatcgccagatcctggctgttcctgcggagccaggagtacaagaaataccagacaaacaagacaaccggcaacaccgataagagagccttcgtcgagacctggcagtccttttaccggaagaagcttaaggaggtgtggaaacctgccgtgcggtctggcggatctggcggaggctccacaagcagcaagctgagcgaggccttcgaggacgtggccgtgtacttcacctggaaggagtgggccctgctggaggccgccgacaagatgctgtacagggaccagatgctgaagaactaccaggccctgttcagcctgggctacaggggccccacccccgacctgatctgcaggatccagaggggcgagatggagctgtgggtgagcgacctggaggaggccggcgagagcagcctgagcgaggacagcaccagccccaagaaaaagagaaaagtctaagctgccttctgcggggcttgccttctggccatgcccttcttctctcccttgcacctgtacctcttggtctttgaataaagcctgagtaggaaggctagcaaaaaaaaaaaaaaaaaaaaaaaaaaaaaaaaaaaaaaaaaaaaaaaaaaaaaaaaaaaaaaaaaaaaaaaaaaaaaaaa

SEQ ID NO: 3385 - RNA, 5419 nt, synthetic construct
  source 1..5419: mol_type = other RNA
aggaaataagagagaaaagaagagtaagaagaaatataagagccaccatggcccctaagaagaagcgtaaagtgagccgggtgaacggcagcggcagcggcggcggcatgaaccacgaccaggagttcgacccccctaaggtgtaccctcccgtccccgccgagaagagaaagcccatccgggtcctgagcctgttcgatggcatcgccaccggtctgctggtgctgaaggacctgggcatccaggtggataggtacattgcctccgaggtgtgcgaggactccatcaccgtgggaatggtgcgtcatcagggcaagatcatgtacgtgggcgacgtgcggagcgtgacacagaagcatatccaggagtggggccctttcgacctggtgatcggcggcagcccttgcaatgacctgagcatcgtgaacccagcccggaagggcctgtacgagggaaccggcagactgttcttcgagttttacagactgctgcacgacgcccggcctaaggaaggcgacgaccggcccttcttttggctgttcgagaatgtggtggccatgggagtcagcgacaagcgggatattagccggttcctggagagcaaccccgtgatgatcgatgccaaggaagtgagcgccgcccaccgggccagatacttctggggcaatctgcctggcatgaacagacccctggccagcaccgtgaacgacaagctggagctgcaggagtgcctggagcacggccggatcgccaagttcagcaaggtgagaaccatcaccacccgaagcaacagcatcaaacaaggcaaggaccagcactttcctgtgttcatgaacgagaaggaggacatcctgtggtgtaccgagatggagagagtgttcgggttcccagtccactacacagatgtcagcaacatgtctagactggccagacagagactgctgggaagaagctggtccgtccctgtgatcagacacctgttcgcccctctgaaggagtacttcgcctgcgtgagcagcggcaacagcaacgccaacagccggggccccagcttctctagcggcctggtgccactgtccctgagagggagccacatgggccccatggagatctacaaaaccgtgagcgcctggaagcggcagcctgtgcgcgtgctgagcctgtttcggaatatcgataaagtcctgaaaagcctgggattcctggagagcggctctggctccggcggtggcaccctgaagtacgtggaggatgtgacaaacgtggtcagacgggatgtggagaagtggggccccttcgatctggtgtacggcagcacccaacccctgggcagctcttgtgaccggtgccctggctggtacatgtttcagttccaccggatcctgcagtacgccctgccgagacaggagtcccagcggccattcttttggattttcatggacaacttgctgctgaccgaggatgaccaggaaactaccactcggttcctgcagaccgaagccgtgaccctgcaggacgtgagaggccgggactaccagaacgccatgcgggtgtggtccaacatccctggactgaaaagcaagcacgcacctctgacccctaaagaagaggagtacctgcaggcccaggtgcggagcagaagcaagctggacgcccctaaggtggatctgctggtgaagaattgcctcctgcccctgagagagtacttcaagtatttcagccagaatagtctgcccctgggcggcccaagcagcggcgcccctcctcccagcggcggcagcccagccggctccccaacctctaccgaggagggcacctctgagtccgccacccccgagagcggccctggcacctccaccgagcccagcgagggcagcgcacccggcagccctgccggcagccccacctccacagaggagggaaccagcaccgagcccagcgaaggcagcgccccaggcaccagcaccgagcctagtgagggcggctctggcggcggcagcgcccaggagattaaacggatcaacaagatcagaagaagacttgtgaaagacagcaacaccaagaaggccggcaagacaggccccatgaaaaccctgctggttagagtgatgacacccgatctgagagagcggctggaaaacctgagaaagaagcctgaaaatatcccccagcccatcagcaatacatctagagccaacctgaataagctgctgaccgattacaccgaaatgaagaaggcgatcctgcatgtgtactgggaagagttccagaaggaccctgtgggcctgatgagccgggtggcccagcctgccagcaagaagatcgatcagaacaagctgaaacctgagatggacgagaagggcaacctgaccaccgccggctttgcctgctctcagtgtggccagcccctgttcgtgtacaagctggagcaggtgtctgagaagggcaaggcttacaccaactacttcggacggtgcaatgtggccgagcacgaaaagctgatcctgctggcccagctgaagcccgagaaggatagcgacgaagccgtgacatatagcctgggaaagtttgggcagagggccctggatttctacagcattcatgtgaccaaggagtccacccaccccgtgaagcccctggcccagatcgccggaaacagatacgcctccggacctgtgggaaaggccctgagcgacgcatgtatgggcacaatcgcctccttcctgtctaagtaccaggacatcatcatcgaacaccagaaggtggtgaagggcaaccagaagagactggagagcctgcgggagctggccggcaaggaaaacctggaataccctagcgtgaccctgccacctcagcctcacaccaaggagggcgttgatgcctacaacgaagtgatcgcccgggtgcgaatgtgggtgaacctgaacctgtggcagaagctgaagctaagcagagatgatgccaagcctctgctgagactgaagggattcccttcctttcctctggtcgagagacaggccaacgaagtggactggtgggacatggtgtgtaacgtgaagaagctgatcaacgagaaaaaggaggatggcaaggtgttttggcagaatctggctggctacaagagacaggaagccctgagaccatacctgagcagcgaggaagatcggaagaagggaaagaaattcgctcggtaccagctgggcgacctgctgctgcacctggaaaagaagcacggcgaggactggggaaaggtgtacgacgaggcctgggagcggattgacaagaaagtggaaggcctgagcaagcacatcaagctggaagaggaacggagaagcgaggacgcccagagcaaggccgccctgaccgactggctgcgggctaaggccagcttcgtgatcgagggcctgaaggaggccgacaaggacgagttctgcagatgcgagctgaagctgcagaagtggtacggggacctgcggggaaagcccttcgccatcgaagccgagaacagcatcctggacatcagcggcttcagcaagcagtacaactgtgccttcatctggcagaaggacggcgtgaagaagctgaacctgtacctgatcatcaactacttcaagggcggcaagctgcggttcaagaagatcaaacctgaagccttcgaagccaacagattctacaccgtgatcaacaaaaagagcggcgagatcgtgcccatggaggtgaacttcaacttcgacgaccccaacctgatcatcctgcctctggcctttggcaagagacagggcagagaattcatctggaacgacctgctgtccctggaaaccggcagcctgaagctggccaacggaagagtgatcgagaagacactgtacaacagaagaacccggcaggatgagcctgccctgttcgtggccctgaccttcgagcggcgggaggtcctggactcctccaatatcaaaccaatgaacctgatcggcgtggcaagaggcgaaaacatccccgccgtgatcgccctgaccgaccccgagggctgcccactgagccggtttaaggatagcctgggaaacccaacccacatcctgagaatcggcgagagctataaggagaagcagcggaccatccaggccaagaaggaggtggagcagcggagagccggcggctacagccggaagtacgccagcaaagccaagaatctggcagacgatatggtgagaaacaccgctagagatctgctgtactacgccgtgacccaggatgccatgctgatcttcgccaacctgagccggggcttcggccggcagggcaagcggaccttcatggccgagagacagtacacacggatggaggactggctgaccgccaagctggcctacgagggcctgagcaagacctacctgtccaagacactggcccagtacacctccaagacatgcagcaactgtgggtttaccatcaccagcgccgactacgacagggtgctggagaagctgaagaagacagcaacaggctggatgaccacaattaacggcaaggagctgaaggtggagggccagattacctactacaacagatacaagagacagaacgtagtcaaggacctgtccgtcgagctggatagactgagcgaagaatctgtgaacaacgacatctcctcctggacaaagggcagaagcggagaagctctgagcctcctgaagaaaagattctcccatagacccgtgcaggagaagttcgtgtgcctgaactgcggcttcgagacacacgcagccgagcaagccgccctgaacatcgccagatcctggctgttcctgcggagccaggagtacaagaaataccagacaaacaagacaaccggcaacaccgataagagagccttcgtcgagacctggcagtccttttaccggaagaagcttaaggaggtgtggaaacctgccgtgcggtctggcggatctggcggaggctccacaagcgtgaccttcgaggacgtggccgtgtacttcagctgggaggagtggggcctgctggacgaggcccagaggtgcctgtaccaggacgtgatgctggagaacctggccctgatcaacagcctgggcctgaggcacggcgccgaggacgaggacgcccccgagcacagggtgagcgtgcaggccgccagccaggtgggcaccaggaaggccgtggtgagcccccagaaggcccaccccagggaggtgaccagccccaagaaaaagagaaaagtctaagctgccttctgcggggcttgccttctggccatgcccttcttctctcccttgcacctgtacctcttggtctttgaataaagcctgagtaggaaggctagcaaaaaaaaaaaaaaaaaaaaaaaaaaaaaaaaaaaaaaaaaaaaaaaaaaaaaaaaaaaaaaaaaaaaaaaaaaaaaaaa

SEQ ID NO: 3386 - RNA, 5419 nt, synthetic construct
  source 1..5419: mol_type = other RNA
aggaaataagagagaaaagaagagtaagaagaaatataagagccaccatggcccctaagaagaagcgtaaagtgagccgggtgaacggcagcggcagcggcggcggcatgaaccacgaccaggagttcgacccccctaaggtgtaccctcccgtccccgccgagaagagaaagcccatccgggtcctgagcctgttcgatggcatcgccaccggtctgctggtgctgaaggacctgggcatccaggtggataggtacattgcctccgaggtgtgcgaggactccatcaccgtgggaatggtgcgtcatcagggcaagatcatgtacgtgggcgacgtgcggagcgtgacacagaagcatatccaggagtggggccctttcgacctggtgatcggcggcagcccttgcaatgacctgagcatcgtgaacccagcccggaagggcctgtacgagggaaccggcagactgttcttcgagttttacagactgctgcacgacgcccggcctaaggaaggcgacgaccggcccttcttttggctgttcgagaatgtggtggccatgggagtcagcgacaagcgggatattagccggttcctggagagcaaccccgtgatgatcgatgccaaggaagtgagcgccgcccaccgggccagatacttctggggcaatctgcctggcatgaacagacccctggccagcaccgtgaacgacaagctggagctgcaggagtgcctggagcacggccggatcgccaagttcagcaaggtgagaaccatcaccacccgaagcaacagcatcaaacaaggcaaggaccagcactttcctgtgttcatgaacgagaaggaggacatcctgtggtgtaccgagatggagagagtgttcgggttcccagtccactacacagatgtcagcaacatgtctagactggccagacagagactgctgggaagaagctggtccgtccctgtgatcagacacctgttcgcccctctgaaggagtacttcgcctgcgtgagcagcggcaacagcaacgccaacagccggggccccagcttctctagcggcctggtgccactgtccctgagagggagccacatgggccccatggagatctacaaaaccgtgagcgcctggaagcggcagcctgtgcgcgtgctgagcctgtttcggaatatcgataaagtcctgaaaagcctgggattcctggagagcggctctggctccggcggtggcaccctgaagtacgtggaggatgtgacaaacgtggtcagacgggatgtggagaagtggggccccttcgatctggtgtacggcagcacccaacccctgggcagctcttgtgaccggtgccctggctggtacatgtttcagttccaccggatcctgcagtacgccctgccgagacaggagtcccagcggccattcttttggattttcatggacaacttgctgctgaccgaggatgaccaggaaactaccactcggttcctgcagaccgaagccgtgaccctgcaggacgtgagaggccgggactaccagaacgccatgcgggtgtggtccaacatccctggactgaaaagcaagcacgcacctctgacccctaaagaagaggagtacctgcaggcccaggtgcggagcagaagcaagctggacgcccctaaggtggatctgctggtgaagaattgcctcctgcccctgagagagtacttcaagtatttcagccagaatagtctgcccctgggcggcccaagcagcggcgcccctcctcccagcggcggcagcccagccggctccccaacctctaccgaggagggcacctctgagtccgccacccccgagagcggccctggcacctccaccgagcccagcgagggcagcgcacccggcagccctgccggcagccccacctccacagaggagggaaccagcaccgagcccagcgaaggcagcgccccaggcaccagcaccgagcctagtgagggcggctctggcggcggcagcgcccaggagattaaacggatcaacaagatcagaagaagacttgtgaaagacagcaacaccaagaaggccggcaagacaggccccatgaaaaccctgctggttagagtgatgacacccgatctgagagagcggctggaaaacctgagaaagaagcctgaaaatatcccccagcccatcagcaatacatctagagccaacctgaataagctgctgaccgattacaccgaaatgaagaaggcgatcctgcatgtgtactgggaagagttccagaaggaccctgtgggcctgatgagccgggtggcccagcctgccagcaagaagatcgatcagaacaagctgaaacctgagatggacgagaagggcaacctgaccaccgccggctttgcctgctctcagtgtggccagcccctgttcgtgtacaagctggagcaggtgtctgagaagggcaaggcttacaccaactacttcggacggtgcaatgtggccgagcacgaaaagctgatcctgctggcccagctgaagcccgagaaggatagcgacgaagccgtgacatatagcctgggaaagtttgggcagagggccctggatttctacagcattcatgtgaccaaggagtccacccaccccgtgaagcccctggcccagatcgccggaaacagatacgcctccggacctgtgggaaaggccctgagcgacgcatgtatgggcacaatcgcctccttcctgtctaagtaccaggacatcatcatcgaacaccagaaggtggtgaagggcaaccagaagagactggagagcctgcgggagctggccggcaaggaaaacctggaataccctagcgtgaccctgccacctcagcctcacaccaaggagggcgttgatgcctacaacgaagtgatcgcccgggtgcgaatgtgggtgaacctgaacctgtggcagaagctgaagctaagcagagatgatgccaagcctctgctgagactgaagggattcccttcctttcctctggtcgagagacaggccaacgaagtggactggtgggacatggtgtgtaacgtgaagaagctgatcaacgagaaaaaggaggatggcaaggtgttttggcagaatctggctggctacaagagacaggaagccctgagaccatacctgagcagcgaggaagatcggaagaagggaaagaaattcgctcggtaccagctgggcgacctgctgctgcacctggaaaagaagcacggcgaggactggggaaaggtgtacgacgaggcctgggagcggattgacaagaaagtggaaggcctgagcaagcacatcaagctggaagaggaacggagaagcgaggacgcccagagcaaggccgccctgaccgactggctgcgggctaaggccagcttcgtgatcgagggcctgaaggaggccgacaaggacgagttctgcagatgcgagctgaagctgcagaagtggtacggggacctgcggggaaagcccttcgccatcgaagccgagaacagcatcctggacatcagcggcttcagcaagcagtacaactgtgccttcatctggcagaaggacggcgtgaagaagctgaacctgtacctgatcatcaactacttcaagggcggcaagctgcggttcaagaagatcaaacctgaagccttcgaagccaacagattctacaccgtgatcaacaaaaagagcggcgagatcgtgcccatggaggtgaacttcaacttcgacgaccccaacctgatcatcctgcctctggcctttggcaagagacagggcagagaattcatctggaacgacctgctgtccctggaaaccggcagcctgaagctggccaacggaagagtgatcgagaagacactgtacaacagaagaacccggcaggatgagcctgccctgttcgtggccctgaccttcgagcggcgggaggtcctggactcctccaatatcaaaccaatgaacctgatcggcgtggcaagaggcgaaaacatccccgccgtgatcgccctgaccgaccccgagggctgcccactgagccggtttaaggatagcctgggaaacccaacccacatcctgagaatcggcgagagctataaggagaagcagcggaccatccaggccaagaaggaggtggagcagcggagagccggcggctacagccggaagtacgccagcaaagccaagaatctggcagacgatatggtgagaaacaccgctagagatctgctgtactacgccgtgacccaggatgccatgctgatcttcgccaacctgagccggggcttcggccggcagggcaagcggaccttcatggccgagagacagtacacacggatggaggactggctgaccgccaagctggcctacgagggcctgagcaagacctacctgtccaagacactggcccagtacacctccaagacatgcagcaactgtgggtttaccatcaccagcgccgactacgacagggtgctggagaagctgaagaagacagcaacaggctggatgaccacaattaacggcaaggagctgaaggtggagggccagattacctactacaacagatacaagagacagaacgtagtcaaggacctgtccgtcgagctggatagactgagcgaagaatctgtgaacaacgacatctcctcctggacaaagggcagaagcggagaagctctgagcctcctgaagaaaagattctcccatagacccgtgcaggagaagttcgtgtgcctgaactgcggcttcgagacacacgcagccgagcaagccgccctgaacatcgccagatcctggctgttcctgcggagccaggagtacaagaaataccagacaaacaagacaaccggcaacaccgataagagagccttcgtcgagacctggcagtccttttaccggaagaagcttaaggaggtgtggaaacctgccgtgcggtctggcggatctggcggaggctccacaagcaagcccggcaccgtgagcttcgccgacgtggccgtgtacttcagccccgaggagtggggctgcctgaggcccgcccagagggccctgtacagggacgtgatgcaggagacctacggccacctgggcgccctgggcttccccggccccaagcccgccctgatcagctggatggagcaggagagcgaggcctggagccccgccgcccaggaccccgagaagggcgagaggctgggcggcgccaggaccagccccaagaaaaagagaaaagtctaagctgccttctgcggggcttgccttctggccatgcccttcttctctcccttgcacctgtacctcttggtctttgaataaagcctgagtaggaaggctagcaaaaaaaaaaaaaaaaaaaaaaaaaaaaaaaaaaaaaaaaaaaaaaaaaaaaaaaaaaaaaaaaaaaaaaaaaaaaaaaa

SEQ ID NO: 3387 - RNA, 5419 nt, synthetic construct
  source 1..5419: mol_type = other RNA
aggaaataagagagaaaagaagagtaagaagaaatataagagccaccatggcccctaagaagaagcgtaaagtgagccgggtgaacggcagcggcagcggcggcggcatgaaccacgaccaggagttcgacccccctaaggtgtaccctcccgtccccgccgagaagagaaagcccatccgggtcctgagcctgttcgatggcatcgccaccggtctgctggtgctgaaggacctgggcatccaggtggataggtacattgcctccgaggtgtgcgaggactccatcaccgtgggaatggtgcgtcatcagggcaagatcatgtacgtgggcgacgtgcggagcgtgacacagaagcatatccaggagtggggccctttcgacctggtgatcggcggcagcccttgcaatgacctgagcatcgtgaacccagcccggaagggcctgtacgagggaaccggcagactgttcttcgagttttacagactgctgcacgacgcccggcctaaggaaggcgacgaccggcccttcttttggctgttcgagaatgtggtggccatgggagtcagcgacaagcgggatattagccggttcctggagagcaaccccgtgatgatcgatgccaaggaagtgagcgccgcccaccgggccagatacttctggggcaatctgcctggcatgaacagacccctggccagcaccgtgaacgacaagctggagctgcaggagtgcctggagcacggccggatcgccaagttcagcaaggtgagaaccatcaccacccgaagcaacagcatcaaacaaggcaaggaccagcactttcctgtgttcatgaacgagaaggaggacatcctgtggtgtaccgagatggagagagtgttcgggttcccagtccactacacagatgtcagcaacatgtctagactggccagacagagactgctgggaagaagctggtccgtccctgtgatcagacacctgttcgcccctctgaaggagtacttcgcctgcgtgagcagcggcaacagcaacgccaacagccggggccccagcttctctagcggcctggtgccactgtccctgagagggagccacatgggccccatggagatctacaaaaccgtgagcgcctggaagcggcagcctgtgcgcgtgctgagcctgtttcggaatatcgataaagtcctgaaaagcctgggattcctggagagcggctctggctccggcggtggcaccctgaagtacgtggaggatgtgacaaacgtggtcagacgggatgtggagaagtggggccccttcgatctggtgtacggcagcacccaacccctgggcagctcttgtgaccggtgccctggctggtacatgtttcagttccaccggatcctgcagtacgccctgccgagacaggagtcccagcggccattcttttggattttcatggacaacttgctgctgaccgaggatgaccaggaaactaccactcggttcctgcagaccgaagccgtgaccctgcaggacgtgagaggccgggactaccagaacgccatgcgggtgtggtccaacatccctggactgaaaagcaagcacgcacctctgacccctaaagaagaggagtacctgcaggcccaggtgcggagcagaagcaagctggacgcccctaaggtggatctgctggtgaagaattgcctcctgcccctgagagagtacttcaagtatttcagccagaatagtctgcccctgggcggcccaagcagcggcgcccctcctcccagcggcggcagcccagccggctccccaacctctaccgaggagggcacctctgagtccgccacccccgagagcggccctggcacctccaccgagcccagcgagggcagcgcacccggcagccctgccggcagccccacctccacagaggagggaaccagcaccgagcccagcgaaggcagcgccccaggcaccagcaccgagcctagtgagggcggctctggcggcggcagcgcccaggagattaaacggatcaacaagatcagaagaagacttgtgaaagacagcaacaccaagaaggccggcaagacaggccccatgaaaaccctgctggttagagtgatgacacccgatctgagagagcggctggaaaacctgagaaagaagcctgaaaatatcccccagcccatcagcaatacatctagagccaacctgaataagctgctgaccgattacaccgaaatgaagaaggcgatcctgcatgtgtactgggaagagttccagaaggaccctgtgggcctgatgagccgggtggcccagcctgccagcaagaagatcgatcagaacaagctgaaacctgagatggacgagaagggcaacctgaccaccgccggctttgcctgctctcagtgtggccagcccctgttcgtgtacaagctggagcaggtgtctgagaagggcaaggcttacaccaactacttcggacggtgcaatgtggccgagcacgaaaagctgatcctgctggcccagctgaagcccgagaaggatagcgacgaagccgtgacatatagcctgggaaagtttgggcagagggccctggatttctacagcattcatgtgaccaaggagtccacccaccccgtgaagcccctggcccagatcgccggaaacagatacgcctccggacctgtgggaaaggccctgagcgacgcatgtatgggcacaatcgcctccttcctgtctaagtaccaggacatcatcatcgaacaccagaaggtggtgaagggcaaccagaagagactggagagcctgcgggagctggccggcaaggaaaacctggaataccctagcgtgaccctgccacctcagcctcacaccaaggagggcgttgatgcctacaacgaagtgatcgcccgggtgcgaatgtgggtgaacctgaacctgtggcagaagctgaagctaagcagagatgatgccaagcctctgctgagactgaagggattcccttcctttcctctggtcgagagacaggccaacgaagtggactggtgggacatggtgtgtaacgtgaagaagctgatcaacgagaaaaaggaggatggcaaggtgttttggcagaatctggctggctacaagagacaggaagccctgagaccatacctgagcagcgaggaagatcggaagaagggaaagaaattcgctcggtaccagctgggcgacctgctgctgcacctggaaaagaagcacggcgaggactggggaaaggtgtacgacgaggcctgggagcggattgacaagaaagtggaaggcctgagcaagcacatcaagctggaagaggaacggagaagcgaggacgcccagagcaaggccgccctgaccgactggctgcgggctaaggccagcttcgtgatcgagggcctgaaggaggccgacaaggacgagttctgcagatgcgagctgaagctgcagaagtggtacggggacctgcggggaaagcccttcgccatcgaagccgagaacagcatcctggacatcagcggcttcagcaagcagtacaactgtgccttcatctggcagaaggacggcgtgaagaagctgaacctgtacctgatcatcaactacttcaagggcggcaagctgcggttcaagaagatcaaacctgaagccttcgaagccaacagattctacaccgtgatcaacaaaaagagcggcgagatcgtgcccatggaggtgaacttcaacttcgacgaccccaacctgatcatcctgcctctggcctttggcaagagacagggcagagaattcatctggaacgacctgctgtccctggaaaccggcagcctgaagctggccaacggaagagtgatcgagaagacactgtacaacagaagaacccggcaggatgagcctgccctgttcgtggccctgaccttcgagcggcgggaggtcctggactcctccaatatcaaaccaatgaacctgatcggcgtggcaagaggcgaaaacatccccgccgtgatcgccctgaccgaccccgagggctgcccactgagccggtttaaggatagcctgggaaacccaacccacatcctgagaatcggcgagagctataaggagaagcagcggaccatccaggccaagaaggaggtggagcagcggagagccggcggctacagccggaagtacgccagcaaagccaagaatctggcagacgatatggtgagaaacaccgctagagatctgctgtactacgccgtgacccaggatgccatgctgatcttcgccaacctgagccggggcttcggccggcagggcaagcggaccttcatggccgagagacagtacacacggatggaggactggctgaccgccaagctggcctacgagggcctgagcaagacctacctgtccaagacactggcccagtacacctccaagacatgcagcaactgtgggtttaccatcaccagcgccgactacgacagggtgctggagaagctgaagaagacagcaacaggctggatgaccacaattaacggcaaggagctgaaggtggagggccagattacctactacaacagatacaagagacagaacgtagtcaaggacctgtccgtcgagctggatagactgagcgaagaatctgtgaacaacgacatctcctcctggacaaagggcagaagcggagaagctctgagcctcctgaagaaaagattctcccatagacccgtgcaggagaagttcgtgtgcctgaactgcggcttcgagacacacgcagccgagcaagccgccctgaacatcgccagatcctggctgttcctgcggagccaggagtacaagaaataccagacaaacaagacaaccggcaacaccgataagagagccttcgtcgagacctggcagtccttttaccggaagaagcttaaggaggtgtggaaacctgccgtgcggtctggcggatctggcggaggctccacaagcacccccgacgtggtgaccttcgaggacgtggccgtgtgcttcagcagcggcgagtggcagtgcctgaccagggcccagaggcacctgtacaccgacgtgatgctggagaactacggcaacatgctgagcgccggcctggcctgccccaagccccccctgatcagccacctggagcagggcgccgtgccctgcgccgaggacctgcaggactggggcttcctgacctgcagcttccccgtgagcaccagccccaagaaaaagagaaaagtctaagctgccttctgcggggcttgccttctggccatgcccttcttctctcccttgcacctgtacctcttggtctttgaataaagcctgagtaggaaggctagcaaaaaaaaaaaaaaaaaaaaaaaaaaaaaaaaaaaaaaaaaaaaaaaaaaaaaaaaaaaaaaaaaaaaaaaaaaaaaaaa

SEQ ID NO: 3388 - RNA, 5419 nt, synthetic construct
  source 1..5419: mol_type = other RNA
aggaaataagagagaaaagaagagtaagaagaaatataagagccaccatggcccctaagaagaagcgtaaagtgagccgggtgaacggcagcggcagcggcggcggcatgaaccacgaccaggagttcgacccccctaaggtgtaccctcccgtccccgccgagaagagaaagcccatccgggtcctgagcctgttcgatggcatcgccaccggtctgctggtgctgaaggacctgggcatccaggtggataggtacattgcctccgaggtgtgcgaggactccatcaccgtgggaatggtgcgtcatcagggcaagatcatgtacgtgggcgacgtgcggagcgtgacacagaagcatatccaggagtggggccctttcgacctggtgatcggcggcagcccttgcaatgacctgagcatcgtgaacccagcccggaagggcctgtacgagggaaccggcagactgttcttcgagttttacagactgctgcacgacgcccggcctaaggaaggcgacgaccggcccttcttttggctgttcgagaatgtggtggccatgggagtcagcgacaagcgggatattagccggttcctggagagcaaccccgtgatgatcgatgccaaggaagtgagcgccgcccaccgggccagatacttctggggcaatctgcctggcatgaacagacccctggccagcaccgtgaacgacaagctggagctgcaggagtgcctggagcacggccggatcgccaagttcagcaaggtgagaaccatcaccacccgaagcaacagcatcaaacaaggcaaggaccagcactttcctgtgttcatgaacgagaaggaggacatcctgtggtgtaccgagatggagagagtgttcgggttcccagtccactacacagatgtcagcaacatgtctagactggccagacagagactgctgggaagaagctggtccgtccctgtgatcagacacctgttcgcccctctgaaggagtacttcgcctgcgtgagcagcggcaacagcaacgccaacagccggggccccagcttctctagcggcctggtgccactgtccctgagagggagccacatgggccccatggagatctacaaaaccgtgagcgcctggaagcggcagcctgtgcgcgtgctgagcctgtttcggaatatcgataaagtcctgaaaagcctgggattcctggagagcggctctggctccggcggtggcaccctgaagtacgtggaggatgtgacaaacgtggtcagacgggatgtggagaagtggggccccttcgatctggtgtacggcagcacccaacccctgggcagctcttgtgaccggtgccctggctggtacatgtttcagttccaccggatcctgcagtacgccctgccgagacaggagtcccagcggccattcttttggattttcatggacaacttgctgctgaccgaggatgaccaggaaactaccactcggttcctgcagaccgaagccgtgaccctgcaggacgtgagaggccgggactaccagaacgccatgcgggtgtggtccaacatccctggactgaaaagcaagcacgcacctctgacccctaaagaagaggagtacctgcaggcccaggtgcggagcagaagcaagctggacgcccctaaggtggatctgctggtgaagaattgcctcctgcccctgagagagtacttcaagtatttcagccagaatagtctgcccctgggcggcccaagcagcggcgcccctcctcccagcggcggcagcccagccggctccccaacctctaccgaggagggcacctctgagtccgccacccccgagagcggccctggcacctccaccgagcccagcgagggcagcgcacccggcagccctgccggcagccccacctccacagaggagggaaccagcaccgagcccagcgaaggcagcgccccaggcaccagcaccgagcctagtgagggcggctctggcggcggcagcgcccaggagattaaacggatcaacaagatcagaagaagacttgtgaaagacagcaacaccaagaaggccggcaagacaggccccatgaaaaccctgctggttagagtgatgacacccgatctgagagagcggctggaaaacctgagaaagaagcctgaaaatatcccccagcccatcagcaatacatctagagccaacctgaataagctgctgaccgattacaccgaaatgaagaaggcgatcctgcatgtgtactgggaagagttccagaaggaccctgtgggcctgatgagccgggtggcccagcctgccagcaagaagatcgatcagaacaagctgaaacctgagatggacgagaagggcaacctgaccaccgccggctttgcctgctctcagtgtggccagcccctgttcgtgtacaagctggagcaggtgtctgagaagggcaaggcttacaccaactacttcggacggtgcaatgtggccgagcacgaaaagctgatcctgctggcccagctgaagcccgagaaggatagcgacgaagccgtgacatatagcctgggaaagtttgggcagagggccctggatttctacagcattcatgtgaccaaggagtccacccaccccgtgaagcccctggcccagatcgccggaaacagatacgcctccggacctgtgggaaaggccctgagcgacgcatgtatgggcacaatcgcctccttcctgtctaagtaccaggacatcatcatcgaacaccagaaggtggtgaagggcaaccagaagagactggagagcctgcgggagctggccggcaaggaaaacctggaataccctagcgtgaccctgccacctcagcctcacaccaaggagggcgttgatgcctacaacgaagtgatcgcccgggtgcgaatgtgggtgaacctgaacctgtggcagaagctgaagctaagcagagatgatgccaagcctctgctgagactgaagggattcccttcctttcctctggtcgagagacaggccaacgaagtggactggtgggacatggtgtgtaacgtgaagaagctgatcaacgagaaaaaggaggatggcaaggtgttttggcagaatctggctggctacaagagacaggaagccctgagaccatacctgagcagcgaggaagatcggaagaagggaaagaaattcgctcggtaccagctgggcgacctgctgctgcacctggaaaagaagcacggcgaggactggggaaaggtgtacgacgaggcctgggagcggattgacaagaaagtggaaggcctgagcaagcacatcaagctggaagaggaacggagaagcgaggacgcccagagcaaggccgccctgaccgactggctgcgggctaaggccagcttcgtgatcgagggcctgaaggaggccgacaaggacgagttctgcagatgcgagctgaagctgcagaagtggtacggggacctgcggggaaagcccttcgccatcgaagccgagaacagcatcctggacatcagcggcttcagcaagcagtacaactgtgccttcatctggcagaaggacggcgtgaagaagctgaacctgtacctgatcatcaactacttcaagggcggcaagctgcggttcaagaagatcaaacctgaagccttcgaagccaacagattctacaccgtgatcaacaaaaagagcggcgagatcgtgcccatggaggtgaacttcaacttcgacgaccccaacctgatcatcctgcctctggcctttggcaagagacagggcagagaattcatctggaacgacctgctgtccctggaaaccggcagcctgaagctggccaacggaagagtgatcgagaagacactgtacaacagaagaacccggcaggatgagcctgccctgttcgtggccctgaccttcgagcggcgggaggtcctggactcctccaatatcaaaccaatgaacctgatcggcgtggcaagaggcgaaaacatccccgccgtgatcgccctgaccgaccccgagggctgcccactgagccggtttaaggatagcctgggaaacccaacccacatcctgagaatcggcgagagctataaggagaagcagcggaccatccaggccaagaaggaggtggagcagcggagagccggcggctacagccggaagtacgccagcaaagccaagaatctggcagacgatatggtgagaaacaccgctagagatctgctgtactacgccgtgacccaggatgccatgctgatcttcgccaacctgagccggggcttcggccggcagggcaagcggaccttcatggccgagagacagtacacacggatggaggactggctgaccgccaagctggcctacgagggcctgagcaagacctacctgtccaagacactggcccagtacacctccaagacatgcagcaactgtgggtttaccatcaccagcgccgactacgacagggtgctggagaagctgaagaagacagcaacaggctggatgaccacaattaacggcaaggagctgaaggtggagggccagattacctactacaacagatacaagagacagaacgtagtcaaggacctgtccgtcgagctggatagactgagcgaagaatctgtgaacaacgacatctcctcctggacaaagggcagaagcggagaagctctgagcctcctgaagaaaagattctcccatagacccgtgcaggagaagttcgtgtgcctgaactgcggcttcgagacacacgcagccgagcaagccgccctgaacatcgccagatcctggctgttcctgcggagccaggagtacaagaaataccagacaaacaagacaaccggcaacaccgataagagagccttcgtcgagacctggcagtccttttaccggaagaagcttaaggaggtgtggaaacctgccgtgcggtctggcggatctggcggaggctccacaagcctgctgaccttcgaggacgtggccgtgagcttcagcgaggaggagtggaagctgctggaccccacccagaagatcctgtacaacgacgtgatgcaggagaactacgagaccgtgatcagcctgggcctgaagctgaagaacgacaccggcaacgaccagcccatcagcctgagcgccctggagatccaggccagcggctgcaaggtgctgaggaaggccaggatgaaggtggcccagaagaccaccagccccaagaaaaagagaaaagtctaagctgccttctgcggggcttgccttctggccatgcccttcttctctcccttgcacctgtacctcttggtctttgaataaagcctgagtaggaaggctagcaaaaaaaaaaaaaaaaaaaaaaaaaaaaaaaaaaaaaaaaaaaaaaaaaaaaaaaaaaaaaaaaaaaaaaaaaaaaaaaa

SEQ ID NO: 3389 - RNA, 5419 nt, synthetic construct
  source 1..5419: mol_type = other RNA
aggaaataagagagaaaagaagagtaagaagaaatataagagccaccatggcccctaagaagaagcgtaaagtgagccgggtgaacggcagcggcagcggcggcggcatgaaccacgaccaggagttcgacccccctaaggtgtaccctcccgtccccgccgagaagagaaagcccatccgggtcctgagcctgttcgatggcatcgccaccggtctgctggtgctgaaggacctgggcatccaggtggataggtacattgcctccgaggtgtgcgaggactccatcaccgtgggaatggtgcgtcatcagggcaagatcatgtacgtgggcgacgtgcggagcgtgacacagaagcatatccaggagtggggccctttcgacctggtgatcggcggcagcccttgcaatgacctgagcatcgtgaacccagcccggaagggcctgtacgagggaaccggcagactgttcttcgagttttacagactgctgcacgacgcccggcctaaggaaggcgacgaccggcccttcttttggctgttcgagaatgtggtggccatgggagtcagcgacaagcgggatattagccggttcctggagagcaaccccgtgatgatcgatgccaaggaagtgagcgccgcccaccgggccagatacttctggggcaatctgcctggcatgaacagacccctggccagcaccgtgaacgacaagctggagctgcaggagtgcctggagcacggccggatcgccaagttcagcaaggtgagaaccatcaccacccgaagcaacagcatcaaacaaggcaaggaccagcactttcctgtgttcatgaacgagaaggaggacatcctgtggtgtaccgagatggagagagtgttcgggttcccagtccactacacagatgtcagcaacatgtctagactggccagacagagactgctgggaagaagctggtccgtccctgtgatcagacacctgttcgcccctctgaaggagtacttcgcctgcgtgagcagcggcaacagcaacgccaacagccggggccccagcttctctagcggcctggtgccactgtccctgagagggagccacatgggccccatggagatctacaaaaccgtgagcgcctggaagcggcagcctgtgcgcgtgctgagcctgtttcggaatatcgataaagtcctgaaaagcctgggattcctggagagcggctctggctccggcggtggcaccctgaagtacgtggaggatgtgacaaacgtggtcagacgggatgtggagaagtggggccccttcgatctggtgtacggcagcacccaacccctgggcagctcttgtgaccggtgccctggctggtacatgtttcagttccaccggatcctgcagtacgccctgccgagacaggagtcccagcggccattcttttggattttcatggacaacttgctgctgaccgaggatgaccaggaaactaccactcggttcctgcagaccgaagccgtgaccctgcaggacgtgagaggccgggactaccagaacgccatgcgggtgtggtccaacatccctggactgaaaagcaagcacgcacctctgacccctaaagaagaggagtacctgcaggcccaggtgcggagcagaagcaagctggacgcccctaaggtggatctgctggtgaagaattgcctcctgcccctgagagagtacttcaagtatttcagccagaatagtctgcccctgggcggcccaagcagcggcgcccctcctcccagcggcggcagcccagccggctccccaacctctaccgaggagggcacctctgagtccgccacccccgagagcggccctggcacctccaccgagcccagcgagggcagcgcacccggcagccctgccggcagccccacctccacagaggagggaaccagcaccgagcccagcgaaggcagcgccccaggcaccagcaccgagcctagtgagggcggctctggcggcggcagcgcccaggagattaaacggatcaacaagatcagaagaagacttgtgaaagacagcaacaccaagaaggccggcaagacaggccccatgaaaaccctgctggttagagtgatgacacccgatctgagagagcggctggaaaacctgagaaagaagcctgaaaatatcccccagcccatcagcaatacatctagagccaacctgaataagctgctgaccgattacaccgaaatgaagaaggcgatcctgcatgtgtactgggaagagttccagaaggaccctgtgggcctgatgagccgggtggcccagcctgccagcaagaagatcgatcagaacaagctgaaacctgagatggacgagaagggcaacctgaccaccgccggctttgcctgctctcagtgtggccagcccctgttcgtgtacaagctggagcaggtgtctgagaagggcaaggcttacaccaactacttcggacggtgcaatgtggccgagcacgaaaagctgatcctgctggcccagctgaagcccgagaaggatagcgacgaagccgtgacatatagcctgggaaagtttgggcagagggccctggatttctacagcattcatgtgaccaaggagtccacccaccccgtgaagcccctggcccagatcgccggaaacagatacgcctccggacctgtgggaaaggccctgagcgacgcatgtatgggcacaatcgcctccttcctgtctaagtaccaggacatcatcatcgaacaccagaaggtggtgaagggcaaccagaagagactggagagcctgcgggagctggccggcaaggaaaacctggaataccctagcgtgaccctgccacctcagcctcacaccaaggagggcgttgatgcctacaacgaagtgatcgcccgggtgcgaatgtgggtgaacctgaacctgtggcagaagctgaagctaagcagagatgatgccaagcctctgctgagactgaagggattcccttcctttcctctggtcgagagacaggccaacgaagtggactggtgggacatggtgtgtaacgtgaagaagctgatcaacgagaaaaaggaggatggcaaggtgttttggcagaatctggctggctacaagagacaggaagccctgagaccatacctgagcagcgaggaagatcggaagaagggaaagaaattcgctcggtaccagctgggcgacctgctgctgcacctggaaaagaagcacggcgaggactggggaaaggtgtacgacgaggcctgggagcggattgacaagaaagtggaaggcctgagcaagcacatcaagctggaagaggaacggagaagcgaggacgcccagagcaaggccgccctgaccgactggctgcgggctaaggccagcttcgtgatcgagggcctgaaggaggccgacaaggacgagttctgcagatgcgagctgaagctgcagaagtggtacggggacctgcggggaaagcccttcgccatcgaagccgagaacagcatcctggacatcagcggcttcagcaagcagtacaactgtgccttcatctggcagaaggacggcgtgaagaagctgaacctgtacctgatcatcaactacttcaagggcggcaagctgcggttcaagaagatcaaacctgaagccttcgaagccaacagattctacaccgtgatcaacaaaaagagcggcgagatcgtgcccatggaggtgaacttcaacttcgacgaccccaacctgatcatcctgcctctggcctttggcaagagacagggcagagaattcatctggaacgacctgctgtccctggaaaccggcagcctgaagctggccaacggaagagtgatcgagaagacactgtacaacagaagaacccggcaggatgagcctgccctgttcgtggccctgaccttcgagcggcgggaggtcctggactcctccaatatcaaaccaatgaacctgatcggcgtggcaagaggcgaaaacatccccgccgtgatcgccctgaccgaccccgagggctgcccactgagccggtttaaggatagcctgggaaacccaacccacatcctgagaatcggcgagagctataaggagaagcagcggaccatccaggccaagaaggaggtggagcagcggagagccggcggctacagccggaagtacgccagcaaagccaagaatctggcagacgatatggtgagaaacaccgctagagatctgctgtactacgccgtgacccaggatgccatgctgatcttcgccaacctgagccggggcttcggccggcagggcaagcggaccttcatggccgagagacagtacacacggatggaggactggctgaccgccaagctggcctacgagggcctgagcaagacctacctgtccaagacactggcccagtacacctccaagacatgcagcaactgtgggtttaccatcaccagcgccgactacgacagggtgctggagaagctgaagaagacagcaacaggctggatgaccacaattaacggcaaggagctgaaggtggagggccagattacctactacaacagatacaagagacagaacgtagtcaaggacctgtccgtcgagctggatagactgagcgaagaatctgtgaacaacgacatctcctcctggacaaagggcagaagcggagaagctctgagcctcctgaagaaaagattctcccatagacccgtgcaggagaagttcgtgtgcctgaactgcggcttcgagacacacgcagccgagcaagccgccctgaacatcgccagatcctggctgttcctgcggagccaggagtacaagaaataccagacaaacaagacaaccggcaacaccgataagagagccttcgtcgagacctggcagtccttttaccggaagaagcttaaggaggtgtggaaacctgccgtgcggtctggcggatctggcggaggctccacaagccaggccagcgtgaccttcagggacgtggccgtggacttcaccggcgaggagtggaggtgcctggagcccgcccagagggccctgtacagggacgtgatgctggagacctacgagaacctggtgttcctgggcctgagcgtgcccatcagcaagctggacctgatcttcctgctggagaggggcggcgccctgagcaggcccatgggcagggtgcccagcgacagctgccccgacagcttcatcaccagccccaagaaaaagagaaaagtctaagctgccttctgcggggcttgccttctggccatgcccttcttctctcccttgcacctgtacctcttggtctttgaataaagcctgagtaggaaggctagcaaaaaaaaaaaaaaaaaaaaaaaaaaaaaaaaaaaaaaaaaaaaaaaaaaaaaaaaaaaaaaaaaaaaaaaaaaaaaaaa

SEQ ID NO: 3390 - RNA, 5419 nt, synthetic construct
  source 1..5419: mol_type = other RNA
aggaaataagagagaaaagaagagtaagaagaaatataagagccaccatggcccctaagaagaagcgtaaagtgagccgggtgaacggcagcggcagcggcggcggcatgaaccacgaccaggagttcgacccccctaaggtgtaccctcccgtccccgccgagaagagaaagcccatccgggtcctgagcctgttcgatggcatcgccaccggtctgctggtgctgaaggacctgggcatccaggtggataggtacattgcctccgaggtgtgcgaggactccatcaccgtgggaatggtgcgtcatcagggcaagatcatgtacgtgggcgacgtgcggagcgtgacacagaagcatatccaggagtggggccctttcgacctggtgatcggcggcagcccttgcaatgacctgagcatcgtgaacccagcccggaagggcctgtacgagggaaccggcagactgttcttcgagttttacagactgctgcacgacgcccggcctaaggaaggcgacgaccggcccttcttttggctgttcgagaatgtggtggccatgggagtcagcgacaagcgggatattagccggttcctggagagcaaccccgtgatgatcgatgccaaggaagtgagcgccgcccaccgggccagatacttctggggcaatctgcctggcatgaacagacccctggccagcaccgtgaacgacaagctggagctgcaggagtgcctggagcacggccggatcgccaagttcagcaaggtgagaaccatcaccacccgaagcaacagcatcaaacaaggcaaggaccagcactttcctgtgttcatgaacgagaaggaggacatcctgtggtgtaccgagatggagagagtgttcgggttcccagtccactacacagatgtcagcaacatgtctagactggccagacagagactgctgggaagaagctggtccgtccctgtgatcagacacctgttcgcccctctgaaggagtacttcgcctgcgtgagcagcggcaacagcaacgccaacagccggggccccagcttctctagcggcctggtgccactgtccctgagagggagccacatgggccccatggagatctacaaaaccgtgagcgcctggaagcggcagcctgtgcgcgtgctgagcctgtttcggaatatcgataaagtcctgaaaagcctgggattcctggagagcggctctggctccggcggtggcaccctgaagtacgtggaggatgtgacaaacgtggtcagacgggatgtggagaagtggggccccttcgatctggtgtacggcagcacccaacccctgggcagctcttgtgaccggtgccctggctggtacatgtttcagttccaccggatcctgcagtacgccctgccgagacaggagtcccagcggccattcttttggattttcatggacaacttgctgctgaccgaggatgaccaggaaactaccactcggttcctgcagaccgaagccgtgaccctgcaggacgtgagaggccgggactaccagaacgccatgcgggtgtggtccaacatccctggactgaaaagcaagcacgcacctctgacccctaaagaagaggagtacctgcaggcccaggtgcggagcagaagcaagctggacgcccctaaggtggatctgctggtgaagaattgcctcctgcccctgagagagtacttcaagtatttcagccagaatagtctgcccctgggcggcccaagcagcggcgcccctcctcccagcggcggcagcccagccggctccccaacctctaccgaggagggcacctctgagtccgccacccccgagagcggccctggcacctccaccgagcccagcgagggcagcgcacccggcagccctgccggcagccccacctccacagaggagggaaccagcaccgagcccagcgaaggcagcgccccaggcaccagcaccgagcctagtgagggcggctctggcggcggcagcgcccaggagattaaacggatcaacaagatcagaagaagacttgtgaaagacagcaacaccaagaaggccggcaagacaggccccatgaaaaccctgctggttagagtgatgacacccgatctgagagagcggctggaaaacctgagaaagaagcctgaaaatatcccccagcccatcagcaatacatctagagccaacctgaataagctgctgaccgattacaccgaaatgaagaaggcgatcctgcatgtgtactgggaagagttccagaaggaccctgtgggcctgatgagccgggtggcccagcctgccagcaagaagatcgatcagaacaagctgaaacctgagatggacgagaagggcaacctgaccaccgccggctttgcctgctctcagtgtggccagcccctgttcgtgtacaagctggagcaggtgtctgagaagggcaaggcttacaccaactacttcggacggtgcaatgtggccgagcacgaaaagctgatcctgctggcccagctgaagcccgagaaggatagcgacgaagccgtgacatatagcctgggaaagtttgggcagagggccctggatttctacagcattcatgtgaccaaggagtccacccaccccgtgaagcccctggcccagatcgccggaaacagatacgcctccggacctgtgggaaaggccctgagcgacgcatgtatgggcacaatcgcctccttcctgtctaagtaccaggacatcatcatcgaacaccagaaggtggtgaagggcaaccagaagagactggagagcctgcgggagctggccggcaaggaaaacctggaataccctagcgtgaccctgccacctcagcctcacaccaaggagggcgttgatgcctacaacgaagtgatcgcccgggtgcgaatgtgggtgaacctgaacctgtggcagaagctgaagctaagcagagatgatgccaagcctctgctgagactgaagggattcccttcctttcctctggtcgagagacaggccaacgaagtggactggtgggacatggtgtgtaacgtgaagaagctgatcaacgagaaaaaggaggatggcaaggtgttttggcagaatctggctggctacaagagacaggaagccctgagaccatacctgagcagcgaggaagatcggaagaagggaaagaaattcgctcggtaccagctgggcgacctgctgctgcacctggaaaagaagcacggcgaggactggggaaaggtgtacgacgaggcctgggagcggattgacaagaaagtggaaggcctgagcaagcacatcaagctggaagaggaacggagaagcgaggacgcccagagcaaggccgccctgaccgactggctgcgggctaaggccagcttcgtgatcgagggcctgaaggaggccgacaaggacgagttctgcagatgcgagctgaagctgcagaagtggtacggggacctgcggggaaagcccttcgccatcgaagccgagaacagcatcctggacatcagcggcttcagcaagcagtacaactgtgccttcatctggcagaaggacggcgtgaagaagctgaacctgtacctgatcatcaactacttcaagggcggcaagctgcggttcaagaagatcaaacctgaagccttcgaagccaacagattctacaccgtgatcaacaaaaagagcggcgagatcgtgcccatggaggtgaacttcaacttcgacgaccccaacctgatcatcctgcctctggcctttggcaagagacagggcagagaattcatctggaacgacctgctgtccctggaaaccggcagcctgaagctggccaacggaagagtgatcgagaagacactgtacaacagaagaacccggcaggatgagcctgccctgttcgtggccctgaccttcgagcggcgggaggtcctggactcctccaatatcaaaccaatgaacctgatcggcgtggcaagaggcgaaaacatccccgccgtgatcgccctgaccgaccccgagggctgcccactgagccggtttaaggatagcctgggaaacccaacccacatcctgagaatcggcgagagctataaggagaagcagcggaccatccaggccaagaaggaggtggagcagcggagagccggcggctacagccggaagtacgccagcaaagccaagaatctggcagacgatatggtgagaaacaccgctagagatctgctgtactacgccgtgacccaggatgccatgctgatcttcgccaacctgagccggggcttcggccggcagggcaagcggaccttcatggccgagagacagtacacacggatggaggactggctgaccgccaagctggcctacgagggcctgagcaagacctacctgtccaagacactggcccagtacacctccaagacatgcagcaactgtgggtttaccatcaccagcgccgactacgacagggtgctggagaagctgaagaagacagcaacaggctggatgaccacaattaacggcaaggagctgaaggtggagggccagattacctactacaacagatacaagagacagaacgtagtcaaggacctgtccgtcgagctggatagactgagcgaagaatctgtgaacaacgacatctcctcctggacaaagggcagaagcggagaagctctgagcctcctgaagaaaagattctcccatagacccgtgcaggagaagttcgtgtgcctgaactgcggcttcgagacacacgcagccgagcaagccgccctgaacatcgccagatcctggctgttcctgcggagccaggagtacaagaaataccagacaaacaagacaaccggcaacaccgataagagagccttcgtcgagacctggcagtccttttaccggaagaagcttaaggaggtgtggaaacctgccgtgcggtctggcggatctggcggaggctccacaagcatgagcggcccccccggcagcctggagatggagcccctgcagttcagggacgtggccgtggagttcagcctggaggagtggcactgcctggacaccgcccagcagaacctgtacagggacgtgatgctggagaactacaggcacctggtgttcctgggcatcgtggtgagcaagcccgacctgatcacctgcctggagcagggcaagaagcccctgaccatgaagaggcacgagatgatcgccaccagccccaagaaaaagagaaaagtctaagctgccttctgcggggcttgccttctggccatgcccttcttctctcccttgcacctgtacctcttggtctttgaataaagcctgagtaggaaggctagcaaaaaaaaaaaaaaaaaaaaaaaaaaaaaaaaaaaaaaaaaaaaaaaaaaaaaaaaaaaaaaaaaaaaaaaaaaaaaaaa

SEQ ID NO: 3391 - RNA, 5419 nt, synthetic construct
  source 1..5419: mol_type = other RNA
aggaaataagagagaaaagaagagtaagaagaaatataagagccaccatggcccctaagaagaagcgtaaagtgagccgggtgaacggcagcggcagcggcggcggcatgaaccacgaccaggagttcgacccccctaaggtgtaccctcccgtccccgccgagaagagaaagcccatccgggtcctgagcctgttcgatggcatcgccaccggtctgctggtgctgaaggacctgggcatccaggtggataggtacattgcctccgaggtgtgcgaggactccatcaccgtgggaatggtgcgtcatcagggcaagatcatgtacgtgggcgacgtgcggagcgtgacacagaagcatatccaggagtggggccctttcgacctggtgatcggcggcagcccttgcaatgacctgagcatcgtgaacccagcccggaagggcctgtacgagggaaccggcagactgttcttcgagttttacagactgctgcacgacgcccggcctaaggaaggcgacgaccggcccttcttttggctgttcgagaatgtggtggccatgggagtcagcgacaagcgggatattagccggttcctggagagcaaccccgtgatgatcgatgccaaggaagtgagcgccgcccaccgggccagatacttctggggcaatctgcctggcatgaacagacccctggccagcaccgtgaacgacaagctggagctgcaggagtgcctggagcacggccggatcgccaagttcagcaaggtgagaaccatcaccacccgaagcaacagcatcaaacaaggcaaggaccagcactttcctgtgttcatgaacgagaaggaggacatcctgtggtgtaccgagatggagagagtgttcgggttcccagtccactacacagatgtcagcaacatgtctagactggccagacagagactgctgggaagaagctggtccgtccctgtgatcagacacctgttcgcccctctgaaggagtacttcgcctgcgtgagcagcggcaacagcaacgccaacagccggggccccagcttctctagcggcctggtgccactgtccctgagagggagccacatgggccccatggagatctacaaaaccgtgagcgcctggaagcggcagcctgtgcgcgtgctgagcctgtttcggaatatcgataaagtcctgaaaagcctgggattcctggagagcggctctggctccggcggtggcaccctgaagtacgtggaggatgtgacaaacgtggtcagacgggatgtggagaagtggggccccttcgatctggtgtacggcagcacccaacccctgggcagctcttgtgaccggtgccctggctggtacatgtttcagttccaccggatcctgcagtacgccctgccgagacaggagtcccagcggccattcttttggattttcatggacaacttgctgctgaccgaggatgaccaggaaactaccactcggttcctgcagaccgaagccgtgaccctgcaggacgtgagaggccgggactaccagaacgccatgcgggtgtggtccaacatccctggactgaaaagcaagcacgcacctctgacccctaaagaagaggagtacctgcaggcccaggtgcggagcagaagcaagctggacgcccctaaggtggatctgctggtgaagaattgcctcctgcccctgagagagtacttcaagtatttcagccagaatagtctgcccctgggcggcccaagcagcggcgcccctcctcccagcggcggcagcccagccggctccccaacctctaccgaggagggcacctctgagtccgccacccccgagagcggccctggcacctccaccgagcccagcgagggcagcgcacccggcagccctgccggcagccccacctccacagaggagggaaccagcaccgagcccagcgaaggcagcgccccaggcaccagcaccgagcctagtgagggcggctctggcggcggcagcgcccaggagattaaacggatcaacaagatcagaagaagacttgtgaaagacagcaacaccaagaaggccggcaagacaggccccatgaaaaccctgctggttagagtgatgacacccgatctgagagagcggctggaaaacctgagaaagaagcctgaaaatatcccccagcccatcagcaatacatctagagccaacctgaataagctgctgaccgattacaccgaaatgaagaaggcgatcctgcatgtgtactgggaagagttccagaaggaccctgtgggcctgatgagccgggtggcccagcctgccagcaagaagatcgatcagaacaagctgaaacctgagatggacgagaagggcaacctgaccaccgccggctttgcctgctctcagtgtggccagcccctgttcgtgtacaagctggagcaggtgtctgagaagggcaaggcttacaccaactacttcggacggtgcaatgtggccgagcacgaaaagctgatcctgctggcccagctgaagcccgagaaggatagcgacgaagccgtgacatatagcctgggaaagtttgggcagagggccctggatttctacagcattcatgtgaccaaggagtccacccaccccgtgaagcccctggcccagatcgccggaaacagatacgcctccggacctgtgggaaaggccctgagcgacgcatgtatgggcacaatcgcctccttcctgtctaagtaccaggacatcatcatcgaacaccagaaggtggtgaagggcaaccagaagagactggagagcctgcgggagctggccggcaaggaaaacctggaataccctagcgtgaccctgccacctcagcctcacaccaaggagggcgttgatgcctacaacgaagtgatcgcccgggtgcgaatgtgggtgaacctgaacctgtggcagaagctgaagctaagcagagatgatgccaagcctctgctgagactgaagggattcccttcctttcctctggtcgagagacaggccaacgaagtggactggtgggacatggtgtgtaacgtgaagaagctgatcaacgagaaaaaggaggatggcaaggtgttttggcagaatctggctggctacaagagacaggaagccctgagaccatacctgagcagcgaggaagatcggaagaagggaaagaaattcgctcggtaccagctgggcgacctgctgctgcacctggaaaagaagcacggcgaggactggggaaaggtgtacgacgaggcctgggagcggattgacaagaaagtggaaggcctgagcaagcacatcaagctggaagaggaacggagaagcgaggacgcccagagcaaggccgccctgaccgactggctgcgggctaaggccagcttcgtgatcgagggcctgaaggaggccgacaaggacgagttctgcagatgcgagctgaagctgcagaagtggtacggggacctgcggggaaagcccttcgccatcgaagccgagaacagcatcctggacatcagcggcttcagcaagcagtacaactgtgccttcatctggcagaaggacggcgtgaagaagctgaacctgtacctgatcatcaactacttcaagggcggcaagctgcggttcaagaagatcaaacctgaagccttcgaagccaacagattctacaccgtgatcaacaaaaagagcggcgagatcgtgcccatggaggtgaacttcaacttcgacgaccccaacctgatcatcctgcctctggcctttggcaagagacagggcagagaattcatctggaacgacctgctgtccctggaaaccggcagcctgaagctggccaacggaagagtgatcgagaagacactgtacaacagaagaacccggcaggatgagcctgccctgttcgtggccctgaccttcgagcggcgggaggtcctggactcctccaatatcaaaccaatgaacctgatcggcgtggcaagaggcgaaaacatccccgccgtgatcgccctgaccgaccccgagggctgcccactgagccggtttaaggatagcctgggaaacccaacccacatcctgagaatcggcgagagctataaggagaagcagcggaccatccaggccaagaaggaggtggagcagcggagagccggcggctacagccggaagtacgccagcaaagccaagaatctggcagacgatatggtgagaaacaccgctagagatctgctgtactacgccgtgacccaggatgccatgctgatcttcgccaacctgagccggggcttcggccggcagggcaagcggaccttcatggccgagagacagtacacacggatggaggactggctgaccgccaagctggcctacgagggcctgagcaagacctacctgtccaagacactggcccagtacacctccaagacatgcagcaactgtgggtttaccatcaccagcgccgactacgacagggtgctggagaagctgaagaagacagcaacaggctggatgaccacaattaacggcaaggagctgaaggtggagggccagattacctactacaacagatacaagagacagaacgtagtcaaggacctgtccgtcgagctggatagactgagcgaagaatctgtgaacaacgacatctcctcctggacaaagggcagaagcggagaagctctgagcctcctgaagaaaagattctcccatagacccgtgcaggagaagttcgtgtgcctgaactgcggcttcgagacacacgcagccgagcaagccgccctgaacatcgccagatcctggctgttcctgcggagccaggagtacaagaaataccagacaaacaagacaaccggcaacaccgataagagagccttcgtcgagacctggcagtccttttaccggaagaagcttaaggaggtgtggaaacctgccgtgcggtctggcggatctggcggaggctccacaagccccgagaccgtggtgagcttcgaggacgtggccgtgaggttcagccccgacgagtggcacctgctggacgacggccagaggaggctgtacagggacgtgctgagggagaactacagccacgtgaggagcctgggcttccccgtgcccgacctggccgtgatcttcaggatggagaggggcgaggagccctggccccccggcctgcccgccggcgagtggccctggggccagggccaggcccccaccagccccaagaaaaagagaaaagtctaagctgccttctgcggggcttgccttctggccatgcccttcttctctcccttgcacctgtacctcttggtctttgaataaagcctgagtaggaaggctagcaaaaaaaaaaaaaaaaaaaaaaaaaaaaaaaaaaaaaaaaaaaaaaaaaaaaaaaaaaaaaaaaaaaaaaaaaaaaaaaa

SEQ ID NO: 3392 - RNA, 5419 nt, synthetic construct
  source 1..5419: mol_type = other RNA
aggaaataagagagaaaagaagagtaagaagaaatataagagccaccatggcccctaagaagaagcgtaaagtgagccgggtgaacggcagcggcagcggcggcggcatgaaccacgaccaggagttcgacccccctaaggtgtaccctcccgtccccgccgagaagagaaagcccatccgggtcctgagcctgttcgatggcatcgccaccggtctgctggtgctgaaggacctgggcatccaggtggataggtacattgcctccgaggtgtgcgaggactccatcaccgtgggaatggtgcgtcatcagggcaagatcatgtacgtgggcgacgtgcggagcgtgacacagaagcatatccaggagtggggccctttcgacctggtgatcggcggcagcccttgcaatgacctgagcatcgtgaacccagcccggaagggcctgtacgagggaaccggcagactgttcttcgagttttacagactgctgcacgacgcccggcctaaggaaggcgacgaccggcccttcttttggctgttcgagaatgtggtggccatgggagtcagcgacaagcgggatattagccggttcctggagagcaaccccgtgatgatcgatgccaaggaagtgagcgccgcccaccgggccagatacttctggggcaatctgcctggcatgaacagacccctggccagcaccgtgaacgacaagctggagctgcaggagtgcctggagcacggccggatcgccaagttcagcaaggtgagaaccatcaccacccgaagcaacagcatcaaacaaggcaaggaccagcactttcctgtgttcatgaacgagaaggaggacatcctgtggtgtaccgagatggagagagtgttcgggttcccagtccactacacagatgtcagcaacatgtctagactggccagacagagactgctgggaagaagctggtccgtccctgtgatcagacacctgttcgcccctctgaaggagtacttcgcctgcgtgagcagcggcaacagcaacgccaacagccggggccccagcttctctagcggcctggtgccactgtccctgagagggagccacatgggccccatggagatctacaaaaccgtgagcgcctggaagcggcagcctgtgcgcgtgctgagcctgtttcggaatatcgataaagtcctgaaaagcctgggattcctggagagcggctctggctccggcggtggcaccctgaagtacgtggaggatgtgacaaacgtggtcagacgggatgtggagaagtggggccccttcgatctggtgtacggcagcacccaacccctgggcagctcttgtgaccggtgccctggctggtacatgtttcagttccaccggatcctgcagtacgccctgccgagacaggagtcccagcggccattcttttggattttcatggacaacttgctgctgaccgaggatgaccaggaaactaccactcggttcctgcagaccgaagccgtgaccctgcaggacgtgagaggccgggactaccagaacgccatgcgggtgtggtccaacatccctggactgaaaagcaagcacgcacctctgacccctaaagaagaggagtacctgcaggcccaggtgcggagcagaagcaagctggacgcccctaaggtggatctgctggtgaagaattgcctcctgcccctgagagagtacttcaagtatttcagccagaatagtctgcccctgggcggcccaagcagcggcgcccctcctcccagcggcggcagcccagccggctccccaacctctaccgaggagggcacctctgagtccgccacccccgagagcggccctggcacctccaccgagcccagcgagggcagcgcacccggcagccctgccggcagccccacctccacagaggagggaaccagcaccgagcccagcgaaggcagcgccccaggcaccagcaccgagcctagtgagggcggctctggcggcggcagcgcccaggagattaaacggatcaacaagatcagaagaagacttgtgaaagacagcaacaccaagaaggccggcaagacaggccccatgaaaaccctgctggttagagtgatgacacccgatctgagagagcggctggaaaacctgagaaagaagcctgaaaatatcccccagcccatcagcaatacatctagagccaacctgaataagctgctgaccgattacaccgaaatgaagaaggcgatcctgcatgtgtactgggaagagttccagaaggaccctgtgggcctgatgagccgggtggcccagcctgccagcaagaagatcgatcagaacaagctgaaacctgagatggacgagaagggcaacctgaccaccgccggctttgcctgctctcagtgtggccagcccctgttcgtgtacaagctggagcaggtgtctgagaagggcaaggcttacaccaactacttcggacggtgcaatgtggccgagcacgaaaagctgatcctgctggcccagctgaagcccgagaaggatagcgacgaagccgtgacatatagcctgggaaagtttgggcagagggccctggatttctacagcattcatgtgaccaaggagtccacccaccccgtgaagcccctggcccagatcgccggaaacagatacgcctccggacctgtgggaaaggccctgagcgacgcatgtatgggcacaatcgcctccttcctgtctaagtaccaggacatcatcatcgaacaccagaaggtggtgaagggcaaccagaagagactggagagcctgcgggagctggccggcaaggaaaacctggaataccctagcgtgaccctgccacctcagcctcacaccaaggagggcgttgatgcctacaacgaagtgatcgcccgggtgcgaatgtgggtgaacctgaacctgtggcagaagctgaagctaagcagagatgatgccaagcctctgctgagactgaagggattcccttcctttcctctggtcgagagacaggccaacgaagtggactggtgggacatggtgtgtaacgtgaagaagctgatcaacgagaaaaaggaggatggcaaggtgttttggcagaatctggctggctacaagagacaggaagccctgagaccatacctgagcagcgaggaagatcggaagaagggaaagaaattcgctcggtaccagctgggcgacctgctgctgcacctggaaaagaagcacggcgaggactggggaaaggtgtacgacgaggcctgggagcggattgacaagaaagtggaaggcctgagcaagcacatcaagctggaagaggaacggagaagcgaggacgcccagagcaaggccgccctgaccgactggctgcgggctaaggccagcttcgtgatcgagggcctgaaggaggccgacaaggacgagttctgcagatgcgagctgaagctgcagaagtggtacggggacctgcggggaaagcccttcgccatcgaagccgagaacagcatcctggacatcagcggcttcagcaagcagtacaactgtgccttcatctggcagaaggacggcgtgaagaagctgaacctgtacctgatcatcaactacttcaagggcggcaagctgcggttcaagaagatcaaacctgaagccttcgaagccaacagattctacaccgtgatcaacaaaaagagcggcgagatcgtgcccatggaggtgaacttcaacttcgacgaccccaacctgatcatcctgcctctggcctttggcaagagacagggcagagaattcatctggaacgacctgctgtccctggaaaccggcagcctgaagctggccaacggaagagtgatcgagaagacactgtacaacagaagaacccggcaggatgagcctgccctgttcgtggccctgaccttcgagcggcgggaggtcctggactcctccaatatcaaaccaatgaacctgatcggcgtggcaagaggcgaaaacatccccgccgtgatcgccctgaccgaccccgagggctgcccactgagccggtttaaggatagcctgggaaacccaacccacatcctgagaatcggcgagagctataaggagaagcagcggaccatccaggccaagaaggaggtggagcagcggagagccggcggctacagccggaagtacgccagcaaagccaagaatctggcagacgatatggtgagaaacaccgctagagatctgctgtactacgccgtgacccaggatgccatgctgatcttcgccaacctgagccggggcttcggccggcagggcaagcggaccttcatggccgagagacagtacacacggatggaggactggctgaccgccaagctggcctacgagggcctgagcaagacctacctgtccaagacactggcccagtacacctccaagacatgcagcaactgtgggtttaccatcaccagcgccgactacgacagggtgctggagaagctgaagaagacagcaacaggctggatgaccacaattaacggcaaggagctgaaggtggagggccagattacctactacaacagatacaagagacagaacgtagtcaaggacctgtccgtcgagctggatagactgagcgaagaatctgtgaacaacgacatctcctcctggacaaagggcagaagcggagaagctctgagcctcctgaagaaaagattctcccatagacccgtgcaggagaagttcgtgtgcctgaactgcggcttcgagacacacgcagccgagcaagccgccctgaacatcgccagatcctggctgttcctgcggagccaggagtacaagaaataccagacaaacaagacaaccggcaacaccgataagagagccttcgtcgagacctggcagtccttttaccggaagaagcttaaggaggtgtggaaacctgccgtgcggtctggcggatctggcggaggctccacaagcctgcagggcctgctgaccttcagggacgtggccatcgagttcagcgaggaggagtggggctgcctgacccacacccagaggcagctgtacagggacgtgatgctggagaactacggccacctgcacttcctgggcctgctgctgagcaagcccgacctgatcatgttcctggagcaggagaagcagctgtgggacgtgaagaggaaggagagcaggggcttcagccccgagagccagtgcctgaccagccccaagaaaaagagaaaagtctaagctgccttctgcggggcttgccttctggccatgcccttcttctctcccttgcacctgtacctcttggtctttgaataaagcctgagtaggaaggctagcaaaaaaaaaaaaaaaaaaaaaaaaaaaaaaaaaaaaaaaaaaaaaaaaaaaaaaaaaaaaaaaaaaaaaaaaaaaaaaaa

SEQ ID NO: 3393 - RNA, 5419 nt, synthetic construct
  source 1..5419: mol_type = other RNA
aggaaataagagagaaaagaagagtaagaagaaatataagagccaccatggcccctaagaagaagcgtaaagtgagccgggtgaacggcagcggcagcggcggcggcatgaaccacgaccaggagttcgacccccctaaggtgtaccctcccgtccccgccgagaagagaaagcccatccgggtcctgagcctgttcgatggcatcgccaccggtctgctggtgctgaaggacctgggcatccaggtggataggtacattgcctccgaggtgtgcgaggactccatcaccgtgggaatggtgcgtcatcagggcaagatcatgtacgtgggcgacgtgcggagcgtgacacagaagcatatccaggagtggggccctttcgacctggtgatcggcggcagcccttgcaatgacctgagcatcgtgaacccagcccggaagggcctgtacgagggaaccggcagactgttcttcgagttttacagactgctgcacgacgcccggcctaaggaaggcgacgaccggcccttcttttggctgttcgagaatgtggtggccatgggagtcagcgacaagcgggatattagccggttcctggagagcaaccccgtgatgatcgatgccaaggaagtgagcgccgcccaccgggccagatacttctggggcaatctgcctggcatgaacagacccctggccagcaccgtgaacgacaagctggagctgcaggagtgcctggagcacggccggatcgccaagttcagcaaggtgagaaccatcaccacccgaagcaacagcatcaaacaaggcaaggaccagcactttcctgtgttcatgaacgagaaggaggacatcctgtggtgtaccgagatggagagagtgttcgggttcccagtccactacacagatgtcagcaacatgtctagactggccagacagagactgctgggaagaagctggtccgtccctgtgatcagacacctgttcgcccctctgaaggagtacttcgcctgcgtgagcagcggcaacagcaacgccaacagccggggccccagcttctctagcggcctggtgccactgtccctgagagggagccacatgggccccatggagatctacaaaaccgtgagcgcctggaagcggcagcctgtgcgcgtgctgagcctgtttcggaatatcgataaagtcctgaaaagcctgggattcctggagagcggctctggctccggcggtggcaccctgaagtacgtggaggatgtgacaaacgtggtcagacgggatgtggagaagtggggccccttcgatctggtgtacggcagcacccaacccctgggcagctcttgtgaccggtgccctggctggtacatgtttcagttccaccggatcctgcagtacgccctgccgagacaggagtcccagcggccattcttttggattttcatggacaacttgctgctgaccgaggatgaccaggaaactaccactcggttcctgcagaccgaagccgtgaccctgcaggacgtgagaggccgggactaccagaacgccatgcgggtgtggtccaacatccctggactgaaaagcaagcacgcacctctgacccctaaagaagaggagtacctgcaggcccaggtgcggagcagaagcaagctggacgcccctaaggtggatctgctggtgaagaattgcctcctgcccctgagagagtacttcaagtatttcagccagaatagtctgcccctgggcggcccaagcagcggcgcccctcctcccagcggcggcagcccagccggctccccaacctctaccgaggagggcacctctgagtccgccacccccgagagcggccctggcacctccaccgagcccagcgagggcagcgcacccggcagccctgccggcagccccacctccacagaggagggaaccagcaccgagcccagcgaaggcagcgccccaggcaccagcaccgagcctagtgagggcggctctggcggcggcagcgcccaggagattaaacggatcaacaagatcagaagaagacttgtgaaagacagcaacaccaagaaggccggcaagacaggccccatgaaaaccctgctggttagagtgatgacacccgatctgagagagcggctggaaaacctgagaaagaagcctgaaaatatcccccagcccatcagcaatacatctagagccaacctgaataagctgctgaccgattacaccgaaatgaagaaggcgatcctgcatgtgtactgggaagagttccagaaggaccctgtgggcctgatgagccgggtggcccagcctgccagcaagaagatcgatcagaacaagctgaaacctgagatggacgagaagggcaacctgaccaccgccggctttgcctgctctcagtgtggccagcccctgttcgtgtacaagctggagcaggtgtctgagaagggcaaggcttacaccaactacttcggacggtgcaatgtggccgagcacgaaaagctgatcctgctggcccagctgaagcccgagaaggatagcgacgaagccgtgacatatagcctgggaaagtttgggcagagggccctggatttctacagcattcatgtgaccaaggagtccacccaccccgtgaagcccctggcccagatcgccggaaacagatacgcctccggacctgtgggaaaggccctgagcgacgcatgtatgggcacaatcgcctccttcctgtctaagtaccaggacatcatcatcgaacaccagaaggtggtgaagggcaaccagaagagactggagagcctgcgggagctggccggcaaggaaaacctggaataccctagcgtgaccctgccacctcagcctcacaccaaggagggcgttgatgcctacaacgaagtgatcgcccgggtgcgaatgtgggtgaacctgaacctgtggcagaagctgaagctaagcagagatgatgccaagcctctgctgagactgaagggattcccttcctttcctctggtcgagagacaggccaacgaagtggactggtgggacatggtgtgtaacgtgaagaagctgatcaacgagaaaaaggaggatggcaaggtgttttggcagaatctggctggctacaagagacaggaagccctgagaccatacctgagcagcgaggaagatcggaagaagggaaagaaattcgctcggtaccagctgggcgacctgctgctgcacctggaaaagaagcacggcgaggactggggaaaggtgtacgacgaggcctgggagcggattgacaagaaagtggaaggcctgagcaagcacatcaagctggaagaggaacggagaagcgaggacgcccagagcaaggccgccctgaccgactggctgcgggctaaggccagcttcgtgatcgagggcctgaaggaggccgacaaggacgagttctgcagatgcgagctgaagctgcagaagtggtacggggacctgcggggaaagcccttcgccatcgaagccgagaacagcatcctggacatcagcggcttcagcaagcagtacaactgtgccttcatctggcagaaggacggcgtgaagaagctgaacctgtacctgatcatcaactacttcaagggcggcaagctgcggttcaagaagatcaaacctgaagccttcgaagccaacagattctacaccgtgatcaacaaaaagagcggcgagatcgtgcccatggaggtgaacttcaacttcgacgaccccaacctgatcatcctgcctctggcctttggcaagagacagggcagagaattcatctggaacgacctgctgtccctggaaaccggcagcctgaagctggccaacggaagagtgatcgagaagacactgtacaacagaagaacccggcaggatgagcctgccctgttcgtggccctgaccttcgagcggcgggaggtcctggactcctccaatatcaaaccaatgaacctgatcggcgtggcaagaggcgaaaacatccccgccgtgatcgccctgaccgaccccgagggctgcccactgagccggtttaaggatagcctgggaaacccaacccacatcctgagaatcggcgagagctataaggagaagcagcggaccatccaggccaagaaggaggtggagcagcggagagccggcggctacagccggaagtacgccagcaaagccaagaatctggcagacgatatggtgagaaacaccgctagagatctgctgtactacgccgtgacccaggatgccatgctgatcttcgccaacctgagccggggcttcggccggcagggcaagcggaccttcatggccgagagacagtacacacggatggaggactggctgaccgccaagctggcctacgagggcctgagcaagacctacctgtccaagacactggcccagtacacctccaagacatgcagcaactgtgggtttaccatcaccagcgccgactacgacagggtgctggagaagctgaagaagacagcaacaggctggatgaccacaattaacggcaaggagctgaaggtggagggccagattacctactacaacagatacaagagacagaacgtagtcaaggacctgtccgtcgagctggatagactgagcgaagaatctgtgaacaacgacatctcctcctggacaaagggcagaagcggagaagctctgagcctcctgaagaaaagattctcccatagacccgtgcaggagaagttcgtgtgcctgaactgcggcttcgagacacacgcagccgagcaagccgccctgaacatcgccagatcctggctgttcctgcggagccaggagtacaagaaataccagacaaacaagacaaccggcaacaccgataagagagccttcgtcgagacctggcagtccttttaccggaagaagcttaaggaggtgtggaaacctgccgtgcggtctggcggatctggcggaggctccacaagcttcagcctggaggacgtgagcgtgagcttcagccccgccgagtgggccctgctggaccccgcccagagggccctgtggagggaggtgatgagggagaacgccgagaacgtggccttcctggccaggagcatcggcgagaccctggtggaggccaacaacgaccccgtgagcgagggcaggctggagaggagcagcggcggcgccgaggagcagatcagcttccccaacggcctggccaagaggaccagccccaagaaaaagagaaaagtctaagctgccttctgcggggcttgccttctggccatgcccttcttctctcccttgcacctgtacctcttggtctttgaataaagcctgagtaggaaggctagcaaaaaaaaaaaaaaaaaaaaaaaaaaaaaaaaaaaaaaaaaaaaaaaaaaaaaaaaaaaaaaaaaaaaaaaaaaaaaaaa

SEQ ID NO: 3394 - RNA, 5419 nt, synthetic construct
  source 1..5419: mol_type = other RNA
aggaaataagagagaaaagaagagtaagaagaaatataagagccaccatggcccctaagaagaagcgtaaagtgagccgggtgaacggcagcggcagcggcggcggcatgaaccacgaccaggagttcgacccccctaaggtgtaccctcccgtccccgccgagaagagaaagcccatccgggtcctgagcctgttcgatggcatcgccaccggtctgctggtgctgaaggacctgggcatccaggtggataggtacattgcctccgaggtgtgcgaggactccatcaccgtgggaatggtgcgtcatcagggcaagatcatgtacgtgggcgacgtgcggagcgtgacacagaagcatatccaggagtggggccctttcgacctggtgatcggcggcagcccttgcaatgacctgagcatcgtgaacccagcccggaagggcctgtacgagggaaccggcagactgttcttcgagttttacagactgctgcacgacgcccggcctaaggaaggcgacgaccggcccttcttttggctgttcgagaatgtggtggccatgggagtcagcgacaagcgggatattagccggttcctggagagcaaccccgtgatgatcgatgccaaggaagtgagcgccgcccaccgggccagatacttctggggcaatctgcctggcatgaacagacccctggccagcaccgtgaacgacaagctggagctgcaggagtgcctggagcacggccggatcgccaagttcagcaaggtgagaaccatcaccacccgaagcaacagcatcaaacaaggcaaggaccagcactttcctgtgttcatgaacgagaaggaggacatcctgtggtgtaccgagatggagagagtgttcgggttcccagtccactacacagatgtcagcaacatgtctagactggccagacagagactgctgggaagaagctggtccgtccctgtgatcagacacctgttcgcccctctgaaggagtacttcgcctgcgtgagcagcggcaacagcaacgccaacagccggggccccagcttctctagcggcctggtgccactgtccctgagagggagccacatgggccccatggagatctacaaaaccgtgagcgcctggaagcggcagcctgtgcgcgtgctgagcctgtttcggaatatcgataaagtcctgaaaagcctgggattcctggagagcggctctggctccggcggtggcaccctgaagtacgtggaggatgtgacaaacgtggtcagacgggatgtggagaagtggggccccttcgatctggtgtacggcagcacccaacccctgggcagctcttgtgaccggtgccctggctggtacatgtttcagttccaccggatcctgcagtacgccctgccgagacaggagtcccagcggccattcttttggattttcatggacaacttgctgctgaccgaggatgaccaggaaactaccactcggttcctgcagaccgaagccgtgaccctgcaggacgtgagaggccgggactaccagaacgccatgcgggtgtggtccaacatccctggactgaaaagcaagcacgcacctctgacccctaaagaagaggagtacctgcaggcccaggtgcggagcagaagcaagctggacgcccctaaggtggatctgctggtgaagaattgcctcctgcccctgagagagtacttcaagtatttcagccagaatagtctgcccctgggcggcccaagcagcggcgcccctcctcccagcggcggcagcccagccggctccccaacctctaccgaggagggcacctctgagtccgccacccccgagagcggccctggcacctccaccgagcccagcgagggcagcgcacccggcagccctgccggcagccccacctccacagaggagggaaccagcaccgagcccagcgaaggcagcgccccaggcaccagcaccgagcctagtgagggcggctctggcggcggcagcgcccaggagattaaacggatcaacaagatcagaagaagacttgtgaaagacagcaacaccaagaaggccggcaagacaggccccatgaaaaccctgctggttagagtgatgacacccgatctgagagagcggctggaaaacctgagaaagaagcctgaaaatatcccccagcccatcagcaatacatctagagccaacctgaataagctgctgaccgattacaccgaaatgaagaaggcgatcctgcatgtgtactgggaagagttccagaaggaccctgtgggcctgatgagccgggtggcccagcctgccagcaagaagatcgatcagaacaagctgaaacctgagatggacgagaagggcaacctgaccaccgccggctttgcctgctctcagtgtggccagcccctgttcgtgtacaagctggagcaggtgtctgagaagggcaaggcttacaccaactacttcggacggtgcaatgtggccgagcacgaaaagctgatcctgctggcccagctgaagcccgagaaggatagcgacgaagccgtgacatatagcctgggaaagtttgggcagagggccctggatttctacagcattcatgtgaccaaggagtccacccaccccgtgaagcccctggcccagatcgccggaaacagatacgcctccggacctgtgggaaaggccctgagcgacgcatgtatgggcacaatcgcctccttcctgtctaagtaccaggacatcatcatcgaacaccagaaggtggtgaagggcaaccagaagagactggagagcctgcgggagctggccggcaaggaaaacctggaataccctagcgtgaccctgccacctcagcctcacaccaaggagggcgttgatgcctacaacgaagtgatcgcccgggtgcgaatgtgggtgaacctgaacctgtggcagaagctgaagctaagcagagatgatgccaagcctctgctgagactgaagggattcccttcctttcctctggtcgagagacaggccaacgaagtggactggtgggacatggtgtgtaacgtgaagaagctgatcaacgagaaaaaggaggatggcaaggtgttttggcagaatctggctggctacaagagacaggaagccctgagaccatacctgagcagcgaggaagatcggaagaagggaaagaaattcgctcggtaccagctgggcgacctgctgctgcacctggaaaagaagcacggcgaggactggggaaaggtgtacgacgaggcctgggagcggattgacaagaaagtggaaggcctgagcaagcacatcaagctggaagaggaacggagaagcgaggacgcccagagcaaggccgccctgaccgactggctgcgggctaaggccagcttcgtgatcgagggcctgaaggaggccgacaaggacgagttctgcagatgcgagctgaagctgcagaagtggtacggggacctgcggggaaagcccttcgccatcgaagccgagaacagcatcctggacatcagcggcttcagcaagcagtacaactgtgccttcatctggcagaaggacggcgtgaagaagctgaacctgtacctgatcatcaactacttcaagggcggcaagctgcggttcaagaagatcaaacctgaagccttcgaagccaacagattctacaccgtgatcaacaaaaagagcggcgagatcgtgcccatggaggtgaacttcaacttcgacgaccccaacctgatcatcctgcctctggcctttggcaagagacagggcagagaattcatctggaacgacctgctgtccctggaaaccggcagcctgaagctggccaacggaagagtgatcgagaagacactgtacaacagaagaacccggcaggatgagcctgccctgttcgtggccctgaccttcgagcggcgggaggtcctggactcctccaatatcaaaccaatgaacctgatcggcgtggcaagaggcgaaaacatccccgccgtgatcgccctgaccgaccccgagggctgcccactgagccggtttaaggatagcctgggaaacccaacccacatcctgagaatcggcgagagctataaggagaagcagcggaccatccaggccaagaaggaggtggagcagcggagagccggcggctacagccggaagtacgccagcaaagccaagaatctggcagacgatatggtgagaaacaccgctagagatctgctgtactacgccgtgacccaggatgccatgctgatcttcgccaacctgagccggggcttcggccggcagggcaagcggaccttcatggccgagagacagtacacacggatggaggactggctgaccgccaagctggcctacgagggcctgagcaagacctacctgtccaagacactggcccagtacacctccaagacatgcagcaactgtgggtttaccatcaccagcgccgactacgacagggtgctggagaagctgaagaagacagcaacaggctggatgaccacaattaacggcaaggagctgaaggtggagggccagattacctactacaacagatacaagagacagaacgtagtcaaggacctgtccgtcgagctggatagactgagcgaagaatctgtgaacaacgacatctcctcctggacaaagggcagaagcggagaagctctgagcctcctgaagaaaagattctcccatagacccgtgcaggagaagttcgtgtgcctgaactgcggcttcgagacacacgcagccgagcaagccgccctgaacatcgccagatcctggctgttcctgcggagccaggagtacaagaaataccagacaaacaagacaaccggcaacaccgataagagagccttcgtcgagacctggcagtccttttaccggaagaagcttaaggaggtgtggaaacctgccgtgcggtctggcggatctggcggaggctccacaagcatggcccacctgatgatgttcagggacgtggccgtggacttcagccaggaggagtgggagtgcctggacctggagcagaggggcctgtacagggacgtgatgctggagaactacagcaacatggtgagcctgggcctgtgcatctaccagcccgaggccttcagcctgctggagaagggcaaggagccctggaagatcctgagggacgagaccaggggcccctgccccgacatgcagagcaggaccagccccaagaaaaagagaaaagtctaagctgccttctgcggggcttgccttctggccatgcccttcttctctcccttgcacctgtacctcttggtctttgaataaagcctgagtaggaaggctagcaaaaaaaaaaaaaaaaaaaaaaaaaaaaaaaaaaaaaaaaaaaaaaaaaaaaaaaaaaaaaaaaaaaaaaaaaaaaaaaa

SEQ ID NO: 3395 - RNA, 5419 nt, synthetic construct
  source 1..5419: mol_type = other RNA
aggaaataagagagaaaagaagagtaagaagaaatataagagccaccatggcccctaagaagaagcgtaaagtgagccgggtgaacggcagcggcagcggcggcggcatgaaccacgaccaggagttcgacccccctaaggtgtaccctcccgtccccgccgagaagagaaagcccatccgggtcctgagcctgttcgatggcatcgccaccggtctgctggtgctgaaggacctgggcatccaggtggataggtacattgcctccgaggtgtgcgaggactccatcaccgtgggaatggtgcgtcatcagggcaagatcatgtacgtgggcgacgtgcggagcgtgacacagaagcatatccaggagtggggccctttcgacctggtgatcggcggcagcccttgcaatgacctgagcatcgtgaacccagcccggaagggcctgtacgagggaaccggcagactgttcttcgagttttacagactgctgcacgacgcccggcctaaggaaggcgacgaccggcccttcttttggctgttcgagaatgtggtggccatgggagtcagcgacaagcgggatattagccggttcctggagagcaaccccgtgatgatcgatgccaaggaagtgagcgccgcccaccgggccagatacttctggggcaatctgcctggcatgaacagacccctggccagcaccgtgaacgacaagctggagctgcaggagtgcctggagcacggccggatcgccaagttcagcaaggtgagaaccatcaccacccgaagcaacagcatcaaacaaggcaaggaccagcactttcctgtgttcatgaacgagaaggaggacatcctgtggtgtaccgagatggagagagtgttcgggttcccagtccactacacagatgtcagcaacatgtctagactggccagacagagactgctgggaagaagctggtccgtccctgtgatcagacacctgttcgcccctctgaaggagtacttcgcctgcgtgagcagcggcaacagcaacgccaacagccggggccccagcttctctagcggcctggtgccactgtccctgagagggagccacatgggccccatggagatctacaaaaccgtgagcgcctggaagcggcagcctgtgcgcgtgctgagcctgtttcggaatatcgataaagtcctgaaaagcctgggattcctggagagcggctctggctccggcggtggcaccctgaagtacgtggaggatgtgacaaacgtggtcagacgggatgtggagaagtggggccccttcgatctggtgtacggcagcacccaacccctgggcagctcttgtgaccggtgccctggctggtacatgtttcagttccaccggatcctgcagtacgccctgccgagacaggagtcccagcggccattcttttggattttcatggacaacttgctgctgaccgaggatgaccaggaaactaccactcggttcctgcagaccgaagccgtgaccctgcaggacgtgagaggccgggactaccagaacgccatgcgggtgtggtccaacatccctggactgaaaagcaagcacgcacctctgacccctaaagaagaggagtacctgcaggcccaggtgcggagcagaagcaagctggacgcccctaaggtggatctgctggtgaagaattgcctcctgcccctgagagagtacttcaagtatttcagccagaatagtctgcccctgggcggcccaagcagcggcgcccctcctcccagcggcggcagcccagccggctccccaacctctaccgaggagggcacctctgagtccgccacccccgagagcggccctggcacctccaccgagcccagcgagggcagcgcacccggcagccctgccggcagccccacctccacagaggagggaaccagcaccgagcccagcgaaggcagcgccccaggcaccagcaccgagcctagtgagggcggctctggcggcggcagcgcccaggagattaaacggatcaacaagatcagaagaagacttgtgaaagacagcaacaccaagaaggccggcaagacaggccccatgaaaaccctgctggttagagtgatgacacccgatctgagagagcggctggaaaacctgagaaagaagcctgaaaatatcccccagcccatcagcaatacatctagagccaacctgaataagctgctgaccgattacaccgaaatgaagaaggcgatcctgcatgtgtactgggaagagttccagaaggaccctgtgggcctgatgagccgggtggcccagcctgccagcaagaagatcgatcagaacaagctgaaacctgagatggacgagaagggcaacctgaccaccgccggctttgcctgctctcagtgtggccagcccctgttcgtgtacaagctggagcaggtgtctgagaagggcaaggcttacaccaactacttcggacggtgcaatgtggccgagcacgaaaagctgatcctgctggcccagctgaagcccgagaaggatagcgacgaagccgtgacatatagcctgggaaagtttgggcagagggccctggatttctacagcattcatgtgaccaaggagtccacccaccccgtgaagcccctggcccagatcgccggaaacagatacgcctccggacctgtgggaaaggccctgagcgacgcatgtatgggcacaatcgcctccttcctgtctaagtaccaggacatcatcatcgaacaccagaaggtggtgaagggcaaccagaagagactggagagcctgcgggagctggccggcaaggaaaacctggaataccctagcgtgaccctgccacctcagcctcacaccaaggagggcgttgatgcctacaacgaagtgatcgcccgggtgcgaatgtgggtgaacctgaacctgtggcagaagctgaagctaagcagagatgatgccaagcctctgctgagactgaagggattcccttcctttcctctggtcgagagacaggccaacgaagtggactggtgggacatggtgtgtaacgtgaagaagctgatcaacgagaaaaaggaggatggcaaggtgttttggcagaatctggctggctacaagagacaggaagccctgagaccatacctgagcagcgaggaagatcggaagaagggaaagaaattcgctcggtaccagctgggcgacctgctgctgcacctggaaaagaagcacggcgaggactggggaaaggtgtacgacgaggcctgggagcggattgacaagaaagtggaaggcctgagcaagcacatcaagctggaagaggaacggagaagcgaggacgcccagagcaaggccgccctgaccgactggctgcgggctaaggccagcttcgtgatcgagggcctgaaggaggccgacaaggacgagttctgcagatgcgagctgaagctgcagaagtggtacggggacctgcggggaaagcccttcgccatcgaagccgagaacagcatcctggacatcagcggcttcagcaagcagtacaactgtgccttcatctggcagaaggacggcgtgaagaagctgaacctgtacctgatcatcaactacttcaagggcggcaagctgcggttcaagaagatcaaacctgaagccttcgaagccaacagattctacaccgtgatcaacaaaaagagcggcgagatcgtgcccatggaggtgaacttcaacttcgacgaccccaacctgatcatcctgcctctggcctttggcaagagacagggcagagaattcatctggaacgacctgctgtccctggaaaccggcagcctgaagctggccaacggaagagtgatcgagaagacactgtacaacagaagaacccggcaggatgagcctgccctgttcgtggccctgaccttcgagcggcgggaggtcctggactcctccaatatcaaaccaatgaacctgatcggcgtggcaagaggcgaaaacatccccgccgtgatcgccctgaccgaccccgagggctgcccactgagccggtttaaggatagcctgggaaacccaacccacatcctgagaatcggcgagagctataaggagaagcagcggaccatccaggccaagaaggaggtggagcagcggagagccggcggctacagccggaagtacgccagcaaagccaagaatctggcagacgatatggtgagaaacaccgctagagatctgctgtactacgccgtgacccaggatgccatgctgatcttcgccaacctgagccggggcttcggccggcagggcaagcggaccttcatggccgagagacagtacacacggatggaggactggctgaccgccaagctggcctacgagggcctgagcaagacctacctgtccaagacactggcccagtacacctccaagacatgcagcaactgtgggtttaccatcaccagcgccgactacgacagggtgctggagaagctgaagaagacagcaacaggctggatgaccacaattaacggcaaggagctgaaggtggagggccagattacctactacaacagatacaagagacagaacgtagtcaaggacctgtccgtcgagctggatagactgagcgaagaatctgtgaacaacgacatctcctcctggacaaagggcagaagcggagaagctctgagcctcctgaagaaaagattctcccatagacccgtgcaggagaagttcgtgtgcctgaactgcggcttcgagacacacgcagccgagcaagccgccctgaacatcgccagatcctggctgttcctgcggagccaggagtacaagaaataccagacaaacaagacaaccggcaacaccgataagagagccttcgtcgagacctggcagtccttttaccggaagaagcttaaggaggtgtggaaacctgccgtgcggtctggcggatctggcggaggctccacaagcatggacgccgtgacctacgaggacgtgcaggtgagcttcaccagggaggagtggaccctgctggaccccagccagaagagcctgtacaaggacgtgatggtggagacctacaggaacctgaccgccatcggctacaagtgggaggaccagaacatcaagaagcaccaccagtgcagcaggaggcacggcaggcacgagaggagcaacagcgccgagaaggactacgagtgcgagcagtgcggcaccagccccaagaaaaagagaaaagtctaagctgccttctgcggggcttgccttctggccatgcccttcttctctcccttgcacctgtacctcttggtctttgaataaagcctgagtaggaaggctagcaaaaaaaaaaaaaaaaaaaaaaaaaaaaaaaaaaaaaaaaaaaaaaaaaaaaaaaaaaaaaaaaaaaaaaaaaaaaaaaa

SEQ ID NO: 3396 - RNA, 5419 nt, synthetic construct
  source 1..5419: mol_type = other RNA
aggaaataagagagaaaagaagagtaagaagaaatataagagccaccatggcccctaagaagaagcgtaaagtgagccgggtgaacggcagcggcagcggcggcggcatgaaccacgaccaggagttcgacccccctaaggtgtaccctcccgtccccgccgagaagagaaagcccatccgggtcctgagcctgttcgatggcatcgccaccggtctgctggtgctgaaggacctgggcatccaggtggataggtacattgcctccgaggtgtgcgaggactccatcaccgtgggaatggtgcgtcatcagggcaagatcatgtacgtgggcgacgtgcggagcgtgacacagaagcatatccaggagtggggccctttcgacctggtgatcggcggcagcccttgcaatgacctgagcatcgtgaacccagcccggaagggcctgtacgagggaaccggcagactgttcttcgagttttacagactgctgcacgacgcccggcctaaggaaggcgacgaccggcccttcttttggctgttcgagaatgtggtggccatgggagtcagcgacaagcgggatattagccggttcctggagagcaaccccgtgatgatcgatgccaaggaagtgagcgccgcccaccgggccagatacttctggggcaatctgcctggcatgaacagacccctggccagcaccgtgaacgacaagctggagctgcaggagtgcctggagcacggccggatcgccaagttcagcaaggtgagaaccatcaccacccgaagcaacagcatcaaacaaggcaaggaccagcactttcctgtgttcatgaacgagaaggaggacatcctgtggtgtaccgagatggagagagtgttcgggttcccagtccactacacagatgtcagcaacatgtctagactggccagacagagactgctgggaagaagctggtccgtccctgtgatcagacacctgttcgcccctctgaaggagtacttcgcctgcgtgagcagcggcaacagcaacgccaacagccggggccccagcttctctagcggcctggtgccactgtccctgagagggagccacatgggccccatggagatctacaaaaccgtgagcgcctggaagcggcagcctgtgcgcgtgctgagcctgtttcggaatatcgataaagtcctgaaaagcctgggattcctggagagcggctctggctccggcggtggcaccctgaagtacgtggaggatgtgacaaacgtggtcagacgggatgtggagaagtggggccccttcgatctggtgtacggcagcacccaacccctgggcagctcttgtgaccggtgccctggctggtacatgtttcagttccaccggatcctgcagtacgccctgccgagacaggagtcccagcggccattcttttggattttcatggacaacttgctgctgaccgaggatgaccaggaaactaccactcggttcctgcagaccgaagccgtgaccctgcaggacgtgagaggccgggactaccagaacgccatgcgggtgtggtccaacatccctggactgaaaagcaagcacgcacctctgacccctaaagaagaggagtacctgcaggcccaggtgcggagcagaagcaagctggacgcccctaaggtggatctgctggtgaagaattgcctcctgcccctgagagagtacttcaagtatttcagccagaatagtctgcccctgggcggcccaagcagcggcgcccctcctcccagcggcggcagcccagccggctccccaacctctaccgaggagggcacctctgagtccgccacccccgagagcggccctggcacctccaccgagcccagcgagggcagcgcacccggcagccctgccggcagccccacctccacagaggagggaaccagcaccgagcccagcgaaggcagcgccccaggcaccagcaccgagcctagtgagggcggctctggcggcggcagcgcccaggagattaaacggatcaacaagatcagaagaagacttgtgaaagacagcaacaccaagaaggccggcaagacaggccccatgaaaaccctgctggttagagtgatgacacccgatctgagagagcggctggaaaacctgagaaagaagcctgaaaatatcccccagcccatcagcaatacatctagagccaacctgaataagctgctgaccgattacaccgaaatgaagaaggcgatcctgcatgtgtactgggaagagttccagaaggaccctgtgggcctgatgagccgggtggcccagcctgccagcaagaagatcgatcagaacaagctgaaacctgagatggacgagaagggcaacctgaccaccgccggctttgcctgctctcagtgtggccagcccctgttcgtgtacaagctggagcaggtgtctgagaagggcaaggcttacaccaactacttcggacggtgcaatgtggccgagcacgaaaagctgatcctgctggcccagctgaagcccgagaaggatagcgacgaagccgtgacatatagcctgggaaagtttgggcagagggccctggatttctacagcattcatgtgaccaaggagtccacccaccccgtgaagcccctggcccagatcgccggaaacagatacgcctccggacctgtgggaaaggccctgagcgacgcatgtatgggcacaatcgcctccttcctgtctaagtaccaggacatcatcatcgaacaccagaaggtggtgaagggcaaccagaagagactggagagcctgcgggagctggccggcaaggaaaacctggaataccctagcgtgaccctgccacctcagcctcacaccaaggagggcgttgatgcctacaacgaagtgatcgcccgggtgcgaatgtgggtgaacctgaacctgtggcagaagctgaagctaagcagagatgatgccaagcctctgctgagactgaagggattcccttcctttcctctggtcgagagacaggccaacgaagtggactggtgggacatggtgtgtaacgtgaagaagctgatcaacgagaaaaaggaggatggcaaggtgttttggcagaatctggctggctacaagagacaggaagccctgagaccatacctgagcagcgaggaagatcggaagaagggaaagaaattcgctcggtaccagctgggcgacctgctgctgcacctggaaaagaagcacggcgaggactggggaaaggtgtacgacgaggcctgggagcggattgacaagaaagtggaaggcctgagcaagcacatcaagctggaagaggaacggagaagcgaggacgcccagagcaaggccgccctgaccgactggctgcgggctaaggccagcttcgtgatcgagggcctgaaggaggccgacaaggacgagttctgcagatgcgagctgaagctgcagaagtggtacggggacctgcggggaaagcccttcgccatcgaagccgagaacagcatcctggacatcagcggcttcagcaagcagtacaactgtgccttcatctggcagaaggacggcgtgaagaagctgaacctgtacctgatcatcaactacttcaagggcggcaagctgcggttcaagaagatcaaacctgaagccttcgaagccaacagattctacaccgtgatcaacaaaaagagcggcgagatcgtgcccatggaggtgaacttcaacttcgacgaccccaacctgatcatcctgcctctggcctttggcaagagacagggcagagaattcatctggaacgacctgctgtccctggaaaccggcagcctgaagctggccaacggaagagtgatcgagaagacactgtacaacagaagaacccggcaggatgagcctgccctgttcgtggccctgaccttcgagcggcgggaggtcctggactcctccaatatcaaaccaatgaacctgatcggcgtggcaagaggcgaaaacatccccgccgtgatcgccctgaccgaccccgagggctgcccactgagccggtttaaggatagcctgggaaacccaacccacatcctgagaatcggcgagagctataaggagaagcagcggaccatccaggccaagaaggaggtggagcagcggagagccggcggctacagccggaagtacgccagcaaagccaagaatctggcagacgatatggtgagaaacaccgctagagatctgctgtactacgccgtgacccaggatgccatgctgatcttcgccaacctgagccggggcttcggccggcagggcaagcggaccttcatggccgagagacagtacacacggatggaggactggctgaccgccaagctggcctacgagggcctgagcaagacctacctgtccaagacactggcccagtacacctccaagacatgcagcaactgtgggtttaccatcaccagcgccgactacgacagggtgctggagaagctgaagaagacagcaacaggctggatgaccacaattaacggcaaggagctgaaggtggagggccagattacctactacaacagatacaagagacagaacgtagtcaaggacctgtccgtcgagctggatagactgagcgaagaatctgtgaacaacgacatctcctcctggacaaagggcagaagcggagaagctctgagcctcctgaagaaaagattctcccatagacccgtgcaggagaagttcgtgtgcctgaactgcggcttcgagacacacgcagccgagcaagccgccctgaacatcgccagatcctggctgttcctgcggagccaggagtacaagaaataccagacaaacaagacaaccggcaacaccgataagagagccttcgtcgagacctggcagtccttttaccggaagaagcttaaggaggtgtggaaacctgccgtgcggtctggcggatctggcggaggctccacaagccaggagctgctgaccttcaaggacgtgagcgtggagttcagcatggacgagtgggcctgcctggaccccgcccagcagaccctgtaccaggacgtgatgctggagaactacaggcacctggtgttcctgggcctgaccctgagcaagcccgacctgatcacctgcctggagcagagcaaggagccctggaaggtgaagagccaccagaccgtggtgaagcaccccgccgtgagcgacccccccaccagccccaagaaaaagagaaaagtctaagctgccttctgcggggcttgccttctggccatgcccttcttctctcccttgcacctgtacctcttggtctttgaataaagcctgagtaggaaggctagcaaaaaaaaaaaaaaaaaaaaaaaaaaaaaaaaaaaaaaaaaaaaaaaaaaaaaaaaaaaaaaaaaaaaaaaaaaaaaaaa

SEQ ID NO: 3397 - RNA, 5452 nt, synthetic construct
  source 1..5452: mol_type = other RNA
aggaaataagagagaaaagaagagtaagaagaaatataagagccaccatggcccctaagaagaagcgtaaagtgagccgggtgaacggcagcggcagcggcggcggcatgaaccacgaccaggagttcgacccccctaaggtgtaccctcccgtccccgccgagaagagaaagcccatccgggtcctgagcctgttcgatggcatcgccaccggtctgctggtgctgaaggacctgggcatccaggtggataggtacattgcctccgaggtgtgcgaggactccatcaccgtgggaatggtgcgtcatcagggcaagatcatgtacgtgggcgacgtgcggagcgtgacacagaagcatatccaggagtggggccctttcgacctggtgatcggcggcagcccttgcaatgacctgagcatcgtgaacccagcccggaagggcctgtacgagggaaccggcagactgttcttcgagttttacagactgctgcacgacgcccggcctaaggaaggcgacgaccggcccttcttttggctgttcgagaatgtggtggccatgggagtcagcgacaagcgggatattagccggttcctggagagcaaccccgtgatgatcgatgccaaggaagtgagcgccgcccaccgggccagatacttctggggcaatctgcctggcatgaacagacccctggccagcaccgtgaacgacaagctggagctgcaggagtgcctggagcacggccggatcgccaagttcagcaaggtgagaaccatcaccacccgaagcaacagcatcaaacaaggcaaggaccagcactttcctgtgttcatgaacgagaaggaggacatcctgtggtgtaccgagatggagagagtgttcgggttcccagtccactacacagatgtcagcaacatgtctagactggccagacagagactgctgggaagaagctggtccgtccctgtgatcagacacctgttcgcccctctgaaggagtacttcgcctgcgtgagcagcggcaacagcaacgccaacagccggggccccagcttctctagcggcctggtgccactgtccctgagagggagccacatgggccccatggagatctacaaaaccgtgagcgcctggaagcggcagcctgtgcgcgtgctgagcctgtttcggaatatcgataaagtcctgaaaagcctgggattcctggagagcggctctggctccggcggtggcaccctgaagtacgtggaggatgtgacaaacgtggtcagacgggatgtggagaagtggggccccttcgatctggtgtacggcagcacccaacccctgggcagctcttgtgaccggtgccctggctggtacatgtttcagttccaccggatcctgcagtacgccctgccgagacaggagtcccagcggccattcttttggattttcatggacaacttgctgctgaccgaggatgaccaggaaactaccactcggttcctgcagaccgaagccgtgaccctgcaggacgtgagaggccgggactaccagaacgccatgcgggtgtggtccaacatccctggactgaaaagcaagcacgcacctctgacccctaaagaagaggagtacctgcaggcccaggtgcggagcagaagcaagctggacgcccctaaggtggatctgctggtgaagaattgcctcctgcccctgagagagtacttcaagtatttcagccagaatagtctgcccctgggcggcccaagcagcggcgcccctcctcccagcggcggcagcccagccggctccccaacctctaccgaggagggcacctctgagtccgccacccccgagagcggccctggcacctccaccgagcccagcgagggcagcgcacccggcagccctgccggcagccccacctccacagaggagggaaccagcaccgagcccagcgaaggcagcgccccaggcaccagcaccgagcctagtgagggcggctctggcggcggcagcgcccaggagattaaacggatcaacaagatcagaagaagacttgtgaaagacagcaacaccaagaaggccggcaagacaggccccatgaaaaccctgctggttagagtgatgacacccgatctgagagagcggctggaaaacctgagaaagaagcctgaaaatatcccccagcccatcagcaatacatctagagccaacctgaataagctgctgaccgattacaccgaaatgaagaaggcgatcctgcatgtgtactgggaagagttccagaaggaccctgtgggcctgatgagccgggtggcccagcctgccagcaagaagatcgatcagaacaagctgaaacctgagatggacgagaagggcaacctgaccaccgccggctttgcctgctctcagtgtggccagcccctgttcgtgtacaagctggagcaggtgtctgagaagggcaaggcttacaccaactacttcggacggtgcaatgtggccgagcacgaaaagctgatcctgctggcccagctgaagcccgagaaggatagcgacgaagccgtgacatatagcctgggaaagtttgggcagagggccctggatttctacagcattcatgtgaccaaggagtccacccaccccgtgaagcccctggcccagatcgccggaaacagatacgcctccggacctgtgggaaaggccctgagcgacgcatgtatgggcacaatcgcctccttcctgtctaagtaccaggacatcatcatcgaacaccagaaggtggtgaagggcaaccagaagagactggagagcctgcgggagctggccggcaaggaaaacctggaataccctagcgtgaccctgccacctcagcctcacaccaaggagggcgttgatgcctacaacgaagtgatcgcccgggtgcgaatgtgggtgaacctgaacctgtggcagaagctgaagctaagcagagatgatgccaagcctctgctgagactgaagggattcccttcctttcctctggtcgagagacaggccaacgaagtggactggtgggacatggtgtgtaacgtgaagaagctgatcaacgagaaaaaggaggatggcaaggtgttttggcagaatctggctggctacaagagacaggaagccctgagaccatacctgagcagcgaggaagatcggaagaagggaaagaaattcgctcggtaccagctgggcgacctgctgctgcacctggaaaagaagcacggcgaggactggggaaaggtgtacgacgaggcctgggagcggattgacaagaaagtggaaggcctgagcaagcacatcaagctggaagaggaacggagaagcgaggacgcccagagcaaggccgccctgaccgactggctgcgggctaaggccagcttcgtgatcgagggcctgaaggaggccgacaaggacgagttctgcagatgcgagctgaagctgcagaagtggtacggggacctgcggggaaagcccttcgccatcgaagccgagaacagcatcctggacatcagcggcttcagcaagcagtacaactgtgccttcatctggcagaaggacggcgtgaagaagctgaacctgtacctgatcatcaactacttcaagggcggcaagctgcggttcaagaagatcaaacctgaagccttcgaagccaacagattctacaccgtgatcaacaaaaagagcggcgagatcgtgcccatggaggtgaacttcaacttcgacgaccccaacctgatcatcctgcctctggcctttggcaagagacagggcagagaattcatctggaacgacctgctgtccctggaaaccggcagcctgaagctggccaacggaagagtgatcgagaagacactgtacaacagaagaacccggcaggatgagcctgccctgttcgtggccctgaccttcgagcggcgggaggtcctggactcctccaatatcaaaccaatgaacctgatcggcgtggcaagaggcgaaaacatccccgccgtgatcgccctgaccgaccccgagggctgcccactgagccggtttaaggatagcctgggaaacccaacccacatcctgagaatcggcgagagctataaggagaagcagcggaccatccaggccaagaaggaggtggagcagcggagagccggcggctacagccggaagtacgccagcaaagccaagaatctggcagacgatatggtgagaaacaccgctagagatctgctgtactacgccgtgacccaggatgccatgctgatcttcgccaacctgagccggggcttcggccggcagggcaagcggaccttcatggccgagagacagtacacacggatggaggactggctgaccgccaagctggcctacgagggcctgagcaagacctacctgtccaagacactggcccagtacacctccaagacatgcagcaactgtgggtttaccatcaccagcgccgactacgacagggtgctggagaagctgaagaagacagcaacaggctggatgaccacaattaacggcaaggagctgaaggtggagggccagattacctactacaacagatacaagagacagaacgtagtcaaggacctgtccgtcgagctggatagactgagcgaagaatctgtgaacaacgacatctcctcctggacaaagggcagaagcggagaagctctgagcctcctgaagaaaagattctcccatagacccgtgcaggagaagttcgtgtgcctgaactgcggcttcgagacacacgcagccgagcaagccgccctgaacatcgccagatcctggctgttcctgcggagccaggagtacaagaaataccagacaaacaagacaaccggcaacaccgataagagagccttcgtcgagacctggcagtccttttaccggaagaagcttaaggaggtgtggaaacctgccgtgcggtctggcggatctggcggaggctccacaagcgtgacctacgaggacgtgaccgtgaccttcacccaggaggagtgggccctgctgaaccccagcgagaagaagctgtacagggacgtgatgtgggagaacctgaggaacatcttcagcaccggcaagatccagggcgacaactacaacgaggagcagcacaaccaccagggcagcaagcagagctgcagggtggtgaagatcagcggcggccagaagaggagccagaacgacgagaagcagaggatgcagagcgagggcaagagctacgagtgcgagaccagccccaagaaaaagagaaaagtctaagctgccttctgcggggcttgccttctggccatgcccttcttctctcccttgcacctgtacctcttggtctttgaataaagcctgagtaggaaggctagcaaaaaaaaaaaaaaaaaaaaaaaaaaaaaaaaaaaaaaaaaaaaaaaaaaaaaaaaaaaaaaaaaaaaaaaaaaaaaaaa

SEQ ID NO: 3398 - RNA, 5419 nt, synthetic construct
  source 1..5419: mol_type = other RNA
aggaaataagagagaaaagaagagtaagaagaaatataagagccaccatggcccctaagaagaagcgtaaagtgagccgggtgaacggcagcggcagcggcggcggcatgaaccacgaccaggagttcgacccccctaaggtgtaccctcccgtccccgccgagaagagaaagcccatccgggtcctgagcctgttcgatggcatcgccaccggtctgctggtgctgaaggacctgggcatccaggtggataggtacattgcctccgaggtgtgcgaggactccatcaccgtgggaatggtgcgtcatcagggcaagatcatgtacgtgggcgacgtgcggagcgtgacacagaagcatatccaggagtggggccctttcgacctggtgatcggcggcagcccttgcaatgacctgagcatcgtgaacccagcccggaagggcctgtacgagggaaccggcagactgttcttcgagttttacagactgctgcacgacgcccggcctaaggaaggcgacgaccggcccttcttttggctgttcgagaatgtggtggccatgggagtcagcgacaagcgggatattagccggttcctggagagcaaccccgtgatgatcgatgccaaggaagtgagcgccgcccaccgggccagatacttctggggcaatctgcctggcatgaacagacccctggccagcaccgtgaacgacaagctggagctgcaggagtgcctggagcacggccggatcgccaagttcagcaaggtgagaaccatcaccacccgaagcaacagcatcaaacaaggcaaggaccagcactttcctgtgttcatgaacgagaaggaggacatcctgtggtgtaccgagatggagagagtgttcgggttcccagtccactacacagatgtcagcaacatgtctagactggccagacagagactgctgggaagaagctggtccgtccctgtgatcagacacctgttcgcccctctgaaggagtacttcgcctgcgtgagcagcggcaacagcaacgccaacagccggggccccagcttctctagcggcctggtgccactgtccctgagagggagccacatgggccccatggagatctacaaaaccgtgagcgcctggaagcggcagcctgtgcgcgtgctgagcctgtttcggaatatcgataaagtcctgaaaagcctgggattcctggagagcggctctggctccggcggtggcaccctgaagtacgtggaggatgtgacaaacgtggtcagacgggatgtggagaagtggggccccttcgatctggtgtacggcagcacccaacccctgggcagctcttgtgaccggtgccctggctggtacatgtttcagttccaccggatcctgcagtacgccctgccgagacaggagtcccagcggccattcttttggattttcatggacaacttgctgctgaccgaggatgaccaggaaactaccactcggttcctgcagaccgaagccgtgaccctgcaggacgtgagaggccgggactaccagaacgccatgcgggtgtggtccaacatccctggactgaaaagcaagcacgcacctctgacccctaaagaagaggagtacctgcaggcccaggtgcggagcagaagcaagctggacgcccctaaggtggatctgctggtgaagaattgcctcctgcccctgagagagtacttcaagtatttcagccagaatagtctgcccctgggcggcccaagcagcggcgcccctcctcccagcggcggcagcccagccggctccccaacctctaccgaggagggcacctctgagtccgccacccccgagagcggccctggcacctccaccgagcccagcgagggcagcgcacccggcagccctgccggcagccccacctccacagaggagggaaccagcaccgagcccagcgaaggcagcgccccaggcaccagcaccgagcctagtgagggcggctctggcggcggcagcgcccaggagattaaacggatcaacaagatcagaagaagacttgtgaaagacagcaacaccaagaaggccggcaagacaggccccatgaaaaccctgctggttagagtgatgacacccgatctgagagagcggctggaaaacctgagaaagaagcctgaaaatatcccccagcccatcagcaatacatctagagccaacctgaataagctgctgaccgattacaccgaaatgaagaaggcgatcctgcatgtgtactgggaagagttccagaaggaccctgtgggcctgatgagccgggtggcccagcctgccagcaagaagatcgatcagaacaagctgaaacctgagatggacgagaagggcaacctgaccaccgccggctttgcctgctctcagtgtggccagcccctgttcgtgtacaagctggagcaggtgtctgagaagggcaaggcttacaccaactacttcggacggtgcaatgtggccgagcacgaaaagctgatcctgctggcccagctgaagcccgagaaggatagcgacgaagccgtgacatatagcctgggaaagtttgggcagagggccctggatttctacagcattcatgtgaccaaggagtccacccaccccgtgaagcccctggcccagatcgccggaaacagatacgcctccggacctgtgggaaaggccctgagcgacgcatgtatgggcacaatcgcctccttcctgtctaagtaccaggacatcatcatcgaacaccagaaggtggtgaagggcaaccagaagagactggagagcctgcgggagctggccggcaaggaaaacctggaataccctagcgtgaccctgccacctcagcctcacaccaaggagggcgttgatgcctacaacgaagtgatcgcccgggtgcgaatgtgggtgaacctgaacctgtggcagaagctgaagctaagcagagatgatgccaagcctctgctgagactgaagggattcccttcctttcctctggtcgagagacaggccaacgaagtggactggtgggacatggtgtgtaacgtgaagaagctgatcaacgagaaaaaggaggatggcaaggtgttttggcagaatctggctggctacaagagacaggaagccctgagaccatacctgagcagcgaggaagatcggaagaagggaaagaaattcgctcggtaccagctgggcgacctgctgctgcacctggaaaagaagcacggcgaggactggggaaaggtgtacgacgaggcctgggagcggattgacaagaaagtggaaggcctgagcaagcacatcaagctggaagaggaacggagaagcgaggacgcccagagcaaggccgccctgaccgactggctgcgggctaaggccagcttcgtgatcgagggcctgaaggaggccgacaaggacgagttctgcagatgcgagctgaagctgcagaagtggtacggggacctgcggggaaagcccttcgccatcgaagccgagaacagcatcctggacatcagcggcttcagcaagcagtacaactgtgccttcatctggcagaaggacggcgtgaagaagctgaacctgtacctgatcatcaactacttcaagggcggcaagctgcggttcaagaagatcaaacctgaagccttcgaagccaacagattctacaccgtgatcaacaaaaagagcggcgagatcgtgcccatggaggtgaacttcaacttcgacgaccccaacctgatcatcctgcctctggcctttggcaagagacagggcagagaattcatctggaacgacctgctgtccctggaaaccggcagcctgaagctggccaacggaagagtgatcgagaagacactgtacaacagaagaacccggcaggatgagcctgccctgttcgtggccctgaccttcgagcggcgggaggtcctggactcctccaatatcaaaccaatgaacctgatcggcgtggcaagaggcgaaaacatccccgccgtgatcgccctgaccgaccccgagggctgcccactgagccggtttaaggatagcctgggaaacccaacccacatcctgagaatcggcgagagctataaggagaagcagcggaccatccaggccaagaaggaggtggagcagcggagagccggcggctacagccggaagtacgccagcaaagccaagaatctggcagacgatatggtgagaaacaccgctagagatctgctgtactacgccgtgacccaggatgccatgctgatcttcgccaacctgagccggggcttcggccggcagggcaagcggaccttcatggccgagagacagtacacacggatggaggactggctgaccgccaagctggcctacgagggcctgagcaagacctacctgtccaagacactggcccagtacacctccaagacatgcagcaactgtgggtttaccatcaccagcgccgactacgacagggtgctggagaagctgaagaagacagcaacaggctggatgaccacaattaacggcaaggagctgaaggtggagggccagattacctactacaacagatacaagagacagaacgtagtcaaggacctgtccgtcgagctggatagactgagcgaagaatctgtgaacaacgacatctcctcctggacaaagggcagaagcggagaagctctgagcctcctgaagaaaagattctcccatagacccgtgcaggagaagttcgtgtgcctgaactgcggcttcgagacacacgcagccgagcaagccgccctgaacatcgccagatcctggctgttcctgcggagccaggagtacaagaaataccagacaaacaagacaaccggcaacaccgataagagagccttcgtcgagacctggcagtccttttaccggaagaagcttaaggaggtgtggaaacctgccgtgcggtctggcggatctggcggaggctccacaagcgcccaggcccccctgagcttcgaggacgtggccgtgagcttcagcagggaggagtggaggctgctggtgcccgcccagaaggacctgtacagggacgtgatgctggagaactacaggaacctggtgagcgtgggctaccaggccagcgagcccgacagcctgttccagctggagcacggcggccccctgtgggtggtggagggcgccgcccccaggcccccctgccccgaggagatctgggagaccagccccaagaaaaagagaaaagtctaagctgccttctgcggggcttgccttctggccatgcccttcttctctcccttgcacctgtacctcttggtctttgaataaagcctgagtaggaaggctagcaaaaaaaaaaaaaaaaaaaaaaaaaaaaaaaaaaaaaaaaaaaaaaaaaaaaaaaaaaaaaaaaaaaaaaaaaaaaaaaa

SEQ ID NO: 3399 - RNA, 5419 nt, synthetic construct
  source 1..5419: mol_type = other RNA
aggaaataagagagaaaagaagagtaagaagaaatataagagccaccatggcccctaagaagaagcgtaaagtgagccgggtgaacggcagcggcagcggcggcggcatgaaccacgaccaggagttcgacccccctaaggtgtaccctcccgtccccgccgagaagagaaagcccatccgggtcctgagcctgttcgatggcatcgccaccggtctgctggtgctgaaggacctgggcatccaggtggataggtacattgcctccgaggtgtgcgaggactccatcaccgtgggaatggtgcgtcatcagggcaagatcatgtacgtgggcgacgtgcggagcgtgacacagaagcatatccaggagtggggccctttcgacctggtgatcggcggcagcccttgcaatgacctgagcatcgtgaacccagcccggaagggcctgtacgagggaaccggcagactgttcttcgagttttacagactgctgcacgacgcccggcctaaggaaggcgacgaccggcccttcttttggctgttcgagaatgtggtggccatgggagtcagcgacaagcgggatattagccggttcctggagagcaaccccgtgatgatcgatgccaaggaagtgagcgccgcccaccgggccagatacttctggggcaatctgcctggcatgaacagacccctggccagcaccgtgaacgacaagctggagctgcaggagtgcctggagcacggccggatcgccaagttcagcaaggtgagaaccatcaccacccgaagcaacagcatcaaacaaggcaaggaccagcactttcctgtgttcatgaacgagaaggaggacatcctgtggtgtaccgagatggagagagtgttcgggttcccagtccactacacagatgtcagcaacatgtctagactggccagacagagactgctgggaagaagctggtccgtccctgtgatcagacacctgttcgcccctctgaaggagtacttcgcctgcgtgagcagcggcaacagcaacgccaacagccggggccccagcttctctagcggcctggtgccactgtccctgagagggagccacatgggccccatggagatctacaaaaccgtgagcgcctggaagcggcagcctgtgcgcgtgctgagcctgtttcggaatatcgataaagtcctgaaaagcctgggattcctggagagcggctctggctccggcggtggcaccctgaagtacgtggaggatgtgacaaacgtggtcagacgggatgtggagaagtggggccccttcgatctggtgtacggcagcacccaacccctgggcagctcttgtgaccggtgccctggctggtacatgtttcagttccaccggatcctgcagtacgccctgccgagacaggagtcccagcggccattcttttggattttcatggacaacttgctgctgaccgaggatgaccaggaaactaccactcggttcctgcagaccgaagccgtgaccctgcaggacgtgagaggccgggactaccagaacgccatgcgggtgtggtccaacatccctggactgaaaagcaagcacgcacctctgacccctaaagaagaggagtacctgcaggcccaggtgcggagcagaagcaagctggacgcccctaaggtggatctgctggtgaagaattgcctcctgcccctgagagagtacttcaagtatttcagccagaatagtctgcccctgggcggcccaagcagcggcgcccctcctcccagcggcggcagcccagccggctccccaacctctaccgaggagggcacctctgagtccgccacccccgagagcggccctggcacctccaccgagcccagcgagggcagcgcacccggcagccctgccggcagccccacctccacagaggagggaaccagcaccgagcccagcgaaggcagcgccccaggcaccagcaccgagcctagtgagggcggctctggcggcggcagcgcccaggagattaaacggatcaacaagatcagaagaagacttgtgaaagacagcaacaccaagaaggccggcaagacaggccccatgaaaaccctgctggttagagtgatgacacccgatctgagagagcggctggaaaacctgagaaagaagcctgaaaatatcccccagcccatcagcaatacatctagagccaacctgaataagctgctgaccgattacaccgaaatgaagaaggcgatcctgcatgtgtactgggaagagttccagaaggaccctgtgggcctgatgagccgggtggcccagcctgccagcaagaagatcgatcagaacaagctgaaacctgagatggacgagaagggcaacctgaccaccgccggctttgcctgctctcagtgtggccagcccctgttcgtgtacaagctggagcaggtgtctgagaagggcaaggcttacaccaactacttcggacggtgcaatgtggccgagcacgaaaagctgatcctgctggcccagctgaagcccgagaaggatagcgacgaagccgtgacatatagcctgggaaagtttgggcagagggccctggatttctacagcattcatgtgaccaaggagtccacccaccccgtgaagcccctggcccagatcgccggaaacagatacgcctccggacctgtgggaaaggccctgagcgacgcatgtatgggcacaatcgcctccttcctgtctaagtaccaggacatcatcatcgaacaccagaaggtggtgaagggcaaccagaagagactggagagcctgcgggagctggccggcaaggaaaacctggaataccctagcgtgaccctgccacctcagcctcacaccaaggagggcgttgatgcctacaacgaagtgatcgcccgggtgcgaatgtgggtgaacctgaacctgtggcagaagctgaagctaagcagagatgatgccaagcctctgctgagactgaagggattcccttcctttcctctggtcgagagacaggccaacgaagtggactggtgggacatggtgtgtaacgtgaagaagctgatcaacgagaaaaaggaggatggcaaggtgttttggcagaatctggctggctacaagagacaggaagccctgagaccatacctgagcagcgaggaagatcggaagaagggaaagaaattcgctcggtaccagctgggcgacctgctgctgcacctggaaaagaagcacggcgaggactggggaaaggtgtacgacgaggcctgggagcggattgacaagaaagtggaaggcctgagcaagcacatcaagctggaagaggaacggagaagcgaggacgcccagagcaaggccgccctgaccgactggctgcgggctaaggccagcttcgtgatcgagggcctgaaggaggccgacaaggacgagttctgcagatgcgagctgaagctgcagaagtggtacggggacctgcggggaaagcccttcgccatcgaagccgagaacagcatcctggacatcagcggcttcagcaagcagtacaactgtgccttcatctggcagaaggacggcgtgaagaagctgaacctgtacctgatcatcaactacttcaagggcggcaagctgcggttcaagaagatcaaacctgaagccttcgaagccaacagattctacaccgtgatcaacaaaaagagcggcgagatcgtgcccatggaggtgaacttcaacttcgacgaccccaacctgatcatcctgcctctggcctttggcaagagacagggcagagaattcatctggaacgacctgctgtccctggaaaccggcagcctgaagctggccaacggaagagtgatcgagaagacactgtacaacagaagaacccggcaggatgagcctgccctgttcgtggccctgaccttcgagcggcgggaggtcctggactcctccaatatcaaaccaatgaacctgatcggcgtggcaagaggcgaaaacatccccgccgtgatcgccctgaccgaccccgagggctgcccactgagccggtttaaggatagcctgggaaacccaacccacatcctgagaatcggcgagagctataaggagaagcagcggaccatccaggccaagaaggaggtggagcagcggagagccggcggctacagccggaagtacgccagcaaagccaagaatctggcagacgatatggtgagaaacaccgctagagatctgctgtactacgccgtgacccaggatgccatgctgatcttcgccaacctgagccggggcttcggccggcagggcaagcggaccttcatggccgagagacagtacacacggatggaggactggctgaccgccaagctggcctacgagggcctgagcaagacctacctgtccaagacactggcccagtacacctccaagacatgcagcaactgtgggtttaccatcaccagcgccgactacgacagggtgctggagaagctgaagaagacagcaacaggctggatgaccacaattaacggcaaggagctgaaggtggagggccagattacctactacaacagatacaagagacagaacgtagtcaaggacctgtccgtcgagctggatagactgagcgaagaatctgtgaacaacgacatctcctcctggacaaagggcagaagcggagaagctctgagcctcctgaagaaaagattctcccatagacccgtgcaggagaagttcgtgtgcctgaactgcggcttcgagacacacgcagccgagcaagccgccctgaacatcgccagatcctggctgttcctgcggagccaggagtacaagaaataccagacaaacaagacaaccggcaacaccgataagagagccttcgtcgagacctggcagtccttttaccggaagaagcttaaggaggtgtggaaacctgccgtgcggtctggcggatctggcggaggctccacaagcgcccagaagagcctgaccctggaggacgtggccgtggacttcagcagggaggagtggaggctgctggcccccgcccagaaggacctgtacagggacgtgatgctggagaactacaggaacctggtgagcgtgggccaccaggccagcaagcccgacgtgctggccaagctggagaggggcgaggagccctgggccatcgaggaggaggtgaggagcggcaccagccccgagaccggcaaggtgaccagccccaagaaaaagagaaaagtctaagctgccttctgcggggcttgccttctggccatgcccttcttctctcccttgcacctgtacctcttggtctttgaataaagcctgagtaggaaggctagcaaaaaaaaaaaaaaaaaaaaaaaaaaaaaaaaaaaaaaaaaaaaaaaaaaaaaaaaaaaaaaaaaaaaaaaaaaaaaaaa

SEQ ID NO: 3400 - RNA, 5419 nt, synthetic construct
  source 1..5419: mol_type = other RNA
aggaaataagagagaaaagaagagtaagaagaaatataagagccaccatggcccctaagaagaagcgtaaagtgagccgggtgaacggcagcggcagcggcggcggcatgaaccacgaccaggagttcgacccccctaaggtgtaccctcccgtccccgccgagaagagaaagcccatccgggtcctgagcctgttcgatggcatcgccaccggtctgctggtgctgaaggacctgggcatccaggtggataggtacattgcctccgaggtgtgcgaggactccatcaccgtgggaatggtgcgtcatcagggcaagatcatgtacgtgggcgacgtgcggagcgtgacacagaagcatatccaggagtggggccctttcgacctggtgatcggcggcagcccttgcaatgacctgagcatcgtgaacccagcccggaagggcctgtacgagggaaccggcagactgttcttcgagttttacagactgctgcacgacgcccggcctaaggaaggcgacgaccggcccttcttttggctgttcgagaatgtggtggccatgggagtcagcgacaagcgggatattagccggttcctggagagcaaccccgtgatgatcgatgccaaggaagtgagcgccgcccaccgggccagatacttctggggcaatctgcctggcatgaacagacccctggccagcaccgtgaacgacaagctggagctgcaggagtgcctggagcacggccggatcgccaagttcagcaaggtgagaaccatcaccacccgaagcaacagcatcaaacaaggcaaggaccagcactttcctgtgttcatgaacgagaaggaggacatcctgtggtgtaccgagatggagagagtgttcgggttcccagtccactacacagatgtcagcaacatgtctagactggccagacagagactgctgggaagaagctggtccgtccctgtgatcagacacctgttcgcccctctgaaggagtacttcgcctgcgtgagcagcggcaacagcaacgccaacagccggggccccagcttctctagcggcctggtgccactgtccctgagagggagccacatgggccccatggagatctacaaaaccgtgagcgcctggaagcggcagcctgtgcgcgtgctgagcctgtttcggaatatcgataaagtcctgaaaagcctgggattcctggagagcggctctggctccggcggtggcaccctgaagtacgtggaggatgtgacaaacgtggtcagacgggatgtggagaagtggggccccttcgatctggtgtacggcagcacccaacccctgggcagctcttgtgaccggtgccctggctggtacatgtttcagttccaccggatcctgcagtacgccctgccgagacaggagtcccagcggccattcttttggattttcatggacaacttgctgctgaccgaggatgaccaggaaactaccactcggttcctgcagaccgaagccgtgaccctgcaggacgtgagaggccgggactaccagaacgccatgcgggtgtggtccaacatccctggactgaaaagcaagcacgcacctctgacccctaaagaagaggagtacctgcaggcccaggtgcggagcagaagcaagctggacgcccctaaggtggatctgctggtgaagaattgcctcctgcccctgagagagtacttcaagtatttcagccagaatagtctgcccctgggcggcccaagcagcggcgcccctcctcccagcggcggcagcccagccggctccccaacctctaccgaggagggcacctctgagtccgccacccccgagagcggccctggcacctccaccgagcccagcgagggcagcgcacccggcagccctgccggcagccccacctccacagaggagggaaccagcaccgagcccagcgaaggcagcgccccaggcaccagcaccgagcctagtgagggcggctctggcggcggcagcgcccaggagattaaacggatcaacaagatcagaagaagacttgtgaaagacagcaacaccaagaaggccggcaagacaggccccatgaaaaccctgctggttagagtgatgacacccgatctgagagagcggctggaaaacctgagaaagaagcctgaaaatatcccccagcccatcagcaatacatctagagccaacctgaataagctgctgaccgattacaccgaaatgaagaaggcgatcctgcatgtgtactgggaagagttccagaaggaccctgtgggcctgatgagccgggtggcccagcctgccagcaagaagatcgatcagaacaagctgaaacctgagatggacgagaagggcaacctgaccaccgccggctttgcctgctctcagtgtggccagcccctgttcgtgtacaagctggagcaggtgtctgagaagggcaaggcttacaccaactacttcggacggtgcaatgtggccgagcacgaaaagctgatcctgctggcccagctgaagcccgagaaggatagcgacgaagccgtgacatatagcctgggaaagtttgggcagagggccctggatttctacagcattcatgtgaccaaggagtccacccaccccgtgaagcccctggcccagatcgccggaaacagatacgcctccggacctgtgggaaaggccctgagcgacgcatgtatgggcacaatcgcctccttcctgtctaagtaccaggacatcatcatcgaacaccagaaggtggtgaagggcaaccagaagagactggagagcctgcgggagctggccggcaaggaaaacctggaataccctagcgtgaccctgccacctcagcctcacaccaaggagggcgttgatgcctacaacgaagtgatcgcccgggtgcgaatgtgggtgaacctgaacctgtggcagaagctgaagctaagcagagatgatgccaagcctctgctgagactgaagggattcccttcctttcctctggtcgagagacaggccaacgaagtggactggtgggacatggtgtgtaacgtgaagaagctgatcaacgagaaaaaggaggatggcaaggtgttttggcagaatctggctggctacaagagacaggaagccctgagaccatacctgagcagcgaggaagatcggaagaagggaaagaaattcgctcggtaccagctgggcgacctgctgctgcacctggaaaagaagcacggcgaggactggggaaaggtgtacgacgaggcctgggagcggattgacaagaaagtggaaggcctgagcaagcacatcaagctggaagaggaacggagaagcgaggacgcccagagcaaggccgccctgaccgactggctgcgggctaaggccagcttcgtgatcgagggcctgaaggaggccgacaaggacgagttctgcagatgcgagctgaagctgcagaagtggtacggggacctgcggggaaagcccttcgccatcgaagccgagaacagcatcctggacatcagcggcttcagcaagcagtacaactgtgccttcatctggcagaaggacggcgtgaagaagctgaacctgtacctgatcatcaactacttcaagggcggcaagctgcggttcaagaagatcaaacctgaagccttcgaagccaacagattctacaccgtgatcaacaaaaagagcggcgagatcgtgcccatggaggtgaacttcaacttcgacgaccccaacctgatcatcctgcctctggcctttggcaagagacagggcagagaattcatctggaacgacctgctgtccctggaaaccggcagcctgaagctggccaacggaagagtgatcgagaagacactgtacaacagaagaacccggcaggatgagcctgccctgttcgtggccctgaccttcgagcggcgggaggtcctggactcctccaatatcaaaccaatgaacctgatcggcgtggcaagaggcgaaaacatccccgccgtgatcgccctgaccgaccccgagggctgcccactgagccggtttaaggatagcctgggaaacccaacccacatcctgagaatcggcgagagctataaggagaagcagcggaccatccaggccaagaaggaggtggagcagcggagagccggcggctacagccggaagtacgccagcaaagccaagaatctggcagacgatatggtgagaaacaccgctagagatctgctgtactacgccgtgacccaggatgccatgctgatcttcgccaacctgagccggggcttcggccggcagggcaagcggaccttcatggccgagagacagtacacacggatggaggactggctgaccgccaagctggcctacgagggcctgagcaagacctacctgtccaagacactggcccagtacacctccaagacatgcagcaactgtgggtttaccatcaccagcgccgactacgacagggtgctggagaagctgaagaagacagcaacaggctggatgaccacaattaacggcaaggagctgaaggtggagggccagattacctactacaacagatacaagagacagaacgtagtcaaggacctgtccgtcgagctggatagactgagcgaagaatctgtgaacaacgacatctcctcctggacaaagggcagaagcggagaagctctgagcctcctgaagaaaagattctcccatagacccgtgcaggagaagttcgtgtgcctgaactgcggcttcgagacacacgcagccgagcaagccgccctgaacatcgccagatcctggctgttcctgcggagccaggagtacaagaaataccagacaaacaagacaaccggcaacaccgataagagagccttcgtcgagacctggcagtccttttaccggaagaagcttaaggaggtgtggaaacctgccgtgcggtctggcggatctggcggaggctccacaagcgcccaggagcccgtgaccttcaacgacgtggccgtggacttcacccaggaggagtggggccagctggacctggtgcagaggaccctgtacagggacgtgatgctggagacctacggccacctgctgagcgtgggcaaccagatcaccaagcccgaggtgatcagcctgctggagcagggcgaggagccctggagcatggagcccgcctaccccctgcagggcacctgccccgcccccgagatcaccagccccaagaaaaagagaaaagtctaagctgccttctgcggggcttgccttctggccatgcccttcttctctcccttgcacctgtacctcttggtctttgaataaagcctgagtaggaaggctagcaaaaaaaaaaaaaaaaaaaaaaaaaaaaaaaaaaaaaaaaaaaaaaaaaaaaaaaaaaaaaaaaaaaaaaaaaaaaaaaa

SEQ ID NO: 3401 - RNA, 5419 nt, synthetic construct
  source 1..5419: mol_type = other RNA
aggaaataagagagaaaagaagagtaagaagaaatataagagccaccatggcccctaagaagaagcgtaaagtgagccgggtgaacggcagcggcagcggcggcggcatgaaccacgaccaggagttcgacccccctaaggtgtaccctcccgtccccgccgagaagagaaagcccatccgggtcctgagcctgttcgatggcatcgccaccggtctgctggtgctgaaggacctgggcatccaggtggataggtacattgcctccgaggtgtgcgaggactccatcaccgtgggaatggtgcgtcatcagggcaagatcatgtacgtgggcgacgtgcggagcgtgacacagaagcatatccaggagtggggccctttcgacctggtgatcggcggcagcccttgcaatgacctgagcatcgtgaacccagcccggaagggcctgtacgagggaaccggcagactgttcttcgagttttacagactgctgcacgacgcccggcctaaggaaggcgacgaccggcccttcttttggctgttcgagaatgtggtggccatgggagtcagcgacaagcgggatattagccggttcctggagagcaaccccgtgatgatcgatgccaaggaagtgagcgccgcccaccgggccagatacttctggggcaatctgcctggcatgaacagacccctggccagcaccgtgaacgacaagctggagctgcaggagtgcctggagcacggccggatcgccaagttcagcaaggtgagaaccatcaccacccgaagcaacagcatcaaacaaggcaaggaccagcactttcctgtgttcatgaacgagaaggaggacatcctgtggtgtaccgagatggagagagtgttcgggttcccagtccactacacagatgtcagcaacatgtctagactggccagacagagactgctgggaagaagctggtccgtccctgtgatcagacacctgttcgcccctctgaaggagtacttcgcctgcgtgagcagcggcaacagcaacgccaacagccggggccccagcttctctagcggcctggtgccactgtccctgagagggagccacatgggccccatggagatctacaaaaccgtgagcgcctggaagcggcagcctgtgcgcgtgctgagcctgtttcggaatatcgataaagtcctgaaaagcctgggattcctggagagcggctctggctccggcggtggcaccctgaagtacgtggaggatgtgacaaacgtggtcagacgggatgtggagaagtggggccccttcgatctggtgtacggcagcacccaacccctgggcagctcttgtgaccggtgccctggctggtacatgtttcagttccaccggatcctgcagtacgccctgccgagacaggagtcccagcggccattcttttggattttcatggacaacttgctgctgaccgaggatgaccaggaaactaccactcggttcctgcagaccgaagccgtgaccctgcaggacgtgagaggccgggactaccagaacgccatgcgggtgtggtccaacatccctggactgaaaagcaagcacgcacctctgacccctaaagaagaggagtacctgcaggcccaggtgcggagcagaagcaagctggacgcccctaaggtggatctgctggtgaagaattgcctcctgcccctgagagagtacttcaagtatttcagccagaatagtctgcccctgggcggcccaagcagcggcgcccctcctcccagcggcggcagcccagccggctccccaacctctaccgaggagggcacctctgagtccgccacccccgagagcggccctggcacctccaccgagcccagcgagggcagcgcacccggcagccctgccggcagccccacctccacagaggagggaaccagcaccgagcccagcgaaggcagcgccccaggcaccagcaccgagcctagtgagggcggctctggcggcggcagcgcccaggagattaaacggatcaacaagatcagaagaagacttgtgaaagacagcaacaccaagaaggccggcaagacaggccccatgaaaaccctgctggttagagtgatgacacccgatctgagagagcggctggaaaacctgagaaagaagcctgaaaatatcccccagcccatcagcaatacatctagagccaacctgaataagctgctgaccgattacaccgaaatgaagaaggcgatcctgcatgtgtactgggaagagttccagaaggaccctgtgggcctgatgagccgggtggcccagcctgccagcaagaagatcgatcagaacaagctgaaacctgagatggacgagaagggcaacctgaccaccgccggctttgcctgctctcagtgtggccagcccctgttcgtgtacaagctggagcaggtgtctgagaagggcaaggcttacaccaactacttcggacggtgcaatgtggccgagcacgaaaagctgatcctgctggcccagctgaagcccgagaaggatagcgacgaagccgtgacatatagcctgggaaagtttgggcagagggccctggatttctacagcattcatgtgaccaaggagtccacccaccccgtgaagcccctggcccagatcgccggaaacagatacgcctccggacctgtgggaaaggccctgagcgacgcatgtatgggcacaatcgcctccttcctgtctaagtaccaggacatcatcatcgaacaccagaaggtggtgaagggcaaccagaagagactggagagcctgcgggagctggccggcaaggaaaacctggaataccctagcgtgaccctgccacctcagcctcacaccaaggagggcgttgatgcctacaacgaagtgatcgcccgggtgcgaatgtgggtgaacctgaacctgtggcagaagctgaagctaagcagagatgatgccaagcctctgctgagactgaagggattcccttcctttcctctggtcgagagacaggccaacgaagtggactggtgggacatggtgtgtaacgtgaagaagctgatcaacgagaaaaaggaggatggcaaggtgttttggcagaatctggctggctacaagagacaggaagccctgagaccatacctgagcagcgaggaagatcggaagaagggaaagaaattcgctcggtaccagctgggcgacctgctgctgcacctggaaaagaagcacggcgaggactggggaaaggtgtacgacgaggcctgggagcggattgacaagaaagtggaaggcctgagcaagcacatcaagctggaagaggaacggagaagcgaggacgcccagagcaaggccgccctgaccgactggctgcgggctaaggccagcttcgtgatcgagggcctgaaggaggccgacaaggacgagttctgcagatgcgagctgaagctgcagaagtggtacggggacctgcggggaaagcccttcgccatcgaagccgagaacagcatcctggacatcagcggcttcagcaagcagtacaactgtgccttcatctggcagaaggacggcgtgaagaagctgaacctgtacctgatcatcaactacttcaagggcggcaagctgcggttcaagaagatcaaacctgaagccttcgaagccaacagattctacaccgtgatcaacaaaaagagcggcgagatcgtgcccatggaggtgaacttcaacttcgacgaccccaacctgatcatcctgcctctggcctttggcaagagacagggcagagaattcatctggaacgacctgctgtccctggaaaccggcagcctgaagctggccaacggaagagtgatcgagaagacactgtacaacagaagaacccggcaggatgagcctgccctgttcgtggccctgaccttcgagcggcgggaggtcctggactcctccaatatcaaaccaatgaacctgatcggcgtggcaagaggcgaaaacatccccgccgtgatcgccctgaccgaccccgagggctgcccactgagccggtttaaggatagcctgggaaacccaacccacatcctgagaatcggcgagagctataaggagaagcagcggaccatccaggccaagaaggaggtggagcagcggagagccggcggctacagccggaagtacgccagcaaagccaagaatctggcagacgatatggtgagaaacaccgctagagatctgctgtactacgccgtgacccaggatgccatgctgatcttcgccaacctgagccggggcttcggccggcagggcaagcggaccttcatggccgagagacagtacacacggatggaggactggctgaccgccaagctggcctacgagggcctgagcaagacctacctgtccaagacactggcccagtacacctccaagacatgcagcaactgtgggtttaccatcaccagcgccgactacgacagggtgctggagaagctgaagaagacagcaacaggctggatgaccacaattaacggcaaggagctgaaggtggagggccagattacctactacaacagatacaagagacagaacgtagtcaaggacctgtccgtcgagctggatagactgagcgaagaatctgtgaacaacgacatctcctcctggacaaagggcagaagcggagaagctctgagcctcctgaagaaaagattctcccatagacccgtgcaggagaagttcgtgtgcctgaactgcggcttcgagacacacgcagccgagcaagccgccctgaacatcgccagatcctggctgttcctgcggagccaggagtacaagaaataccagacaaacaagacaaccggcaacaccgataagagagccttcgtcgagacctggcagtccttttaccggaagaagcttaaggaggtgtggaaacctgccgtgcggtctggcggatctggcggaggctccacaagcaggcccagggccctgaagttcgccgacgtggccgtgtacttcagccccgaggagtggggctgcctgaggcccgcccagaggaccctgtacagggacgtgatgagggagacctacggccacctgggcgccctgggctgcgccggccccaagcccgccctgatcagctggctggagaggaacaccgacgactgggagcccgccgccctggacccccaggagtaccccaggggcgtgaccgtgcagaccagccccaagaaaaagagaaaagtctaagctgccttctgcggggcttgccttctggccatgcccttcttctctcccttgcacctgtacctcttggtctttgaataaagcctgagtaggaaggctagcaaaaaaaaaaaaaaaaaaaaaaaaaaaaaaaaaaaaaaaaaaaaaaaaaaaaaaaaaaaaaaaaaaaaaaaaaaaaaaaa

SEQ ID NO: 3402 - RNA, 5419 nt, synthetic construct
  source 1..5419: mol_type = other RNA
aggaaataagagagaaaagaagagtaagaagaaatataagagccaccatggcccctaagaagaagcgtaaagtgagccgggtgaacggcagcggcagcggcggcggcatgaaccacgaccaggagttcgacccccctaaggtgtaccctcccgtccccgccgagaagagaaagcccatccgggtcctgagcctgttcgatggcatcgccaccggtctgctggtgctgaaggacctgggcatccaggtggataggtacattgcctccgaggtgtgcgaggactccatcaccgtgggaatggtgcgtcatcagggcaagatcatgtacgtgggcgacgtgcggagcgtgacacagaagcatatccaggagtggggccctttcgacctggtgatcggcggcagcccttgcaatgacctgagcatcgtgaacccagcccggaagggcctgtacgagggaaccggcagactgttcttcgagttttacagactgctgcacgacgcccggcctaaggaaggcgacgaccggcccttcttttggctgttcgagaatgtggtggccatgggagtcagcgacaagcgggatattagccggttcctggagagcaaccccgtgatgatcgatgccaaggaagtgagcgccgcccaccgggccagatacttctggggcaatctgcctggcatgaacagacccctggccagcaccgtgaacgacaagctggagctgcaggagtgcctggagcacggccggatcgccaagttcagcaaggtgagaaccatcaccacccgaagcaacagcatcaaacaaggcaaggaccagcactttcctgtgttcatgaacgagaaggaggacatcctgtggtgtaccgagatggagagagtgttcgggttcccagtccactacacagatgtcagcaacatgtctagactggccagacagagactgctgggaagaagctggtccgtccctgtgatcagacacctgttcgcccctctgaaggagtacttcgcctgcgtgagcagcggcaacagcaacgccaacagccggggccccagcttctctagcggcctggtgccactgtccctgagagggagccacatgggccccatggagatctacaaaaccgtgagcgcctggaagcggcagcctgtgcgcgtgctgagcctgtttcggaatatcgataaagtcctgaaaagcctgggattcctggagagcggctctggctccggcggtggcaccctgaagtacgtggaggatgtgacaaacgtggtcagacgggatgtggagaagtggggccccttcgatctggtgtacggcagcacccaacccctgggcagctcttgtgaccggtgccctggctggtacatgtttcagttccaccggatcctgcagtacgccctgccgagacaggagtcccagcggccattcttttggattttcatggacaacttgctgctgaccgaggatgaccaggaaactaccactcggttcctgcagaccgaagccgtgaccctgcaggacgtgagaggccgggactaccagaacgccatgcgggtgtggtccaacatccctggactgaaaagcaagcacgcacctctgacccctaaagaagaggagtacctgcaggcccaggtgcggagcagaagcaagctggacgcccctaaggtggatctgctggtgaagaattgcctcctgcccctgagagagtacttcaagtatttcagccagaatagtctgcccctgggcggcccaagcagcggcgcccctcctcccagcggcggcagcccagccggctccccaacctctaccgaggagggcacctctgagtccgccacccccgagagcggccctggcacctccaccgagcccagcgagggcagcgcacccggcagccctgccggcagccccacctccacagaggagggaaccagcaccgagcccagcgaaggcagcgccccaggcaccagcaccgagcctagtgagggcggctctggcggcggcagcgcccaggagattaaacggatcaacaagatcagaagaagacttgtgaaagacagcaacaccaagaaggccggcaagacaggccccatgaaaaccctgctggttagagtgatgacacccgatctgagagagcggctggaaaacctgagaaagaagcctgaaaatatcccccagcccatcagcaatacatctagagccaacctgaataagctgctgaccgattacaccgaaatgaagaaggcgatcctgcatgtgtactgggaagagttccagaaggaccctgtgggcctgatgagccgggtggcccagcctgccagcaagaagatcgatcagaacaagctgaaacctgagatggacgagaagggcaacctgaccaccgccggctttgcctgctctcagtgtggccagcccctgttcgtgtacaagctggagcaggtgtctgagaagggcaaggcttacaccaactacttcggacggtgcaatgtggccgagcacgaaaagctgatcctgctggcccagctgaagcccgagaaggatagcgacgaagccgtgacatatagcctgggaaagtttgggcagagggccctggatttctacagcattcatgtgaccaaggagtccacccaccccgtgaagcccctggcccagatcgccggaaacagatacgcctccggacctgtgggaaaggccctgagcgacgcatgtatgggcacaatcgcctccttcctgtctaagtaccaggacatcatcatcgaacaccagaaggtggtgaagggcaaccagaagagactggagagcctgcgggagctggccggcaaggaaaacctggaataccctagcgtgaccctgccacctcagcctcacaccaaggagggcgttgatgcctacaacgaagtgatcgcccgggtgcgaatgtgggtgaacctgaacctgtggcagaagctgaagctaagcagagatgatgccaagcctctgctgagactgaagggattcccttcctttcctctggtcgagagacaggccaacgaagtggactggtgggacatggtgtgtaacgtgaagaagctgatcaacgagaaaaaggaggatggcaaggtgttttggcagaatctggctggctacaagagacaggaagccctgagaccatacctgagcagcgaggaagatcggaagaagggaaagaaattcgctcggtaccagctgggcgacctgctgctgcacctggaaaagaagcacggcgaggactggggaaaggtgtacgacgaggcctgggagcggattgacaagaaagtggaaggcctgagcaagcacatcaagctggaagaggaacggagaagcgaggacgcccagagcaaggccgccctgaccgactggctgcgggctaaggccagcttcgtgatcgagggcctgaaggaggccgacaaggacgagttctgcagatgcgagctgaagctgcagaagtggtacggggacctgcggggaaagcccttcgccatcgaagccgagaacagcatcctggacatcagcggcttcagcaagcagtacaactgtgccttcatctggcagaaggacggcgtgaagaagctgaacctgtacctgatcatcaactacttcaagggcggcaagctgcggttcaagaagatcaaacctgaagccttcgaagccaacagattctacaccgtgatcaacaaaaagagcggcgagatcgtgcccatggaggtgaacttcaacttcgacgaccccaacctgatcatcctgcctctggcctttggcaagagacagggcagagaattcatctggaacgacctgctgtccctggaaaccggcagcctgaagctggccaacggaagagtgatcgagaagacactgtacaacagaagaacccggcaggatgagcctgccctgttcgtggccctgaccttcgagcggcgggaggtcctggactcctccaatatcaaaccaatgaacctgatcggcgtggcaagaggcgaaaacatccccgccgtgatcgccctgaccgaccccgagggctgcccactgagccggtttaaggatagcctgggaaacccaacccacatcctgagaatcggcgagagctataaggagaagcagcggaccatccaggccaagaaggaggtggagcagcggagagccggcggctacagccggaagtacgccagcaaagccaagaatctggcagacgatatggtgagaaacaccgctagagatctgctgtactacgccgtgacccaggatgccatgctgatcttcgccaacctgagccggggcttcggccggcagggcaagcggaccttcatggccgagagacagtacacacggatggaggactggctgaccgccaagctggcctacgagggcctgagcaagacctacctgtccaagacactggcccagtacacctccaagacatgcagcaactgtgggtttaccatcaccagcgccgactacgacagggtgctggagaagctgaagaagacagcaacaggctggatgaccacaattaacggcaaggagctgaaggtggagggccagattacctactacaacagatacaagagacagaacgtagtcaaggacctgtccgtcgagctggatagactgagcgaagaatctgtgaacaacgacatctcctcctggacaaagggcagaagcggagaagctctgagcctcctgaagaaaagattctcccatagacccgtgcaggagaagttcgtgtgcctgaactgcggcttcgagacacacgcagccgagcaagccgccctgaacatcgccagatcctggctgttcctgcggagccaggagtacaagaaataccagacaaacaagacaaccggcaacaccgataagagagccttcgtcgagacctggcagtccttttaccggaagaagcttaaggaggtgtggaaacctgccgtgcggtctggcggatctggcggaggctccacaagcagccaggtgagcgtgaccttcgaggacgtggccgtgctgttcaccagggacgagtggaggaagctggcccccccccagaggaacctgtaccaggacgtgatgctggagaactacagcaacctggtgagcctgggcctgctgttccccaagcccaaggtgatcagcctgctgcagcagggcgaggacccctggaaggtggagaaggagaacctgggcggcagcagcctgggctggaagaacagcaccagccccaagaaaaagagaaaagtctaagctgccttctgcggggcttgccttctggccatgcccttcttctctcccttgcacctgtacctcttggtctttgaataaagcctgagtaggaaggctagcaaaaaaaaaaaaaaaaaaaaaaaaaaaaaaaaaaaaaaaaaaaaaaaaaaaaaaaaaaaaaaaaaaaaaaaaaaaaaaaa

SEQ ID NO: 3403 - RNA, 5419 nt, synthetic construct
  source 1..5419: mol_type = other RNA
aggaaataagagagaaaagaagagtaagaagaaatataagagccaccatggcccctaagaagaagcgtaaagtgagccgggtgaacggcagcggcagcggcggcggcatgaaccacgaccaggagttcgacccccctaaggtgtaccctcccgtccccgccgagaagagaaagcccatccgggtcctgagcctgttcgatggcatcgccaccggtctgctggtgctgaaggacctgggcatccaggtggataggtacattgcctccgaggtgtgcgaggactccatcaccgtgggaatggtgcgtcatcagggcaagatcatgtacgtgggcgacgtgcggagcgtgacacagaagcatatccaggagtggggccctttcgacctggtgatcggcggcagcccttgcaatgacctgagcatcgtgaacccagcccggaagggcctgtacgagggaaccggcagactgttcttcgagttttacagactgctgcacgacgcccggcctaaggaaggcgacgaccggcccttcttttggctgttcgagaatgtggtggccatgggagtcagcgacaagcgggatattagccggttcctggagagcaaccccgtgatgatcgatgccaaggaagtgagcgccgcccaccgggccagatacttctggggcaatctgcctggcatgaacagacccctggccagcaccgtgaacgacaagctggagctgcaggagtgcctggagcacggccggatcgccaagttcagcaaggtgagaaccatcaccacccgaagcaacagcatcaaacaaggcaaggaccagcactttcctgtgttcatgaacgagaaggaggacatcctgtggtgtaccgagatggagagagtgttcgggttcccagtccactacacagatgtcagcaacatgtctagactggccagacagagactgctgggaagaagctggtccgtccctgtgatcagacacctgttcgcccctctgaaggagtacttcgcctgcgtgagcagcggcaacagcaacgccaacagccggggccccagcttctctagcggcctggtgccactgtccctgagagggagccacatgggccccatggagatctacaaaaccgtgagcgcctggaagcggcagcctgtgcgcgtgctgagcctgtttcggaatatcgataaagtcctgaaaagcctgggattcctggagagcggctctggctccggcggtggcaccctgaagtacgtggaggatgtgacaaacgtggtcagacgggatgtggagaagtggggccccttcgatctggtgtacggcagcacccaacccctgggcagctcttgtgaccggtgccctggctggtacatgtttcagttccaccggatcctgcagtacgccctgccgagacaggagtcccagcggccattcttttggattttcatggacaacttgctgctgaccgaggatgaccaggaaactaccactcggttcctgcagaccgaagccgtgaccctgcaggacgtgagaggccgggactaccagaacgccatgcgggtgtggtccaacatccctggactgaaaagcaagcacgcacctctgacccctaaagaagaggagtacctgcaggcccaggtgcggagcagaagcaagctggacgcccctaaggtggatctgctggtgaagaattgcctcctgcccctgagagagtacttcaagtatttcagccagaatagtctgcccctgggcggcccaagcagcggcgcccctcctcccagcggcggcagcccagccggctccccaacctctaccgaggagggcacctctgagtccgccacccccgagagcggccctggcacctccaccgagcccagcgagggcagcgcacccggcagccctgccggcagccccacctccacagaggagggaaccagcaccgagcccagcgaaggcagcgccccaggcaccagcaccgagcctagtgagggcggctctggcggcggcagcgcccaggagattaaacggatcaacaagatcagaagaagacttgtgaaagacagcaacaccaagaaggccggcaagacaggccccatgaaaaccctgctggttagagtgatgacacccgatctgagagagcggctggaaaacctgagaaagaagcctgaaaatatcccccagcccatcagcaatacatctagagccaacctgaataagctgctgaccgattacaccgaaatgaagaaggcgatcctgcatgtgtactgggaagagttccagaaggaccctgtgggcctgatgagccgggtggcccagcctgccagcaagaagatcgatcagaacaagctgaaacctgagatggacgagaagggcaacctgaccaccgccggctttgcctgctctcagtgtggccagcccctgttcgtgtacaagctggagcaggtgtctgagaagggcaaggcttacaccaactacttcggacggtgcaatgtggccgagcacgaaaagctgatcctgctggcccagctgaagcccgagaaggatagcgacgaagccgtgacatatagcctgggaaagtttgggcagagggccctggatttctacagcattcatgtgaccaaggagtccacccaccccgtgaagcccctggcccagatcgccggaaacagatacgcctccggacctgtgggaaaggccctgagcgacgcatgtatgggcacaatcgcctccttcctgtctaagtaccaggacatcatcatcgaacaccagaaggtggtgaagggcaaccagaagagactggagagcctgcgggagctggccggcaaggaaaacctggaataccctagcgtgaccctgccacctcagcctcacaccaaggagggcgttgatgcctacaacgaagtgatcgcccgggtgcgaatgtgggtgaacctgaacctgtggcagaagctgaagctaagcagagatgatgccaagcctctgctgagactgaagggattcccttcctttcctctggtcgagagacaggccaacgaagtggactggtgggacatggtgtgtaacgtgaagaagctgatcaacgagaaaaaggaggatggcaaggtgttttggcagaatctggctggctacaagagacaggaagccctgagaccatacctgagcagcgaggaagatcggaagaagggaaagaaattcgctcggtaccagctgggcgacctgctgctgcacctggaaaagaagcacggcgaggactggggaaaggtgtacgacgaggcctgggagcggattgacaagaaagtggaaggcctgagcaagcacatcaagctggaagaggaacggagaagcgaggacgcccagagcaaggccgccctgaccgactggctgcgggctaaggccagcttcgtgatcgagggcctgaaggaggccgacaaggacgagttctgcagatgcgagctgaagctgcagaagtggtacggggacctgcggggaaagcccttcgccatcgaagccgagaacagcatcctggacatcagcggcttcagcaagcagtacaactgtgccttcatctggcagaaggacggcgtgaagaagctgaacctgtacctgatcatcaactacttcaagggcggcaagctgcggttcaagaagatcaaacctgaagccttcgaagccaacagattctacaccgtgatcaacaaaaagagcggcgagatcgtgcccatggaggtgaacttcaacttcgacgaccccaacctgatcatcctgcctctggcctttggcaagagacagggcagagaattcatctggaacgacctgctgtccctggaaaccggcagcctgaagctggccaacggaagagtgatcgagaagacactgtacaacagaagaacccggcaggatgagcctgccctgttcgtggccctgaccttcgagcggcgggaggtcctggactcctccaatatcaaaccaatgaacctgatcggcgtggcaagaggcgaaaacatccccgccgtgatcgccctgaccgaccccgagggctgcccactgagccggtttaaggatagcctgggaaacccaacccacatcctgagaatcggcgagagctataaggagaagcagcggaccatccaggccaagaaggaggtggagcagcggagagccggcggctacagccggaagtacgccagcaaagccaagaatctggcagacgatatggtgagaaacaccgctagagatctgctgtactacgccgtgacccaggatgccatgctgatcttcgccaacctgagccggggcttcggccggcagggcaagcggaccttcatggccgagagacagtacacacggatggaggactggctgaccgccaagctggcctacgagggcctgagcaagacctacctgtccaagacactggcccagtacacctccaagacatgcagcaactgtgggtttaccatcaccagcgccgactacgacagggtgctggagaagctgaagaagacagcaacaggctggatgaccacaattaacggcaaggagctgaaggtggagggccagattacctactacaacagatacaagagacagaacgtagtcaaggacctgtccgtcgagctggatagactgagcgaagaatctgtgaacaacgacatctcctcctggacaaagggcagaagcggagaagctctgagcctcctgaagaaaagattctcccatagacccgtgcaggagaagttcgtgtgcctgaactgcggcttcgagacacacgcagccgagcaagccgccctgaacatcgccagatcctggctgttcctgcggagccaggagtacaagaaataccagacaaacaagacaaccggcaacaccgataagagagccttcgtcgagacctggcagtccttttaccggaagaagcttaaggaggtgtggaaacctgccgtgcggtctggcggatctggcggaggctccacaagcatggaggagatgctgagcttcagggacgtggccatcgacttcagcgccgaggagtgggagtgcctggacctggcccagtggaacctgtacagggacgtgatgctggagaactacagcaacctggtgttcctgggcctggccagctgcaagccctacctggtgaccttcctggagcagaggcagggccccagcgacgtgaagaggcaggccgccgcccccgtgcaccccggcggcaccccctacaccagccccaagaaaaagagaaaagtctaagctgccttctgcggggcttgccttctggccatgcccttcttctctcccttgcacctgtacctcttggtctttgaataaagcctgagtaggaaggctagcaaaaaaaaaaaaaaaaaaaaaaaaaaaaaaaaaaaaaaaaaaaaaaaaaaaaaaaaaaaaaaaaaaaaaaaaaaaaaaaa

SEQ ID NO: 3404 - RNA, 5419 nt, synthetic construct
  source 1..5419: mol_type = other RNA
aggaaataagagagaaaagaagagtaagaagaaatataagagccaccatggcccctaagaagaagcgtaaagtgagccgggtgaacggcagcggcagcggcggcggcatgaaccacgaccaggagttcgacccccctaaggtgtaccctcccgtccccgccgagaagagaaagcccatccgggtcctgagcctgttcgatggcatcgccaccggtctgctggtgctgaaggacctgggcatccaggtggataggtacattgcctccgaggtgtgcgaggactccatcaccgtgggaatggtgcgtcatcagggcaagatcatgtacgtgggcgacgtgcggagcgtgacacagaagcatatccaggagtggggccctttcgacctggtgatcggcggcagcccttgcaatgacctgagcatcgtgaacccagcccggaagggcctgtacgagggaaccggcagactgttcttcgagttttacagactgctgcacgacgcccggcctaaggaaggcgacgaccggcccttcttttggctgttcgagaatgtggtggccatgggagtcagcgacaagcgggatattagccggttcctggagagcaaccccgtgatgatcgatgccaaggaagtgagcgccgcccaccgggccagatacttctggggcaatctgcctggcatgaacagacccctggccagcaccgtgaacgacaagctggagctgcaggagtgcctggagcacggccggatcgccaagttcagcaaggtgagaaccatcaccacccgaagcaacagcatcaaacaaggcaaggaccagcactttcctgtgttcatgaacgagaaggaggacatcctgtggtgtaccgagatggagagagtgttcgggttcccagtccactacacagatgtcagcaacatgtctagactggccagacagagactgctgggaagaagctggtccgtccctgtgatcagacacctgttcgcccctctgaaggagtacttcgcctgcgtgagcagcggcaacagcaacgccaacagccggggccccagcttctctagcggcctggtgccactgtccctgagagggagccacatgggccccatggagatctacaaaaccgtgagcgcctggaagcggcagcctgtgcgcgtgctgagcctgtttcggaatatcgataaagtcctgaaaagcctgggattcctggagagcggctctggctccggcggtggcaccctgaagtacgtggaggatgtgacaaacgtggtcagacgggatgtggagaagtggggccccttcgatctggtgtacggcagcacccaacccctgggcagctcttgtgaccggtgccctggctggtacatgtttcagttccaccggatcctgcagtacgccctgccgagacaggagtcccagcggccattcttttggattttcatggacaacttgctgctgaccgaggatgaccaggaaactaccactcggttcctgcagaccgaagccgtgaccctgcaggacgtgagaggccgggactaccagaacgccatgcgggtgtggtccaacatccctggactgaaaagcaagcacgcacctctgacccctaaagaagaggagtacctgcaggcccaggtgcggagcagaagcaagctggacgcccctaaggtggatctgctggtgaagaattgcctcctgcccctgagagagtacttcaagtatttcagccagaatagtctgcccctgggcggcccaagcagcggcgcccctcctcccagcggcggcagcccagccggctccccaacctctaccgaggagggcacctctgagtccgccacccccgagagcggccctggcacctccaccgagcccagcgagggcagcgcacccggcagccctgccggcagccccacctccacagaggagggaaccagcaccgagcccagcgaaggcagcgccccaggcaccagcaccgagcctagtgagggcggctctggcggcggcagcgcccaggagattaaacggatcaacaagatcagaagaagacttgtgaaagacagcaacaccaagaaggccggcaagacaggccccatgaaaaccctgctggttagagtgatgacacccgatctgagagagcggctggaaaacctgagaaagaagcctgaaaatatcccccagcccatcagcaatacatctagagccaacctgaataagctgctgaccgattacaccgaaatgaagaaggcgatcctgcatgtgtactgggaagagttccagaaggaccctgtgggcctgatgagccgggtggcccagcctgccagcaagaagatcgatcagaacaagctgaaacctgagatggacgagaagggcaacctgaccaccgccggctttgcctgctctcagtgtggccagcccctgttcgtgtacaagctggagcaggtgtctgagaagggcaaggcttacaccaactacttcggacggtgcaatgtggccgagcacgaaaagctgatcctgctggcccagctgaagcccgagaaggatagcgacgaagccgtgacatatagcctgggaaagtttgggcagagggccctggatttctacagcattcatgtgaccaaggagtccacccaccccgtgaagcccctggcccagatcgccggaaacagatacgcctccggacctgtgggaaaggccctgagcgacgcatgtatgggcacaatcgcctccttcctgtctaagtaccaggacatcatcatcgaacaccagaaggtggtgaagggcaaccagaagagactggagagcctgcgggagctggccggcaaggaaaacctggaataccctagcgtgaccctgccacctcagcctcacaccaaggagggcgttgatgcctacaacgaagtgatcgcccgggtgcgaatgtgggtgaacctgaacctgtggcagaagctgaagctaagcagagatgatgccaagcctctgctgagactgaagggattcccttcctttcctctggtcgagagacaggccaacgaagtggactggtgggacatggtgtgtaacgtgaagaagctgatcaacgagaaaaaggaggatggcaaggtgttttggcagaatctggctggctacaagagacaggaagccctgagaccatacctgagcagcgaggaagatcggaagaagggaaagaaattcgctcggtaccagctgggcgacctgctgctgcacctggaaaagaagcacggcgaggactggggaaaggtgtacgacgaggcctgggagcggattgacaagaaagtggaaggcctgagcaagcacatcaagctggaagaggaacggagaagcgaggacgcccagagcaaggccgccctgaccgactggctgcgggctaaggccagcttcgtgatcgagggcctgaaggaggccgacaaggacgagttctgcagatgcgagctgaagctgcagaagtggtacggggacctgcggggaaagcccttcgccatcgaagccgagaacagcatcctggacatcagcggcttcagcaagcagtacaactgtgccttcatctggcagaaggacggcgtgaagaagctgaacctgtacctgatcatcaactacttcaagggcggcaagctgcggttcaagaagatcaaacctgaagccttcgaagccaacagattctacaccgtgatcaacaaaaagagcggcgagatcgtgcccatggaggtgaacttcaacttcgacgaccccaacctgatcatcctgcctctggcctttggcaagagacagggcagagaattcatctggaacgacctgctgtccctggaaaccggcagcctgaagctggccaacggaagagtgatcgagaagacactgtacaacagaagaacccggcaggatgagcctgccctgttcgtggccctgaccttcgagcggcgggaggtcctggactcctccaatatcaaaccaatgaacctgatcggcgtggcaagaggcgaaaacatccccgccgtgatcgccctgaccgaccccgagggctgcccactgagccggtttaaggatagcctgggaaacccaacccacatcctgagaatcggcgagagctataaggagaagcagcggaccatccaggccaagaaggaggtggagcagcggagagccggcggctacagccggaagtacgccagcaaagccaagaatctggcagacgatatggtgagaaacaccgctagagatctgctgtactacgccgtgacccaggatgccatgctgatcttcgccaacctgagccggggcttcggccggcagggcaagcggaccttcatggccgagagacagtacacacggatggaggactggctgaccgccaagctggcctacgagggcctgagcaagacctacctgtccaagacactggcccagtacacctccaagacatgcagcaactgtgggtttaccatcaccagcgccgactacgacagggtgctggagaagctgaagaagacagcaacaggctggatgaccacaattaacggcaaggagctgaaggtggagggccagattacctactacaacagatacaagagacagaacgtagtcaaggacctgtccgtcgagctggatagactgagcgaagaatctgtgaacaacgacatctcctcctggacaaagggcagaagcggagaagctctgagcctcctgaagaaaagattctcccatagacccgtgcaggagaagttcgtgtgcctgaactgcggcttcgagacacacgcagccgagcaagccgccctgaacatcgccagatcctggctgttcctgcggagccaggagtacaagaaataccagacaaacaagacaaccggcaacaccgataagagagccttcgtcgagacctggcagtccttttaccggaagaagcttaaggaggtgtggaaacctgccgtgcggtctggcggatctggcggaggctccacaagcgcccagggctacgtgaccttcgaggacgtggccgtgtacttcagccaggaggagtggaggctgctggacgaggcccagaagctgctgtacaggaacgtgatgctggagaacttcagcctgctggccagcctgggcctggccagcagcaagacccacgagatcacccagctggagagctgggaggagcccttcatgcccgcctgggaggtggtgaccagcgccacccccaggggcacctggtggaccagccccaagaaaaagagaaaagtctaagctgccttctgcggggcttgccttctggccatgcccttcttctctcccttgcacctgtacctcttggtctttgaataaagcctgagtaggaaggctagcaaaaaaaaaaaaaaaaaaaaaaaaaaaaaaaaaaaaaaaaaaaaaaaaaaaaaaaaaaaaaaaaaaaaaaaaaaaaaaaa

SEQ ID NO: 3405 - RNA, 5419 nt, synthetic construct
  source 1..5419: mol_type = other RNA
aggaaataagagagaaaagaagagtaagaagaaatataagagccaccatggcccctaagaagaagcgtaaagtgagccgggtgaacggcagcggcagcggcggcggcatgaaccacgaccaggagttcgacccccctaaggtgtaccctcccgtccccgccgagaagagaaagcccatccgggtcctgagcctgttcgatggcatcgccaccggtctgctggtgctgaaggacctgggcatccaggtggataggtacattgcctccgaggtgtgcgaggactccatcaccgtgggaatggtgcgtcatcagggcaagatcatgtacgtgggcgacgtgcggagcgtgacacagaagcatatccaggagtggggccctttcgacctggtgatcggcggcagcccttgcaatgacctgagcatcgtgaacccagcccggaagggcctgtacgagggaaccggcagactgttcttcgagttttacagactgctgcacgacgcccggcctaaggaaggcgacgaccggcccttcttttggctgttcgagaatgtggtggccatgggagtcagcgacaagcgggatattagccggttcctggagagcaaccccgtgatgatcgatgccaaggaagtgagcgccgcccaccgggccagatacttctggggcaatctgcctggcatgaacagacccctggccagcaccgtgaacgacaagctggagctgcaggagtgcctggagcacggccggatcgccaagttcagcaaggtgagaaccatcaccacccgaagcaacagcatcaaacaaggcaaggaccagcactttcctgtgttcatgaacgagaaggaggacatcctgtggtgtaccgagatggagagagtgttcgggttcccagtccactacacagatgtcagcaacatgtctagactggccagacagagactgctgggaagaagctggtccgtccctgtgatcagacacctgttcgcccctctgaaggagtacttcgcctgcgtgagcagcggcaacagcaacgccaacagccggggccccagcttctctagcggcctggtgccactgtccctgagagggagccacatgggccccatggagatctacaaaaccgtgagcgcctggaagcggcagcctgtgcgcgtgctgagcctgtttcggaatatcgataaagtcctgaaaagcctgggattcctggagagcggctctggctccggcggtggcaccctgaagtacgtggaggatgtgacaaacgtggtcagacgggatgtggagaagtggggccccttcgatctggtgtacggcagcacccaacccctgggcagctcttgtgaccggtgccctggctggtacatgtttcagttccaccggatcctgcagtacgccctgccgagacaggagtcccagcggccattcttttggattttcatggacaacttgctgctgaccgaggatgaccaggaaactaccactcggttcctgcagaccgaagccgtgaccctgcaggacgtgagaggccgggactaccagaacgccatgcgggtgtggtccaacatccctggactgaaaagcaagcacgcacctctgacccctaaagaagaggagtacctgcaggcccaggtgcggagcagaagcaagctggacgcccctaaggtggatctgctggtgaagaattgcctcctgcccctgagagagtacttcaagtatttcagccagaatagtctgcccctgggcggcccaagcagcggcgcccctcctcccagcggcggcagcccagccggctccccaacctctaccgaggagggcacctctgagtccgccacccccgagagcggccctggcacctccaccgagcccagcgagggcagcgcacccggcagccctgccggcagccccacctccacagaggagggaaccagcaccgagcccagcgaaggcagcgccccaggcaccagcaccgagcctagtgagggcggctctggcggcggcagcgcccaggagattaaacggatcaacaagatcagaagaagacttgtgaaagacagcaacaccaagaaggccggcaagacaggccccatgaaaaccctgctggttagagtgatgacacccgatctgagagagcggctggaaaacctgagaaagaagcctgaaaatatcccccagcccatcagcaatacatctagagccaacctgaataagctgctgaccgattacaccgaaatgaagaaggcgatcctgcatgtgtactgggaagagttccagaaggaccctgtgggcctgatgagccgggtggcccagcctgccagcaagaagatcgatcagaacaagctgaaacctgagatggacgagaagggcaacctgaccaccgccggctttgcctgctctcagtgtggccagcccctgttcgtgtacaagctggagcaggtgtctgagaagggcaaggcttacaccaactacttcggacggtgcaatgtggccgagcacgaaaagctgatcctgctggcccagctgaagcccgagaaggatagcgacgaagccgtgacatatagcctgggaaagtttgggcagagggccctggatttctacagcattcatgtgaccaaggagtccacccaccccgtgaagcccctggcccagatcgccggaaacagatacgcctccggacctgtgggaaaggccctgagcgacgcatgtatgggcacaatcgcctccttcctgtctaagtaccaggacatcatcatcgaacaccagaaggtggtgaagggcaaccagaagagactggagagcctgcgggagctggccggcaaggaaaacctggaataccctagcgtgaccctgccacctcagcctcacaccaaggagggcgttgatgcctacaacgaagtgatcgcccgggtgcgaatgtgggtgaacctgaacctgtggcagaagctgaagctaagcagagatgatgccaagcctctgctgagactgaagggattcccttcctttcctctggtcgagagacaggccaacgaagtggactggtgggacatggtgtgtaacgtgaagaagctgatcaacgagaaaaaggaggatggcaaggtgttttggcagaatctggctggctacaagagacaggaagccctgagaccatacctgagcagcgaggaagatcggaagaagggaaagaaattcgctcggtaccagctgggcgacctgctgctgcacctggaaaagaagcacggcgaggactggggaaaggtgtacgacgaggcctgggagcggattgacaagaaagtggaaggcctgagcaagcacatcaagctggaagaggaacggagaagcgaggacgcccagagcaaggccgccctgaccgactggctgcgggctaaggccagcttcgtgatcgagggcctgaaggaggccgacaaggacgagttctgcagatgcgagctgaagctgcagaagtggtacggggacctgcggggaaagcccttcgccatcgaagccgagaacagcatcctggacatcagcggcttcagcaagcagtacaactgtgccttcatctggcagaaggacggcgtgaagaagctgaacctgtacctgatcatcaactacttcaagggcggcaagctgcggttcaagaagatcaaacctgaagccttcgaagccaacagattctacaccgtgatcaacaaaaagagcggcgagatcgtgcccatggaggtgaacttcaacttcgacgaccccaacctgatcatcctgcctctggcctttggcaagagacagggcagagaattcatctggaacgacctgctgtccctggaaaccggcagcctgaagctggccaacggaagagtgatcgagaagacactgtacaacagaagaacccggcaggatgagcctgccctgttcgtggccctgaccttcgagcggcgggaggtcctggactcctccaatatcaaaccaatgaacctgatcggcgtggcaagaggcgaaaacatccccgccgtgatcgccctgaccgaccccgagggctgcccactgagccggtttaaggatagcctgggaaacccaacccacatcctgagaatcggcgagagctataaggagaagcagcggaccatccaggccaagaaggaggtggagcagcggagagccggcggctacagccggaagtacgccagcaaagccaagaatctggcagacgatatggtgagaaacaccgctagagatctgctgtactacgccgtgacccaggatgccatgctgatcttcgccaacctgagccggggcttcggccggcagggcaagcggaccttcatggccgagagacagtacacacggatggaggactggctgaccgccaagctggcctacgagggcctgagcaagacctacctgtccaagacactggcccagtacacctccaagacatgcagcaactgtgggtttaccatcaccagcgccgactacgacagggtgctggagaagctgaagaagacagcaacaggctggatgaccacaattaacggcaaggagctgaaggtggagggccagattacctactacaacagatacaagagacagaacgtagtcaaggacctgtccgtcgagctggatagactgagcgaagaatctgtgaacaacgacatctcctcctggacaaagggcagaagcggagaagctctgagcctcctgaagaaaagattctcccatagacccgtgcaggagaagttcgtgtgcctgaactgcggcttcgagacacacgcagccgagcaagccgccctgaacatcgccagatcctggctgttcctgcggagccaggagtacaagaaataccagacaaacaagacaaccggcaacaccgataagagagccttcgtcgagacctggcagtccttttaccggaagaagcttaaggaggtgtggaaacctgccgtgcggtctggcggatctggcggaggctccacaagcgagcccgtgagcttcgccgaggtggccgtgtacttcagcagggaggagtgggccctgctggaccccgcccagagggccctgtacagggacgtgatgctggagacctaccagtgcgtggccagcctggtgaccgagacccccgtgcccgcccccaagcccgtgctgatcagcctgctggagggcaggaaggagccctggatccccgacatgaggagccccgaggccatgcccggcgacctgagcaccagccccaagaaaaagagaaaagtctaagctgccttctgcggggcttgccttctggccatgcccttcttctctcccttgcacctgtacctcttggtctttgaataaagcctgagtaggaaggctagcaaaaaaaaaaaaaaaaaaaaaaaaaaaaaaaaaaaaaaaaaaaaaaaaaaaaaaaaaaaaaaaaaaaaaaaaaaaaaaaa

SEQ ID NO: 3406 - RNA, 5419 nt, synthetic construct
  source 1..5419: mol_type = other RNA
aggaaataagagagaaaagaagagtaagaagaaatataagagccaccatggcccctaagaagaagcgtaaagtgagccgggtgaacggcagcggcagcggcggcggcatgaaccacgaccaggagttcgacccccctaaggtgtaccctcccgtccccgccgagaagagaaagcccatccgggtcctgagcctgttcgatggcatcgccaccggtctgctggtgctgaaggacctgggcatccaggtggataggtacattgcctccgaggtgtgcgaggactccatcaccgtgggaatggtgcgtcatcagggcaagatcatgtacgtgggcgacgtgcggagcgtgacacagaagcatatccaggagtggggccctttcgacctggtgatcggcggcagcccttgcaatgacctgagcatcgtgaacccagcccggaagggcctgtacgagggaaccggcagactgttcttcgagttttacagactgctgcacgacgcccggcctaaggaaggcgacgaccggcccttcttttggctgttcgagaatgtggtggccatgggagtcagcgacaagcgggatattagccggttcctggagagcaaccccgtgatgatcgatgccaaggaagtgagcgccgcccaccgggccagatacttctggggcaatctgcctggcatgaacagacccctggccagcaccgtgaacgacaagctggagctgcaggagtgcctggagcacggccggatcgccaagttcagcaaggtgagaaccatcaccacccgaagcaacagcatcaaacaaggcaaggaccagcactttcctgtgttcatgaacgagaaggaggacatcctgtggtgtaccgagatggagagagtgttcgggttcccagtccactacacagatgtcagcaacatgtctagactggccagacagagactgctgggaagaagctggtccgtccctgtgatcagacacctgttcgcccctctgaaggagtacttcgcctgcgtgagcagcggcaacagcaacgccaacagccggggccccagcttctctagcggcctggtgccactgtccctgagagggagccacatgggccccatggagatctacaaaaccgtgagcgcctggaagcggcagcctgtgcgcgtgctgagcctgtttcggaatatcgataaagtcctgaaaagcctgggattcctggagagcggctctggctccggcggtggcaccctgaagtacgtggaggatgtgacaaacgtggtcagacgggatgtggagaagtggggccccttcgatctggtgtacggcagcacccaacccctgggcagctcttgtgaccggtgccctggctggtacatgtttcagttccaccggatcctgcagtacgccctgccgagacaggagtcccagcggccattcttttggattttcatggacaacttgctgctgaccgaggatgaccaggaaactaccactcggttcctgcagaccgaagccgtgaccctgcaggacgtgagaggccgggactaccagaacgccatgcgggtgtggtccaacatccctggactgaaaagcaagcacgcacctctgacccctaaagaagaggagtacctgcaggcccaggtgcggagcagaagcaagctggacgcccctaaggtggatctgctggtgaagaattgcctcctgcccctgagagagtacttcaagtatttcagccagaatagtctgcccctgggcggcccaagcagcggcgcccctcctcccagcggcggcagcccagccggctccccaacctctaccgaggagggcacctctgagtccgccacccccgagagcggccctggcacctccaccgagcccagcgagggcagcgcacccggcagccctgccggcagccccacctccacagaggagggaaccagcaccgagcccagcgaaggcagcgccccaggcaccagcaccgagcctagtgagggcggctctggcggcggcagcgcccaggagattaaacggatcaacaagatcagaagaagacttgtgaaagacagcaacaccaagaaggccggcaagacaggccccatgaaaaccctgctggttagagtgatgacacccgatctgagagagcggctggaaaacctgagaaagaagcctgaaaatatcccccagcccatcagcaatacatctagagccaacctgaataagctgctgaccgattacaccgaaatgaagaaggcgatcctgcatgtgtactgggaagagttccagaaggaccctgtgggcctgatgagccgggtggcccagcctgccagcaagaagatcgatcagaacaagctgaaacctgagatggacgagaagggcaacctgaccaccgccggctttgcctgctctcagtgtggccagcccctgttcgtgtacaagctggagcaggtgtctgagaagggcaaggcttacaccaactacttcggacggtgcaatgtggccgagcacgaaaagctgatcctgctggcccagctgaagcccgagaaggatagcgacgaagccgtgacatatagcctgggaaagtttgggcagagggccctggatttctacagcattcatgtgaccaaggagtccacccaccccgtgaagcccctggcccagatcgccggaaacagatacgcctccggacctgtgggaaaggccctgagcgacgcatgtatgggcacaatcgcctccttcctgtctaagtaccaggacatcatcatcgaacaccagaaggtggtgaagggcaaccagaagagactggagagcctgcgggagctggccggcaaggaaaacctggaataccctagcgtgaccctgccacctcagcctcacaccaaggagggcgttgatgcctacaacgaagtgatcgcccgggtgcgaatgtgggtgaacctgaacctgtggcagaagctgaagctaagcagagatgatgccaagcctctgctgagactgaagggattcccttcctttcctctggtcgagagacaggccaacgaagtggactggtgggacatggtgtgtaacgtgaagaagctgatcaacgagaaaaaggaggatggcaaggtgttttggcagaatctggctggctacaagagacaggaagccctgagaccatacctgagcagcgaggaagatcggaagaagggaaagaaattcgctcggtaccagctgggcgacctgctgctgcacctggaaaagaagcacggcgaggactggggaaaggtgtacgacgaggcctgggagcggattgacaagaaagtggaaggcctgagcaagcacatcaagctggaagaggaacggagaagcgaggacgcccagagcaaggccgccctgaccgactggctgcgggctaaggccagcttcgtgatcgagggcctgaaggaggccgacaaggacgagttctgcagatgcgagctgaagctgcagaagtggtacggggacctgcggggaaagcccttcgccatcgaagccgagaacagcatcctggacatcagcggcttcagcaagcagtacaactgtgccttcatctggcagaaggacggcgtgaagaagctgaacctgtacctgatcatcaactacttcaagggcggcaagctgcggttcaagaagatcaaacctgaagccttcgaagccaacagattctacaccgtgatcaacaaaaagagcggcgagatcgtgcccatggaggtgaacttcaacttcgacgaccccaacctgatcatcctgcctctggcctttggcaagagacagggcagagaattcatctggaacgacctgctgtccctggaaaccggcagcctgaagctggccaacggaagagtgatcgagaagacactgtacaacagaagaacccggcaggatgagcctgccctgttcgtggccctgaccttcgagcggcgggaggtcctggactcctccaatatcaaaccaatgaacctgatcggcgtggcaagaggcgaaaacatccccgccgtgatcgccctgaccgaccccgagggctgcccactgagccggtttaaggatagcctgggaaacccaacccacatcctgagaatcggcgagagctataaggagaagcagcggaccatccaggccaagaaggaggtggagcagcggagagccggcggctacagccggaagtacgccagcaaagccaagaatctggcagacgatatggtgagaaacaccgctagagatctgctgtactacgccgtgacccaggatgccatgctgatcttcgccaacctgagccggggcttcggccggcagggcaagcggaccttcatggccgagagacagtacacacggatggaggactggctgaccgccaagctggcctacgagggcctgagcaagacctacctgtccaagacactggcccagtacacctccaagacatgcagcaactgtgggtttaccatcaccagcgccgactacgacagggtgctggagaagctgaagaagacagcaacaggctggatgaccacaattaacggcaaggagctgaaggtggagggccagattacctactacaacagatacaagagacagaacgtagtcaaggacctgtccgtcgagctggatagactgagcgaagaatctgtgaacaacgacatctcctcctggacaaagggcagaagcggagaagctctgagcctcctgaagaaaagattctcccatagacccgtgcaggagaagttcgtgtgcctgaactgcggcttcgagacacacgcagccgagcaagccgccctgaacatcgccagatcctggctgttcctgcggagccaggagtacaagaaataccagacaaacaagacaaccggcaacaccgataagagagccttcgtcgagacctggcagtccttttaccggaagaagcttaaggaggtgtggaaacctgccgtgcggtctggcggatctggcggaggctccacaagcgtggccaggatgcagaccagggtgaccttcgacgacatcgccgtgagcttcagccaggaggagtgggagtacctggacgagggccagaaggagctgtacagggaggtgatggaggagaacctggagctgctgaccagcctgggcagcctggtggcccagcccgagcagatggaggagctgtacatgatggaccaccacgacatgggcctgaggggcaccctgctgagcctgtgcaccgaggacaccagccccaagaaaaagagaaaagtctaagctgccttctgcggggcttgccttctggccatgcccttcttctctcccttgcacctgtacctcttggtctttgaataaagcctgagtaggaaggctagcaaaaaaaaaaaaaaaaaaaaaaaaaaaaaaaaaaaaaaaaaaaaaaaaaaaaaaaaaaaaaaaaaaaaaaaaaaaaaaaa

SEQ ID NO: 3407 - RNA, 5419 nt, synthetic construct
  source 1..5419: mol_type = other RNA
aggaaataagagagaaaagaagagtaagaagaaatataagagccaccatggcccctaagaagaagcgtaaagtgagccgggtgaacggcagcggcagcggcggcggcatgaaccacgaccaggagttcgacccccctaaggtgtaccctcccgtccccgccgagaagagaaagcccatccgggtcctgagcctgttcgatggcatcgccaccggtctgctggtgctgaaggacctgggcatccaggtggataggtacattgcctccgaggtgtgcgaggactccatcaccgtgggaatggtgcgtcatcagggcaagatcatgtacgtgggcgacgtgcggagcgtgacacagaagcatatccaggagtggggccctttcgacctggtgatcggcggcagcccttgcaatgacctgagcatcgtgaacccagcccggaagggcctgtacgagggaaccggcagactgttcttcgagttttacagactgctgcacgacgcccggcctaaggaaggcgacgaccggcccttcttttggctgttcgagaatgtggtggccatgggagtcagcgacaagcgggatattagccggttcctggagagcaaccccgtgatgatcgatgccaaggaagtgagcgccgcccaccgggccagatacttctggggcaatctgcctggcatgaacagacccctggccagcaccgtgaacgacaagctggagctgcaggagtgcctggagcacggccggatcgccaagttcagcaaggtgagaaccatcaccacccgaagcaacagcatcaaacaaggcaaggaccagcactttcctgtgttcatgaacgagaaggaggacatcctgtggtgtaccgagatggagagagtgttcgggttcccagtccactacacagatgtcagcaacatgtctagactggccagacagagactgctgggaagaagctggtccgtccctgtgatcagacacctgttcgcccctctgaaggagtacttcgcctgcgtgagcagcggcaacagcaacgccaacagccggggccccagcttctctagcggcctggtgccactgtccctgagagggagccacatgggccccatggagatctacaaaaccgtgagcgcctggaagcggcagcctgtgcgcgtgctgagcctgtttcggaatatcgataaagtcctgaaaagcctgggattcctggagagcggctctggctccggcggtggcaccctgaagtacgtggaggatgtgacaaacgtggtcagacgggatgtggagaagtggggccccttcgatctggtgtacggcagcacccaacccctgggcagctcttgtgaccggtgccctggctggtacatgtttcagttccaccggatcctgcagtacgccctgccgagacaggagtcccagcggccattcttttggattttcatggacaacttgctgctgaccgaggatgaccaggaaactaccactcggttcctgcagaccgaagccgtgaccctgcaggacgtgagaggccgggactaccagaacgccatgcgggtgtggtccaacatccctggactgaaaagcaagcacgcacctctgacccctaaagaagaggagtacctgcaggcccaggtgcggagcagaagcaagctggacgcccctaaggtggatctgctggtgaagaattgcctcctgcccctgagagagtacttcaagtatttcagccagaatagtctgcccctgggcggcccaagcagcggcgcccctcctcccagcggcggcagcccagccggctccccaacctctaccgaggagggcacctctgagtccgccacccccgagagcggccctggcacctccaccgagcccagcgagggcagcgcacccggcagccctgccggcagccccacctccacagaggagggaaccagcaccgagcccagcgaaggcagcgccccaggcaccagcaccgagcctagtgagggcggctctggcggcggcagcgcccaggagattaaacggatcaacaagatcagaagaagacttgtgaaagacagcaacaccaagaaggccggcaagacaggccccatgaaaaccctgctggttagagtgatgacacccgatctgagagagcggctggaaaacctgagaaagaagcctgaaaatatcccccagcccatcagcaatacatctagagccaacctgaataagctgctgaccgattacaccgaaatgaagaaggcgatcctgcatgtgtactgggaagagttccagaaggaccctgtgggcctgatgagccgggtggcccagcctgccagcaagaagatcgatcagaacaagctgaaacctgagatggacgagaagggcaacctgaccaccgccggctttgcctgctctcagtgtggccagcccctgttcgtgtacaagctggagcaggtgtctgagaagggcaaggcttacaccaactacttcggacggtgcaatgtggccgagcacgaaaagctgatcctgctggcccagctgaagcccgagaaggatagcgacgaagccgtgacatatagcctgggaaagtttgggcagagggccctggatttctacagcattcatgtgaccaaggagtccacccaccccgtgaagcccctggcccagatcgccggaaacagatacgcctccggacctgtgggaaaggccctgagcgacgcatgtatgggcacaatcgcctccttcctgtctaagtaccaggacatcatcatcgaacaccagaaggtggtgaagggcaaccagaagagactggagagcctgcgggagctggccggcaaggaaaacctggaataccctagcgtgaccctgccacctcagcctcacaccaaggagggcgttgatgcctacaacgaagtgatcgcccgggtgcgaatgtgggtgaacctgaacctgtggcagaagctgaagctaagcagagatgatgccaagcctctgctgagactgaagggattcccttcctttcctctggtcgagagacaggccaacgaagtggactggtgggacatggtgtgtaacgtgaagaagctgatcaacgagaaaaaggaggatggcaaggtgttttggcagaatctggctggctacaagagacaggaagccctgagaccatacctgagcagcgaggaagatcggaagaagggaaagaaattcgctcggtaccagctgggcgacctgctgctgcacctggaaaagaagcacggcgaggactggggaaaggtgtacgacgaggcctgggagcggattgacaagaaagtggaaggcctgagcaagcacatcaagctggaagaggaacggagaagcgaggacgcccagagcaaggccgccctgaccgactggctgcgggctaaggccagcttcgtgatcgagggcctgaaggaggccgacaaggacgagttctgcagatgcgagctgaagctgcagaagtggtacggggacctgcggggaaagcccttcgccatcgaagccgagaacagcatcctggacatcagcggcttcagcaagcagtacaactgtgccttcatctggcagaaggacggcgtgaagaagctgaacctgtacctgatcatcaactacttcaagggcggcaagctgcggttcaagaagatcaaacctgaagccttcgaagccaacagattctacaccgtgatcaacaaaaagagcggcgagatcgtgcccatggaggtgaacttcaacttcgacgaccccaacctgatcatcctgcctctggcctttggcaagagacagggcagagaattcatctggaacgacctgctgtccctggaaaccggcagcctgaagctggccaacggaagagtgatcgagaagacactgtacaacagaagaacccggcaggatgagcctgccctgttcgtggccctgaccttcgagcggcgggaggtcctggactcctccaatatcaaaccaatgaacctgatcggcgtggcaagaggcgaaaacatccccgccgtgatcgccctgaccgaccccgagggctgcccactgagccggtttaaggatagcctgggaaacccaacccacatcctgagaatcggcgagagctataaggagaagcagcggaccatccaggccaagaaggaggtggagcagcggagagccggcggctacagccggaagtacgccagcaaagccaagaatctggcagacgatatggtgagaaacaccgctagagatctgctgtactacgccgtgacccaggatgccatgctgatcttcgccaacctgagccggggcttcggccggcagggcaagcggaccttcatggccgagagacagtacacacggatggaggactggctgaccgccaagctggcctacgagggcctgagcaagacctacctgtccaagacactggcccagtacacctccaagacatgcagcaactgtgggtttaccatcaccagcgccgactacgacagggtgctggagaagctgaagaagacagcaacaggctggatgaccacaattaacggcaaggagctgaaggtggagggccagattacctactacaacagatacaagagacagaacgtagtcaaggacctgtccgtcgagctggatagactgagcgaagaatctgtgaacaacgacatctcctcctggacaaagggcagaagcggagaagctctgagcctcctgaagaaaagattctcccatagacccgtgcaggagaagttcgtgtgcctgaactgcggcttcgagacacacgcagccgagcaagccgccctgaacatcgccagatcctggctgttcctgcggagccaggagtacaagaaataccagacaaacaagacaaccggcaacaccgataagagagccttcgtcgagacctggcagtccttttaccggaagaagcttaaggaggtgtggaaacctgccgtgcggtctggcggatctggcggaggctccacaagcttccaggaggccgtgaccttcaaggacgtggccgtggccttcaccgaggaggagctgggcctgctggacagcgcccagaggaagctgtacagggacgtgatgctggagaacttcaggaacctggtgagcgtgggcaggcagagcttcaagcccgacatgatcagccagctggagagggaggagaagctgtggatgaaggagttccagacccagaggggcaggcacagcggcgacaggaaccagaccagccccaagaaaaagagaaaagtctaagctgccttctgcggggcttgccttctggccatgcccttcttctctcccttgcacctgtacctcttggtctttgaataaagcctgagtaggaaggctagcaaaaaaaaaaaaaaaaaaaaaaaaaaaaaaaaaaaaaaaaaaaaaaaaaaaaaaaaaaaaaaaaaaaaaaaaaaaaaaaa

SEQ ID NO: 3408 - RNA, 5419 nt, synthetic construct
  source 1..5419: mol_type = other RNA
aggaaataagagagaaaagaagagtaagaagaaatataagagccaccatggcccctaagaagaagcgtaaagtgagccgggtgaacggcagcggcagcggcggcggcatgaaccacgaccaggagttcgacccccctaaggtgtaccctcccgtccccgccgagaagagaaagcccatccgggtcctgagcctgttcgatggcatcgccaccggtctgctggtgctgaaggacctgggcatccaggtggataggtacattgcctccgaggtgtgcgaggactccatcaccgtgggaatggtgcgtcatcagggcaagatcatgtacgtgggcgacgtgcggagcgtgacacagaagcatatccaggagtggggccctttcgacctggtgatcggcggcagcccttgcaatgacctgagcatcgtgaacccagcccggaagggcctgtacgagggaaccggcagactgttcttcgagttttacagactgctgcacgacgcccggcctaaggaaggcgacgaccggcccttcttttggctgttcgagaatgtggtggccatgggagtcagcgacaagcgggatattagccggttcctggagagcaaccccgtgatgatcgatgccaaggaagtgagcgccgcccaccgggccagatacttctggggcaatctgcctggcatgaacagacccctggccagcaccgtgaacgacaagctggagctgcaggagtgcctggagcacggccggatcgccaagttcagcaaggtgagaaccatcaccacccgaagcaacagcatcaaacaaggcaaggaccagcactttcctgtgttcatgaacgagaaggaggacatcctgtggtgtaccgagatggagagagtgttcgggttcccagtccactacacagatgtcagcaacatgtctagactggccagacagagactgctgggaagaagctggtccgtccctgtgatcagacacctgttcgcccctctgaaggagtacttcgcctgcgtgagcagcggcaacagcaacgccaacagccggggccccagcttctctagcggcctggtgccactgtccctgagagggagccacatgggccccatggagatctacaaaaccgtgagcgcctggaagcggcagcctgtgcgcgtgctgagcctgtttcggaatatcgataaagtcctgaaaagcctgggattcctggagagcggctctggctccggcggtggcaccctgaagtacgtggaggatgtgacaaacgtggtcagacgggatgtggagaagtggggccccttcgatctggtgtacggcagcacccaacccctgggcagctcttgtgaccggtgccctggctggtacatgtttcagttccaccggatcctgcagtacgccctgccgagacaggagtcccagcggccattcttttggattttcatggacaacttgctgctgaccgaggatgaccaggaaactaccactcggttcctgcagaccgaagccgtgaccctgcaggacgtgagaggccgggactaccagaacgccatgcgggtgtggtccaacatccctggactgaaaagcaagcacgcacctctgacccctaaagaagaggagtacctgcaggcccaggtgcggagcagaagcaagctggacgcccctaaggtggatctgctggtgaagaattgcctcctgcccctgagagagtacttcaagtatttcagccagaatagtctgcccctgggcggcccaagcagcggcgcccctcctcccagcggcggcagcccagccggctccccaacctctaccgaggagggcacctctgagtccgccacccccgagagcggccctggcacctccaccgagcccagcgagggcagcgcacccggcagccctgccggcagccccacctccacagaggagggaaccagcaccgagcccagcgaaggcagcgccccaggcaccagcaccgagcctagtgagggcggctctggcggcggcagcgcccaggagattaaacggatcaacaagatcagaagaagacttgtgaaagacagcaacaccaagaaggccggcaagacaggccccatgaaaaccctgctggttagagtgatgacacccgatctgagagagcggctggaaaacctgagaaagaagcctgaaaatatcccccagcccatcagcaatacatctagagccaacctgaataagctgctgaccgattacaccgaaatgaagaaggcgatcctgcatgtgtactgggaagagttccagaaggaccctgtgggcctgatgagccgggtggcccagcctgccagcaagaagatcgatcagaacaagctgaaacctgagatggacgagaagggcaacctgaccaccgccggctttgcctgctctcagtgtggccagcccctgttcgtgtacaagctggagcaggtgtctgagaagggcaaggcttacaccaactacttcggacggtgcaatgtggccgagcacgaaaagctgatcctgctggcccagctgaagcccgagaaggatagcgacgaagccgtgacatatagcctgggaaagtttgggcagagggccctggatttctacagcattcatgtgaccaaggagtccacccaccccgtgaagcccctggcccagatcgccggaaacagatacgcctccggacctgtgggaaaggccctgagcgacgcatgtatgggcacaatcgcctccttcctgtctaagtaccaggacatcatcatcgaacaccagaaggtggtgaagggcaaccagaagagactggagagcctgcgggagctggccggcaaggaaaacctggaataccctagcgtgaccctgccacctcagcctcacaccaaggagggcgttgatgcctacaacgaagtgatcgcccgggtgcgaatgtgggtgaacctgaacctgtggcagaagctgaagctaagcagagatgatgccaagcctctgctgagactgaagggattcccttcctttcctctggtcgagagacaggccaacgaagtggactggtgggacatggtgtgtaacgtgaagaagctgatcaacgagaaaaaggaggatggcaaggtgttttggcagaatctggctggctacaagagacaggaagccctgagaccatacctgagcagcgaggaagatcggaagaagggaaagaaattcgctcggtaccagctgggcgacctgctgctgcacctggaaaagaagcacggcgaggactggggaaaggtgtacgacgaggcctgggagcggattgacaagaaagtggaaggcctgagcaagcacatcaagctggaagaggaacggagaagcgaggacgcccagagcaaggccgccctgaccgactggctgcgggctaaggccagcttcgtgatcgagggcctgaaggaggccgacaaggacgagttctgcagatgcgagctgaagctgcagaagtggtacggggacctgcggggaaagcccttcgccatcgaagccgagaacagcatcctggacatcagcggcttcagcaagcagtacaactgtgccttcatctggcagaaggacggcgtgaagaagctgaacctgtacctgatcatcaactacttcaagggcggcaagctgcggttcaagaagatcaaacctgaagccttcgaagccaacagattctacaccgtgatcaacaaaaagagcggcgagatcgtgcccatggaggtgaacttcaacttcgacgaccccaacctgatcatcctgcctctggcctttggcaagagacagggcagagaattcatctggaacgacctgctgtccctggaaaccggcagcctgaagctggccaacggaagagtgatcgagaagacactgtacaacagaagaacccggcaggatgagcctgccctgttcgtggccctgaccttcgagcggcgggaggtcctggactcctccaatatcaaaccaatgaacctgatcggcgtggcaagaggcgaaaacatccccgccgtgatcgccctgaccgaccccgagggctgcccactgagccggtttaaggatagcctgggaaacccaacccacatcctgagaatcggcgagagctataaggagaagcagcggaccatccaggccaagaaggaggtggagcagcggagagccggcggctacagccggaagtacgccagcaaagccaagaatctggcagacgatatggtgagaaacaccgctagagatctgctgtactacgccgtgacccaggatgccatgctgatcttcgccaacctgagccggggcttcggccggcagggcaagcggaccttcatggccgagagacagtacacacggatggaggactggctgaccgccaagctggcctacgagggcctgagcaagacctacctgtccaagacactggcccagtacacctccaagacatgcagcaactgtgggtttaccatcaccagcgccgactacgacagggtgctggagaagctgaagaagacagcaacaggctggatgaccacaattaacggcaaggagctgaaggtggagggccagattacctactacaacagatacaagagacagaacgtagtcaaggacctgtccgtcgagctggatagactgagcgaagaatctgtgaacaacgacatctcctcctggacaaagggcagaagcggagaagctctgagcctcctgaagaaaagattctcccatagacccgtgcaggagaagttcgtgtgcctgaactgcggcttcgagacacacgcagccgagcaagccgccctgaacatcgccagatcctggctgttcctgcggagccaggagtacaagaaataccagacaaacaagacaaccggcaacaccgataagagagccttcgtcgagacctggcagtccttttaccggaagaagcttaaggaggtgtggaaacctgccgtgcggtctggcggatctggcggaggctccacaagcagcaagctgcccgaggccttcgaggacgtggccgtgtacttcaccaggaaggagtgggagctgctggaggccggcgacaagggcctgtaccaggaccagatgctgaggaactaccaggccctggtgagcctgggcctgcagggccccgcccccgacctgatctgcaggatgcagctgggcgagatggagctgtgggtgtgcgacgacgaggaggccggcgagagcagcctgagcgaggacttcaccagccccaagaaaaagagaaaagtctaagctgccttctgcggggcttgccttctggccatgcccttcttctctcccttgcacctgtacctcttggtctttgaataaagcctgagtaggaaggctagcaaaaaaaaaaaaaaaaaaaaaaaaaaaaaaaaaaaaaaaaaaaaaaaaaaaaaaaaaaaaaaaaaaaaaaaaaaaaaaaa

SEQ ID NO: 3409 - RNA, 5419 nt, synthetic construct
  source 1..5419: mol_type = other RNA
aggaaataagagagaaaagaagagtaagaagaaatataagagccaccatggcccctaagaagaagcgtaaagtgagccgggtgaacggcagcggcagcggcggcggcatgaaccacgaccaggagttcgacccccctaaggtgtaccctcccgtccccgccgagaagagaaagcccatccgggtcctgagcctgttcgatggcatcgccaccggtctgctggtgctgaaggacctgggcatccaggtggataggtacattgcctccgaggtgtgcgaggactccatcaccgtgggaatggtgcgtcatcagggcaagatcatgtacgtgggcgacgtgcggagcgtgacacagaagcatatccaggagtggggccctttcgacctggtgatcggcggcagcccttgcaatgacctgagcatcgtgaacccagcccggaagggcctgtacgagggaaccggcagactgttcttcgagttttacagactgctgcacgacgcccggcctaaggaaggcgacgaccggcccttcttttggctgttcgagaatgtggtggccatgggagtcagcgacaagcgggatattagccggttcctggagagcaaccccgtgatgatcgatgccaaggaagtgagcgccgcccaccgggccagatacttctggggcaatctgcctggcatgaacagacccctggccagcaccgtgaacgacaagctggagctgcaggagtgcctggagcacggccggatcgccaagttcagcaaggtgagaaccatcaccacccgaagcaacagcatcaaacaaggcaaggaccagcactttcctgtgttcatgaacgagaaggaggacatcctgtggtgtaccgagatggagagagtgttcgggttcccagtccactacacagatgtcagcaacatgtctagactggccagacagagactgctgggaagaagctggtccgtccctgtgatcagacacctgttcgcccctctgaaggagtacttcgcctgcgtgagcagcggcaacagcaacgccaacagccggggccccagcttctctagcggcctggtgccactgtccctgagagggagccacatgggccccatggagatctacaaaaccgtgagcgcctggaagcggcagcctgtgcgcgtgctgagcctgtttcggaatatcgataaagtcctgaaaagcctgggattcctggagagcggctctggctccggcggtggcaccctgaagtacgtggaggatgtgacaaacgtggtcagacgggatgtggagaagtggggccccttcgatctggtgtacggcagcacccaacccctgggcagctcttgtgaccggtgccctggctggtacatgtttcagttccaccggatcctgcagtacgccctgccgagacaggagtcccagcggccattcttttggattttcatggacaacttgctgctgaccgaggatgaccaggaaactaccactcggttcctgcagaccgaagccgtgaccctgcaggacgtgagaggccgggactaccagaacgccatgcgggtgtggtccaacatccctggactgaaaagcaagcacgcacctctgacccctaaagaagaggagtacctgcaggcccaggtgcggagcagaagcaagctggacgcccctaaggtggatctgctggtgaagaattgcctcctgcccctgagagagtacttcaagtatttcagccagaatagtctgcccctgggcggcccaagcagcggcgcccctcctcccagcggcggcagcccagccggctccccaacctctaccgaggagggcacctctgagtccgccacccccgagagcggccctggcacctccaccgagcccagcgagggcagcgcacccggcagccctgccggcagccccacctccacagaggagggaaccagcaccgagcccagcgaaggcagcgccccaggcaccagcaccgagcctagtgagggcggctctggcggcggcagcgcccaggagattaaacggatcaacaagatcagaagaagacttgtgaaagacagcaacaccaagaaggccggcaagacaggccccatgaaaaccctgctggttagagtgatgacacccgatctgagagagcggctggaaaacctgagaaagaagcctgaaaatatcccccagcccatcagcaatacatctagagccaacctgaataagctgctgaccgattacaccgaaatgaagaaggcgatcctgcatgtgtactgggaagagttccagaaggaccctgtgggcctgatgagccgggtggcccagcctgccagcaagaagatcgatcagaacaagctgaaacctgagatggacgagaagggcaacctgaccaccgccggctttgcctgctctcagtgtggccagcccctgttcgtgtacaagctggagcaggtgtctgagaagggcaaggcttacaccaactacttcggacggtgcaatgtggccgagcacgaaaagctgatcctgctggcccagctgaagcccgagaaggatagcgacgaagccgtgacatatagcctgggaaagtttgggcagagggccctggatttctacagcattcatgtgaccaaggagtccacccaccccgtgaagcccctggcccagatcgccggaaacagatacgcctccggacctgtgggaaaggccctgagcgacgcatgtatgggcacaatcgcctccttcctgtctaagtaccaggacatcatcatcgaacaccagaaggtggtgaagggcaaccagaagagactggagagcctgcgggagctggccggcaaggaaaacctggaataccctagcgtgaccctgccacctcagcctcacaccaaggagggcgttgatgcctacaacgaagtgatcgcccgggtgcgaatgtgggtgaacctgaacctgtggcagaagctgaagctaagcagagatgatgccaagcctctgctgagactgaagggattcccttcctttcctctggtcgagagacaggccaacgaagtggactggtgggacatggtgtgtaacgtgaagaagctgatcaacgagaaaaaggaggatggcaaggtgttttggcagaatctggctggctacaagagacaggaagccctgagaccatacctgagcagcgaggaagatcggaagaagggaaagaaattcgctcggtaccagctgggcgacctgctgctgcacctggaaaagaagcacggcgaggactggggaaaggtgtacgacgaggcctgggagcggattgacaagaaagtggaaggcctgagcaagcacatcaagctggaagaggaacggagaagcgaggacgcccagagcaaggccgccctgaccgactggctgcgggctaaggccagcttcgtgatcgagggcctgaaggaggccgacaaggacgagttctgcagatgcgagctgaagctgcagaagtggtacggggacctgcggggaaagcccttcgccatcgaagccgagaacagcatcctggacatcagcggcttcagcaagcagtacaactgtgccttcatctggcagaaggacggcgtgaagaagctgaacctgtacctgatcatcaactacttcaagggcggcaagctgcggttcaagaagatcaaacctgaagccttcgaagccaacagattctacaccgtgatcaacaaaaagagcggcgagatcgtgcccatggaggtgaacttcaacttcgacgaccccaacctgatcatcctgcctctggcctttggcaagagacagggcagagaattcatctggaacgacctgctgtccctggaaaccggcagcctgaagctggccaacggaagagtgatcgagaagacactgtacaacagaagaacccggcaggatgagcctgccctgttcgtggccctgaccttcgagcggcgggaggtcctggactcctccaatatcaaaccaatgaacctgatcggcgtggcaagaggcgaaaacatccccgccgtgatcgccctgaccgaccccgagggctgcccactgagccggtttaaggatagcctgggaaacccaacccacatcctgagaatcggcgagagctataaggagaagcagcggaccatccaggccaagaaggaggtggagcagcggagagccggcggctacagccggaagtacgccagcaaagccaagaatctggcagacgatatggtgagaaacaccgctagagatctgctgtactacgccgtgacccaggatgccatgctgatcttcgccaacctgagccggggcttcggccggcagggcaagcggaccttcatggccgagagacagtacacacggatggaggactggctgaccgccaagctggcctacgagggcctgagcaagacctacctgtccaagacactggcccagtacacctccaagacatgcagcaactgtgggtttaccatcaccagcgccgactacgacagggtgctggagaagctgaagaagacagcaacaggctggatgaccacaattaacggcaaggagctgaaggtggagggccagattacctactacaacagatacaagagacagaacgtagtcaaggacctgtccgtcgagctggatagactgagcgaagaatctgtgaacaacgacatctcctcctggacaaagggcagaagcggagaagctctgagcctcctgaagaaaagattctcccatagacccgtgcaggagaagttcgtgtgcctgaactgcggcttcgagacacacgcagccgagcaagccgccctgaacatcgccagatcctggctgttcctgcggagccaggagtacaagaaataccagacaaacaagacaaccggcaacaccgataagagagccttcgtcgagacctggcagtccttttaccggaagaagcttaaggaggtgtggaaacctgccgtgcggtctggcggatctggcggaggctccacaagcttccaggagcccgtgaccttcaaggacgtggccgtggagttcacctgggaggagtggaggcagctggaccccacccagagggccctgttcagggacgtgatgctggagaactacaggaacctggtgagcctgggcctggccgtgaccaagcccgacgtgatcttccagctggagagcggcgaggtgccctggatgctggagagggaggtgcccaggagcagccccaccgagtgcctgaacctgaccagccccaagaaaaagagaaaagtctaagctgccttctgcggggcttgccttctggccatgcccttcttctctcccttgcacctgtacctcttggtctttgaataaagcctgagtaggaaggctagcaaaaaaaaaaaaaaaaaaaaaaaaaaaaaaaaaaaaaaaaaaaaaaaaaaaaaaaaaaaaaaaaaaaaaaaaaaaaaaaa

SEQ ID NO: 3410 - RNA, 5419 nt, synthetic construct
  source 1..5419: mol_type = other RNA
aggaaataagagagaaaagaagagtaagaagaaatataagagccaccatggcccctaagaagaagcgtaaagtgagccgggtgaacggcagcggcagcggcggcggcatgaaccacgaccaggagttcgacccccctaaggtgtaccctcccgtccccgccgagaagagaaagcccatccgggtcctgagcctgttcgatggcatcgccaccggtctgctggtgctgaaggacctgggcatccaggtggataggtacattgcctccgaggtgtgcgaggactccatcaccgtgggaatggtgcgtcatcagggcaagatcatgtacgtgggcgacgtgcggagcgtgacacagaagcatatccaggagtggggccctttcgacctggtgatcggcggcagcccttgcaatgacctgagcatcgtgaacccagcccggaagggcctgtacgagggaaccggcagactgttcttcgagttttacagactgctgcacgacgcccggcctaaggaaggcgacgaccggcccttcttttggctgttcgagaatgtggtggccatgggagtcagcgacaagcgggatattagccggttcctggagagcaaccccgtgatgatcgatgccaaggaagtgagcgccgcccaccgggccagatacttctggggcaatctgcctggcatgaacagacccctggccagcaccgtgaacgacaagctggagctgcaggagtgcctggagcacggccggatcgccaagttcagcaaggtgagaaccatcaccacccgaagcaacagcatcaaacaaggcaaggaccagcactttcctgtgttcatgaacgagaaggaggacatcctgtggtgtaccgagatggagagagtgttcgggttcccagtccactacacagatgtcagcaacatgtctagactggccagacagagactgctgggaagaagctggtccgtccctgtgatcagacacctgttcgcccctctgaaggagtacttcgcctgcgtgagcagcggcaacagcaacgccaacagccggggccccagcttctctagcggcctggtgccactgtccctgagagggagccacatgggccccatggagatctacaaaaccgtgagcgcctggaagcggcagcctgtgcgcgtgctgagcctgtttcggaatatcgataaagtcctgaaaagcctgggattcctggagagcggctctggctccggcggtggcaccctgaagtacgtggaggatgtgacaaacgtggtcagacgggatgtggagaagtggggccccttcgatctggtgtacggcagcacccaacccctgggcagctcttgtgaccggtgccctggctggtacatgtttcagttccaccggatcctgcagtacgccctgccgagacaggagtcccagcggccattcttttggattttcatggacaacttgctgctgaccgaggatgaccaggaaactaccactcggttcctgcagaccgaagccgtgaccctgcaggacgtgagaggccgggactaccagaacgccatgcgggtgtggtccaacatccctggactgaaaagcaagcacgcacctctgacccctaaagaagaggagtacctgcaggcccaggtgcggagcagaagcaagctggacgcccctaaggtggatctgctggtgaagaattgcctcctgcccctgagagagtacttcaagtatttcagccagaatagtctgcccctgggcggcccaagcagcggcgcccctcctcccagcggcggcagcccagccggctccccaacctctaccgaggagggcacctctgagtccgccacccccgagagcggccctggcacctccaccgagcccagcgagggcagcgcacccggcagccctgccggcagccccacctccacagaggagggaaccagcaccgagcccagcgaaggcagcgccccaggcaccagcaccgagcctagtgagggcggctctggcggcggcagcgcccaggagattaaacggatcaacaagatcagaagaagacttgtgaaagacagcaacaccaagaaggccggcaagacaggccccatgaaaaccctgctggttagagtgatgacacccgatctgagagagcggctggaaaacctgagaaagaagcctgaaaatatcccccagcccatcagcaatacatctagagccaacctgaataagctgctgaccgattacaccgaaatgaagaaggcgatcctgcatgtgtactgggaagagttccagaaggaccctgtgggcctgatgagccgggtggcccagcctgccagcaagaagatcgatcagaacaagctgaaacctgagatggacgagaagggcaacctgaccaccgccggctttgcctgctctcagtgtggccagcccctgttcgtgtacaagctggagcaggtgtctgagaagggcaaggcttacaccaactacttcggacggtgcaatgtggccgagcacgaaaagctgatcctgctggcccagctgaagcccgagaaggatagcgacgaagccgtgacatatagcctgggaaagtttgggcagagggccctggatttctacagcattcatgtgaccaaggagtccacccaccccgtgaagcccctggcccagatcgccggaaacagatacgcctccggacctgtgggaaaggccctgagcgacgcatgtatgggcacaatcgcctccttcctgtctaagtaccaggacatcatcatcgaacaccagaaggtggtgaagggcaaccagaagagactggagagcctgcgggagctggccggcaaggaaaacctggaataccctagcgtgaccctgccacctcagcctcacaccaaggagggcgttgatgcctacaacgaagtgatcgcccgggtgcgaatgtgggtgaacctgaacctgtggcagaagctgaagctaagcagagatgatgccaagcctctgctgagactgaagggattcccttcctttcctctggtcgagagacaggccaacgaagtggactggtgggacatggtgtgtaacgtgaagaagctgatcaacgagaaaaaggaggatggcaaggtgttttggcagaatctggctggctacaagagacaggaagccctgagaccatacctgagcagcgaggaagatcggaagaagggaaagaaattcgctcggtaccagctgggcgacctgctgctgcacctggaaaagaagcacggcgaggactggggaaaggtgtacgacgaggcctgggagcggattgacaagaaagtggaaggcctgagcaagcacatcaagctggaagaggaacggagaagcgaggacgcccagagcaaggccgccctgaccgactggctgcgggctaaggccagcttcgtgatcgagggcctgaaggaggccgacaaggacgagttctgcagatgcgagctgaagctgcagaagtggtacggggacctgcggggaaagcccttcgccatcgaagccgagaacagcatcctggacatcagcggcttcagcaagcagtacaactgtgccttcatctggcagaaggacggcgtgaagaagctgaacctgtacctgatcatcaactacttcaagggcggcaagctgcggttcaagaagatcaaacctgaagccttcgaagccaacagattctacaccgtgatcaacaaaaagagcggcgagatcgtgcccatggaggtgaacttcaacttcgacgaccccaacctgatcatcctgcctctggcctttggcaagagacagggcagagaattcatctggaacgacctgctgtccctggaaaccggcagcctgaagctggccaacggaagagtgatcgagaagacactgtacaacagaagaacccggcaggatgagcctgccctgttcgtggccctgaccttcgagcggcgggaggtcctggactcctccaatatcaaaccaatgaacctgatcggcgtggcaagaggcgaaaacatccccgccgtgatcgccctgaccgaccccgagggctgcccactgagccggtttaaggatagcctgggaaacccaacccacatcctgagaatcggcgagagctataaggagaagcagcggaccatccaggccaagaaggaggtggagcagcggagagccggcggctacagccggaagtacgccagcaaagccaagaatctggcagacgatatggtgagaaacaccgctagagatctgctgtactacgccgtgacccaggatgccatgctgatcttcgccaacctgagccggggcttcggccggcagggcaagcggaccttcatggccgagagacagtacacacggatggaggactggctgaccgccaagctggcctacgagggcctgagcaagacctacctgtccaagacactggcccagtacacctccaagacatgcagcaactgtgggtttaccatcaccagcgccgactacgacagggtgctggagaagctgaagaagacagcaacaggctggatgaccacaattaacggcaaggagctgaaggtggagggccagattacctactacaacagatacaagagacagaacgtagtcaaggacctgtccgtcgagctggatagactgagcgaagaatctgtgaacaacgacatctcctcctggacaaagggcagaagcggagaagctctgagcctcctgaagaaaagattctcccatagacccgtgcaggagaagttcgtgtgcctgaactgcggcttcgagacacacgcagccgagcaagccgccctgaacatcgccagatcctggctgttcctgcggagccaggagtacaagaaataccagacaaacaagacaaccggcaacaccgataagagagccttcgtcgagacctggcagtccttttaccggaagaagcttaaggaggtgtggaaacctgccgtgcggtctggcggatctggcggaggctccacaagcagccagggcctggtgagcttcaaggacgtggccgtggacttcacccaggaggagtggcagcagctggaccccgcccagaggaccctgtacagggacgtgatgctggagaacttcagccacgtgatcagcctgggctaccccgtgagcaagcccgacgtgatcagcaagctggagcagggcgaggacccctggatcatcaagagggacgtgagcaactggatctacaccgacgagaaccaggccaccagccccaagaaaaagagaaaagtctaagctgccttctgcggggcttgccttctggccatgcccttcttctctcccttgcacctgtacctcttggtctttgaataaagcctgagtaggaaggctagcaaaaaaaaaaaaaaaaaaaaaaaaaaaaaaaaaaaaaaaaaaaaaaaaaaaaaaaaaaaaaaaaaaaaaaaaaaaaaaaa

SEQ ID NO: 3411 - RNA, 5419 nt, synthetic construct
  source 1..5419: mol_type = other RNA
aggaaataagagagaaaagaagagtaagaagaaatataagagccaccatggcccctaagaagaagcgtaaagtgagccgggtgaacggcagcggcagcggcggcggcatgaaccacgaccaggagttcgacccccctaaggtgtaccctcccgtccccgccgagaagagaaagcccatccgggtcctgagcctgttcgatggcatcgccaccggtctgctggtgctgaaggacctgggcatccaggtggataggtacattgcctccgaggtgtgcgaggactccatcaccgtgggaatggtgcgtcatcagggcaagatcatgtacgtgggcgacgtgcggagcgtgacacagaagcatatccaggagtggggccctttcgacctggtgatcggcggcagcccttgcaatgacctgagcatcgtgaacccagcccggaagggcctgtacgagggaaccggcagactgttcttcgagttttacagactgctgcacgacgcccggcctaaggaaggcgacgaccggcccttcttttggctgttcgagaatgtggtggccatgggagtcagcgacaagcgggatattagccggttcctggagagcaaccccgtgatgatcgatgccaaggaagtgagcgccgcccaccgggccagatacttctggggcaatctgcctggcatgaacagacccctggccagcaccgtgaacgacaagctggagctgcaggagtgcctggagcacggccggatcgccaagttcagcaaggtgagaaccatcaccacccgaagcaacagcatcaaacaaggcaaggaccagcactttcctgtgttcatgaacgagaaggaggacatcctgtggtgtaccgagatggagagagtgttcgggttcccagtccactacacagatgtcagcaacatgtctagactggccagacagagactgctgggaagaagctggtccgtccctgtgatcagacacctgttcgcccctctgaaggagtacttcgcctgcgtgagcagcggcaacagcaacgccaacagccggggccccagcttctctagcggcctggtgccactgtccctgagagggagccacatgggccccatggagatctacaaaaccgtgagcgcctggaagcggcagcctgtgcgcgtgctgagcctgtttcggaatatcgataaagtcctgaaaagcctgggattcctggagagcggctctggctccggcggtggcaccctgaagtacgtggaggatgtgacaaacgtggtcagacgggatgtggagaagtggggccccttcgatctggtgtacggcagcacccaacccctgggcagctcttgtgaccggtgccctggctggtacatgtttcagttccaccggatcctgcagtacgccctgccgagacaggagtcccagcggccattcttttggattttcatggacaacttgctgctgaccgaggatgaccaggaaactaccactcggttcctgcagaccgaagccgtgaccctgcaggacgtgagaggccgggactaccagaacgccatgcgggtgtggtccaacatccctggactgaaaagcaagcacgcacctctgacccctaaagaagaggagtacctgcaggcccaggtgcggagcagaagcaagctggacgcccctaaggtggatctgctggtgaagaattgcctcctgcccctgagagagtacttcaagtatttcagccagaatagtctgcccctgggcggcccaagcagcggcgcccctcctcccagcggcggcagcccagccggctccccaacctctaccgaggagggcacctctgagtccgccacccccgagagcggccctggcacctccaccgagcccagcgagggcagcgcacccggcagccctgccggcagccccacctccacagaggagggaaccagcaccgagcccagcgaaggcagcgccccaggcaccagcaccgagcctagtgagggcggctctggcggcggcagcgcccaggagattaaacggatcaacaagatcagaagaagacttgtgaaagacagcaacaccaagaaggccggcaagacaggccccatgaaaaccctgctggttagagtgatgacacccgatctgagagagcggctggaaaacctgagaaagaagcctgaaaatatcccccagcccatcagcaatacatctagagccaacctgaataagctgctgaccgattacaccgaaatgaagaaggcgatcctgcatgtgtactgggaagagttccagaaggaccctgtgggcctgatgagccgggtggcccagcctgccagcaagaagatcgatcagaacaagctgaaacctgagatggacgagaagggcaacctgaccaccgccggctttgcctgctctcagtgtggccagcccctgttcgtgtacaagctggagcaggtgtctgagaagggcaaggcttacaccaactacttcggacggtgcaatgtggccgagcacgaaaagctgatcctgctggcccagctgaagcccgagaaggatagcgacgaagccgtgacatatagcctgggaaagtttgggcagagggccctggatttctacagcattcatgtgaccaaggagtccacccaccccgtgaagcccctggcccagatcgccggaaacagatacgcctccggacctgtgggaaaggccctgagcgacgcatgtatgggcacaatcgcctccttcctgtctaagtaccaggacatcatcatcgaacaccagaaggtggtgaagggcaaccagaagagactggagagcctgcgggagctggccggcaaggaaaacctggaataccctagcgtgaccctgccacctcagcctcacaccaaggagggcgttgatgcctacaacgaagtgatcgcccgggtgcgaatgtgggtgaacctgaacctgtggcagaagctgaagctaagcagagatgatgccaagcctctgctgagactgaagggattcccttcctttcctctggtcgagagacaggccaacgaagtggactggtgggacatggtgtgtaacgtgaagaagctgatcaacgagaaaaaggaggatggcaaggtgttttggcagaatctggctggctacaagagacaggaagccctgagaccatacctgagcagcgaggaagatcggaagaagggaaagaaattcgctcggtaccagctgggcgacctgctgctgcacctggaaaagaagcacggcgaggactggggaaaggtgtacgacgaggcctgggagcggattgacaagaaagtggaaggcctgagcaagcacatcaagctggaagaggaacggagaagcgaggacgcccagagcaaggccgccctgaccgactggctgcgggctaaggccagcttcgtgatcgagggcctgaaggaggccgacaaggacgagttctgcagatgcgagctgaagctgcagaagtggtacggggacctgcggggaaagcccttcgccatcgaagccgagaacagcatcctggacatcagcggcttcagcaagcagtacaactgtgccttcatctggcagaaggacggcgtgaagaagctgaacctgtacctgatcatcaactacttcaagggcggcaagctgcggttcaagaagatcaaacctgaagccttcgaagccaacagattctacaccgtgatcaacaaaaagagcggcgagatcgtgcccatggaggtgaacttcaacttcgacgaccccaacctgatcatcctgcctctggcctttggcaagagacagggcagagaattcatctggaacgacctgctgtccctggaaaccggcagcctgaagctggccaacggaagagtgatcgagaagacactgtacaacagaagaacccggcaggatgagcctgccctgttcgtggccctgaccttcgagcggcgggaggtcctggactcctccaatatcaaaccaatgaacctgatcggcgtggcaagaggcgaaaacatccccgccgtgatcgccctgaccgaccccgagggctgcccactgagccggtttaaggatagcctgggaaacccaacccacatcctgagaatcggcgagagctataaggagaagcagcggaccatccaggccaagaaggaggtggagcagcggagagccggcggctacagccggaagtacgccagcaaagccaagaatctggcagacgatatggtgagaaacaccgctagagatctgctgtactacgccgtgacccaggatgccatgctgatcttcgccaacctgagccggggcttcggccggcagggcaagcggaccttcatggccgagagacagtacacacggatggaggactggctgaccgccaagctggcctacgagggcctgagcaagacctacctgtccaagacactggcccagtacacctccaagacatgcagcaactgtgggtttaccatcaccagcgccgactacgacagggtgctggagaagctgaagaagacagcaacaggctggatgaccacaattaacggcaaggagctgaaggtggagggccagattacctactacaacagatacaagagacagaacgtagtcaaggacctgtccgtcgagctggatagactgagcgaagaatctgtgaacaacgacatctcctcctggacaaagggcagaagcggagaagctctgagcctcctgaagaaaagattctcccatagacccgtgcaggagaagttcgtgtgcctgaactgcggcttcgagacacacgcagccgagcaagccgccctgaacatcgccagatcctggctgttcctgcggagccaggagtacaagaaataccagacaaacaagacaaccggcaacaccgataagagagccttcgtcgagacctggcagtccttttaccggaagaagcttaaggaggtgtggaaacctgccgtgcggtctggcggatctggcggaggctccacaagcgcccaggagagcgtgaccttcgaggacgtggccgtgaacttcaccgacagggagtggcagtgcctgacctacgcccagaggcacctgtacaaggacgtgatgctggagaactacggcaacatggtgagcgtgggcttccccttccccaagccccccctgatcagccacctggagaggggcgtggagctgtgcgtgcaggacccccaggacagggagagcctgagctgcagctgcctggtgagcaccagccccaagaaaaagagaaaagtctaagctgccttctgcggggcttgccttctggccatgcccttcttctctcccttgcacctgtacctcttggtctttgaataaagcctgagtaggaaggctagcaaaaaaaaaaaaaaaaaaaaaaaaaaaaaaaaaaaaaaaaaaaaaaaaaaaaaaaaaaaaaaaaaaaaaaaaaaaaaaaa

SEQ ID NO: 3412 - RNA, 5419 nt, synthetic construct
  source 1..5419: mol_type = other RNA
aggaaataagagagaaaagaagagtaagaagaaatataagagccaccatggcccctaagaagaagcgtaaagtgagccgggtgaacggcagcggcagcggcggcggcatgaaccacgaccaggagttcgacccccctaaggtgtaccctcccgtccccgccgagaagagaaagcccatccgggtcctgagcctgttcgatggcatcgccaccggtctgctggtgctgaaggacctgggcatccaggtggataggtacattgcctccgaggtgtgcgaggactccatcaccgtgggaatggtgcgtcatcagggcaagatcatgtacgtgggcgacgtgcggagcgtgacacagaagcatatccaggagtggggccctttcgacctggtgatcggcggcagcccttgcaatgacctgagcatcgtgaacccagcccggaagggcctgtacgagggaaccggcagactgttcttcgagttttacagactgctgcacgacgcccggcctaaggaaggcgacgaccggcccttcttttggctgttcgagaatgtggtggccatgggagtcagcgacaagcgggatattagccggttcctggagagcaaccccgtgatgatcgatgccaaggaagtgagcgccgcccaccgggccagatacttctggggcaatctgcctggcatgaacagacccctggccagcaccgtgaacgacaagctggagctgcaggagtgcctggagcacggccggatcgccaagttcagcaaggtgagaaccatcaccacccgaagcaacagcatcaaacaaggcaaggaccagcactttcctgtgttcatgaacgagaaggaggacatcctgtggtgtaccgagatggagagagtgttcgggttcccagtccactacacagatgtcagcaacatgtctagactggccagacagagactgctgggaagaagctggtccgtccctgtgatcagacacctgttcgcccctctgaaggagtacttcgcctgcgtgagcagcggcaacagcaacgccaacagccggggccccagcttctctagcggcctggtgccactgtccctgagagggagccacatgggccccatggagatctacaaaaccgtgagcgcctggaagcggcagcctgtgcgcgtgctgagcctgtttcggaatatcgataaagtcctgaaaagcctgggattcctggagagcggctctggctccggcggtggcaccctgaagtacgtggaggatgtgacaaacgtggtcagacgggatgtggagaagtggggccccttcgatctggtgtacggcagcacccaacccctgggcagctcttgtgaccggtgccctggctggtacatgtttcagttccaccggatcctgcagtacgccctgccgagacaggagtcccagcggccattcttttggattttcatggacaacttgctgctgaccgaggatgaccaggaaactaccactcggttcctgcagaccgaagccgtgaccctgcaggacgtgagaggccgggactaccagaacgccatgcgggtgtggtccaacatccctggactgaaaagcaagcacgcacctctgacccctaaagaagaggagtacctgcaggcccaggtgcggagcagaagcaagctggacgcccctaaggtggatctgctggtgaagaattgcctcctgcccctgagagagtacttcaagtatttcagccagaatagtctgcccctgggcggcccaagcagcggcgcccctcctcccagcggcggcagcccagccggctccccaacctctaccgaggagggcacctctgagtccgccacccccgagagcggccctggcacctccaccgagcccagcgagggcagcgcacccggcagccctgccggcagccccacctccacagaggagggaaccagcaccgagcccagcgaaggcagcgccccaggcaccagcaccgagcctagtgagggcggctctggcggcggcagcgcccaggagattaaacggatcaacaagatcagaagaagacttgtgaaagacagcaacaccaagaaggccggcaagacaggccccatgaaaaccctgctggttagagtgatgacacccgatctgagagagcggctggaaaacctgagaaagaagcctgaaaatatcccccagcccatcagcaatacatctagagccaacctgaataagctgctgaccgattacaccgaaatgaagaaggcgatcctgcatgtgtactgggaagagttccagaaggaccctgtgggcctgatgagccgggtggcccagcctgccagcaagaagatcgatcagaacaagctgaaacctgagatggacgagaagggcaacctgaccaccgccggctttgcctgctctcagtgtggccagcccctgttcgtgtacaagctggagcaggtgtctgagaagggcaaggcttacaccaactacttcggacggtgcaatgtggccgagcacgaaaagctgatcctgctggcccagctgaagcccgagaaggatagcgacgaagccgtgacatatagcctgggaaagtttgggcagagggccctggatttctacagcattcatgtgaccaaggagtccacccaccccgtgaagcccctggcccagatcgccggaaacagatacgcctccggacctgtgggaaaggccctgagcgacgcatgtatgggcacaatcgcctccttcctgtctaagtaccaggacatcatcatcgaacaccagaaggtggtgaagggcaaccagaagagactggagagcctgcgggagctggccggcaaggaaaacctggaataccctagcgtgaccctgccacctcagcctcacaccaaggagggcgttgatgcctacaacgaagtgatcgcccgggtgcgaatgtgggtgaacctgaacctgtggcagaagctgaagctaagcagagatgatgccaagcctctgctgagactgaagggattcccttcctttcctctggtcgagagacaggccaacgaagtggactggtgggacatggtgtgtaacgtgaagaagctgatcaacgagaaaaaggaggatggcaaggtgttttggcagaatctggctggctacaagagacaggaagccctgagaccatacctgagcagcgaggaagatcggaagaagggaaagaaattcgctcggtaccagctgggcgacctgctgctgcacctggaaaagaagcacggcgaggactggggaaaggtgtacgacgaggcctgggagcggattgacaagaaagtggaaggcctgagcaagcacatcaagctggaagaggaacggagaagcgaggacgcccagagcaaggccgccctgaccgactggctgcgggctaaggccagcttcgtgatcgagggcctgaaggaggccgacaaggacgagttctgcagatgcgagctgaagctgcagaagtggtacggggacctgcggggaaagcccttcgccatcgaagccgagaacagcatcctggacatcagcggcttcagcaagcagtacaactgtgccttcatctggcagaaggacggcgtgaagaagctgaacctgtacctgatcatcaactacttcaagggcggcaagctgcggttcaagaagatcaaacctgaagccttcgaagccaacagattctacaccgtgatcaacaaaaagagcggcgagatcgtgcccatggaggtgaacttcaacttcgacgaccccaacctgatcatcctgcctctggcctttggcaagagacagggcagagaattcatctggaacgacctgctgtccctggaaaccggcagcctgaagctggccaacggaagagtgatcgagaagacactgtacaacagaagaacccggcaggatgagcctgccctgttcgtggccctgaccttcgagcggcgggaggtcctggactcctccaatatcaaaccaatgaacctgatcggcgtggcaagaggcgaaaacatccccgccgtgatcgccctgaccgaccccgagggctgcccactgagccggtttaaggatagcctgggaaacccaacccacatcctgagaatcggcgagagctataaggagaagcagcggaccatccaggccaagaaggaggtggagcagcggagagccggcggctacagccggaagtacgccagcaaagccaagaatctggcagacgatatggtgagaaacaccgctagagatctgctgtactacgccgtgacccaggatgccatgctgatcttcgccaacctgagccggggcttcggccggcagggcaagcggaccttcatggccgagagacagtacacacggatggaggactggctgaccgccaagctggcctacgagggcctgagcaagacctacctgtccaagacactggcccagtacacctccaagacatgcagcaactgtgggtttaccatcaccagcgccgactacgacagggtgctggagaagctgaagaagacagcaacaggctggatgaccacaattaacggcaaggagctgaaggtggagggccagattacctactacaacagatacaagagacagaacgtagtcaaggacctgtccgtcgagctggatagactgagcgaagaatctgtgaacaacgacatctcctcctggacaaagggcagaagcggagaagctctgagcctcctgaagaaaagattctcccatagacccgtgcaggagaagttcgtgtgcctgaactgcggcttcgagacacacgcagccgagcaagccgccctgaacatcgccagatcctggctgttcctgcggagccaggagtacaagaaataccagacaaacaagacaaccggcaacaccgataagagagccttcgtcgagacctggcagtccttttaccggaagaagcttaaggaggtgtggaaacctgccgtgcggtctggcggatctggcggaggctccacaagcgcctacggcagcctgagcttcggcgaggtggccatcagcttcagccaggaggagtgggagtgcctggaccccgcccagagggccctgtacagggacgtgatgctggagacctacagcaacctggtgagcctggccggcagcagcatcagcaagcccgacgtgatcaccctgctggagcaggagaaggagccctgggtggtggtgaggagggagaccagcaggtggtaccccgacctggagagcaccagccccaagaaaaagagaaaagtctaagctgccttctgcggggcttgccttctggccatgcccttcttctctcccttgcacctgtacctcttggtctttgaataaagcctgagtaggaaggctagcaaaaaaaaaaaaaaaaaaaaaaaaaaaaaaaaaaaaaaaaaaaaaaaaaaaaaaaaaaaaaaaaaaaaaaaaaaaaaaaa

SEQ ID NO: 3413 - RNA, 5419 nt, synthetic construct
  source 1..5419: mol_type = other RNA
aggaaataagagagaaaagaagagtaagaagaaatataagagccaccatggcccctaagaagaagcgtaaagtgagccgggtgaacggcagcggcagcggcggcggcatgaaccacgaccaggagttcgacccccctaaggtgtaccctcccgtccccgccgagaagagaaagcccatccgggtcctgagcctgttcgatggcatcgccaccggtctgctggtgctgaaggacctgggcatccaggtggataggtacattgcctccgaggtgtgcgaggactccatcaccgtgggaatggtgcgtcatcagggcaagatcatgtacgtgggcgacgtgcggagcgtgacacagaagcatatccaggagtggggccctttcgacctggtgatcggcggcagcccttgcaatgacctgagcatcgtgaacccagcccggaagggcctgtacgagggaaccggcagactgttcttcgagttttacagactgctgcacgacgcccggcctaaggaaggcgacgaccggcccttcttttggctgttcgagaatgtggtggccatgggagtcagcgacaagcgggatattagccggttcctggagagcaaccccgtgatgatcgatgccaaggaagtgagcgccgcccaccgggccagatacttctggggcaatctgcctggcatgaacagacccctggccagcaccgtgaacgacaagctggagctgcaggagtgcctggagcacggccggatcgccaagttcagcaaggtgagaaccatcaccacccgaagcaacagcatcaaacaaggcaaggaccagcactttcctgtgttcatgaacgagaaggaggacatcctgtggtgtaccgagatggagagagtgttcgggttcccagtccactacacagatgtcagcaacatgtctagactggccagacagagactgctgggaagaagctggtccgtccctgtgatcagacacctgttcgcccctctgaaggagtacttcgcctgcgtgagcagcggcaacagcaacgccaacagccggggccccagcttctctagcggcctggtgccactgtccctgagagggagccacatgggccccatggagatctacaaaaccgtgagcgcctggaagcggcagcctgtgcgcgtgctgagcctgtttcggaatatcgataaagtcctgaaaagcctgggattcctggagagcggctctggctccggcggtggcaccctgaagtacgtggaggatgtgacaaacgtggtcagacgggatgtggagaagtggggccccttcgatctggtgtacggcagcacccaacccctgggcagctcttgtgaccggtgccctggctggtacatgtttcagttccaccggatcctgcagtacgccctgccgagacaggagtcccagcggccattcttttggattttcatggacaacttgctgctgaccgaggatgaccaggaaactaccactcggttcctgcagaccgaagccgtgaccctgcaggacgtgagaggccgggactaccagaacgccatgcgggtgtggtccaacatccctggactgaaaagcaagcacgcacctctgacccctaaagaagaggagtacctgcaggcccaggtgcggagcagaagcaagctggacgcccctaaggtggatctgctggtgaagaattgcctcctgcccctgagagagtacttcaagtatttcagccagaatagtctgcccctgggcggcccaagcagcggcgcccctcctcccagcggcggcagcccagccggctccccaacctctaccgaggagggcacctctgagtccgccacccccgagagcggccctggcacctccaccgagcccagcgagggcagcgcacccggcagccctgccggcagccccacctccacagaggagggaaccagcaccgagcccagcgaaggcagcgccccaggcaccagcaccgagcctagtgagggcggctctggcggcggcagcgcccaggagattaaacggatcaacaagatcagaagaagacttgtgaaagacagcaacaccaagaaggccggcaagacaggccccatgaaaaccctgctggttagagtgatgacacccgatctgagagagcggctggaaaacctgagaaagaagcctgaaaatatcccccagcccatcagcaatacatctagagccaacctgaataagctgctgaccgattacaccgaaatgaagaaggcgatcctgcatgtgtactgggaagagttccagaaggaccctgtgggcctgatgagccgggtggcccagcctgccagcaagaagatcgatcagaacaagctgaaacctgagatggacgagaagggcaacctgaccaccgccggctttgcctgctctcagtgtggccagcccctgttcgtgtacaagctggagcaggtgtctgagaagggcaaggcttacaccaactacttcggacggtgcaatgtggccgagcacgaaaagctgatcctgctggcccagctgaagcccgagaaggatagcgacgaagccgtgacatatagcctgggaaagtttgggcagagggccctggatttctacagcattcatgtgaccaaggagtccacccaccccgtgaagcccctggcccagatcgccggaaacagatacgcctccggacctgtgggaaaggccctgagcgacgcatgtatgggcacaatcgcctccttcctgtctaagtaccaggacatcatcatcgaacaccagaaggtggtgaagggcaaccagaagagactggagagcctgcgggagctggccggcaaggaaaacctggaataccctagcgtgaccctgccacctcagcctcacaccaaggagggcgttgatgcctacaacgaagtgatcgcccgggtgcgaatgtgggtgaacctgaacctgtggcagaagctgaagctaagcagagatgatgccaagcctctgctgagactgaagggattcccttcctttcctctggtcgagagacaggccaacgaagtggactggtgggacatggtgtgtaacgtgaagaagctgatcaacgagaaaaaggaggatggcaaggtgttttggcagaatctggctggctacaagagacaggaagccctgagaccatacctgagcagcgaggaagatcggaagaagggaaagaaattcgctcggtaccagctgggcgacctgctgctgcacctggaaaagaagcacggcgaggactggggaaaggtgtacgacgaggcctgggagcggattgacaagaaagtggaaggcctgagcaagcacatcaagctggaagaggaacggagaagcgaggacgcccagagcaaggccgccctgaccgactggctgcgggctaaggccagcttcgtgatcgagggcctgaaggaggccgacaaggacgagttctgcagatgcgagctgaagctgcagaagtggtacggggacctgcggggaaagcccttcgccatcgaagccgagaacagcatcctggacatcagcggcttcagcaagcagtacaactgtgccttcatctggcagaaggacggcgtgaagaagctgaacctgtacctgatcatcaactacttcaagggcggcaagctgcggttcaagaagatcaaacctgaagccttcgaagccaacagattctacaccgtgatcaacaaaaagagcggcgagatcgtgcccatggaggtgaacttcaacttcgacgaccccaacctgatcatcctgcctctggcctttggcaagagacagggcagagaattcatctggaacgacctgctgtccctggaaaccggcagcctgaagctggccaacggaagagtgatcgagaagacactgtacaacagaagaacccggcaggatgagcctgccctgttcgtggccctgaccttcgagcggcgggaggtcctggactcctccaatatcaaaccaatgaacctgatcggcgtggcaagaggcgaaaacatccccgccgtgatcgccctgaccgaccccgagggctgcccactgagccggtttaaggatagcctgggaaacccaacccacatcctgagaatcggcgagagctataaggagaagcagcggaccatccaggccaagaaggaggtggagcagcggagagccggcggctacagccggaagtacgccagcaaagccaagaatctggcagacgatatggtgagaaacaccgctagagatctgctgtactacgccgtgacccaggatgccatgctgatcttcgccaacctgagccggggcttcggccggcagggcaagcggaccttcatggccgagagacagtacacacggatggaggactggctgaccgccaagctggcctacgagggcctgagcaagacctacctgtccaagacactggcccagtacacctccaagacatgcagcaactgtgggtttaccatcaccagcgccgactacgacagggtgctggagaagctgaagaagacagcaacaggctggatgaccacaattaacggcaaggagctgaaggtggagggccagattacctactacaacagatacaagagacagaacgtagtcaaggacctgtccgtcgagctggatagactgagcgaagaatctgtgaacaacgacatctcctcctggacaaagggcagaagcggagaagctctgagcctcctgaagaaaagattctcccatagacccgtgcaggagaagttcgtgtgcctgaactgcggcttcgagacacacgcagccgagcaagccgccctgaacatcgccagatcctggctgttcctgcggagccaggagtacaagaaataccagacaaacaagacaaccggcaacaccgataagagagccttcgtcgagacctggcagtccttttaccggaagaagcttaaggaggtgtggaaacctgccgtgcggtctggcggatctggcggaggctccacaagccagctgaccttcgaggacgtggccctgagcttcagcaaggaggagtggcagatcatggaccccaaccagaagaccctgtacatcgacgtgatgagggagatctacgagaccgtgaccagcctgggcctgaagctgaagaacgacaccggcaacgaccagcccgtgagcctgagcaccagcgagatccagcccagcggctgcaaggtgctgaggaaggccaggatgaaggtggcccagaccaccaccagccccaagaaaaagagaaaagtctaagctgccttctgcggggcttgccttctggccatgcccttcttctctcccttgcacctgtacctcttggtctttgaataaagcctgagtaggaaggctagcaaaaaaaaaaaaaaaaaaaaaaaaaaaaaaaaaaaaaaaaaaaaaaaaaaaaaaaaaaaaaaaaaaaaaaaaaaaaaaaa

SEQ ID NO: 3414 - RNA, 5419 nt, synthetic construct
  source 1..5419: mol_type = other RNA
aggaaataagagagaaaagaagagtaagaagaaatataagagccaccatggcccctaagaagaagcgtaaagtgagccgggtgaacggcagcggcagcggcggcggcatgaaccacgaccaggagttcgacccccctaaggtgtaccctcccgtccccgccgagaagagaaagcccatccgggtcctgagcctgttcgatggcatcgccaccggtctgctggtgctgaaggacctgggcatccaggtggataggtacattgcctccgaggtgtgcgaggactccatcaccgtgggaatggtgcgtcatcagggcaagatcatgtacgtgggcgacgtgcggagcgtgacacagaagcatatccaggagtggggccctttcgacctggtgatcggcggcagcccttgcaatgacctgagcatcgtgaacccagcccggaagggcctgtacgagggaaccggcagactgttcttcgagttttacagactgctgcacgacgcccggcctaaggaaggcgacgaccggcccttcttttggctgttcgagaatgtggtggccatgggagtcagcgacaagcgggatattagccggttcctggagagcaaccccgtgatgatcgatgccaaggaagtgagcgccgcccaccgggccagatacttctggggcaatctgcctggcatgaacagacccctggccagcaccgtgaacgacaagctggagctgcaggagtgcctggagcacggccggatcgccaagttcagcaaggtgagaaccatcaccacccgaagcaacagcatcaaacaaggcaaggaccagcactttcctgtgttcatgaacgagaaggaggacatcctgtggtgtaccgagatggagagagtgttcgggttcccagtccactacacagatgtcagcaacatgtctagactggccagacagagactgctgggaagaagctggtccgtccctgtgatcagacacctgttcgcccctctgaaggagtacttcgcctgcgtgagcagcggcaacagcaacgccaacagccggggccccagcttctctagcggcctggtgccactgtccctgagagggagccacatgggccccatggagatctacaaaaccgtgagcgcctggaagcggcagcctgtgcgcgtgctgagcctgtttcggaatatcgataaagtcctgaaaagcctgggattcctggagagcggctctggctccggcggtggcaccctgaagtacgtggaggatgtgacaaacgtggtcagacgggatgtggagaagtggggccccttcgatctggtgtacggcagcacccaacccctgggcagctcttgtgaccggtgccctggctggtacatgtttcagttccaccggatcctgcagtacgccctgccgagacaggagtcccagcggccattcttttggattttcatggacaacttgctgctgaccgaggatgaccaggaaactaccactcggttcctgcagaccgaagccgtgaccctgcaggacgtgagaggccgggactaccagaacgccatgcgggtgtggtccaacatccctggactgaaaagcaagcacgcacctctgacccctaaagaagaggagtacctgcaggcccaggtgcggagcagaagcaagctggacgcccctaaggtggatctgctggtgaagaattgcctcctgcccctgagagagtacttcaagtatttcagccagaatagtctgcccctgggcggcccaagcagcggcgcccctcctcccagcggcggcagcccagccggctccccaacctctaccgaggagggcacctctgagtccgccacccccgagagcggccctggcacctccaccgagcccagcgagggcagcgcacccggcagccctgccggcagccccacctccacagaggagggaaccagcaccgagcccagcgaaggcagcgccccaggcaccagcaccgagcctagtgagggcggctctggcggcggcagcgcccaggagattaaacggatcaacaagatcagaagaagacttgtgaaagacagcaacaccaagaaggccggcaagacaggccccatgaaaaccctgctggttagagtgatgacacccgatctgagagagcggctggaaaacctgagaaagaagcctgaaaatatcccccagcccatcagcaatacatctagagccaacctgaataagctgctgaccgattacaccgaaatgaagaaggcgatcctgcatgtgtactgggaagagttccagaaggaccctgtgggcctgatgagccgggtggcccagcctgccagcaagaagatcgatcagaacaagctgaaacctgagatggacgagaagggcaacctgaccaccgccggctttgcctgctctcagtgtggccagcccctgttcgtgtacaagctggagcaggtgtctgagaagggcaaggcttacaccaactacttcggacggtgcaatgtggccgagcacgaaaagctgatcctgctggcccagctgaagcccgagaaggatagcgacgaagccgtgacatatagcctgggaaagtttgggcagagggccctggatttctacagcattcatgtgaccaaggagtccacccaccccgtgaagcccctggcccagatcgccggaaacagatacgcctccggacctgtgggaaaggccctgagcgacgcatgtatgggcacaatcgcctccttcctgtctaagtaccaggacatcatcatcgaacaccagaaggtggtgaagggcaaccagaagagactggagagcctgcgggagctggccggcaaggaaaacctggaataccctagcgtgaccctgccacctcagcctcacaccaaggagggcgttgatgcctacaacgaagtgatcgcccgggtgcgaatgtgggtgaacctgaacctgtggcagaagctgaagctaagcagagatgatgccaagcctctgctgagactgaagggattcccttcctttcctctggtcgagagacaggccaacgaagtggactggtgggacatggtgtgtaacgtgaagaagctgatcaacgagaaaaaggaggatggcaaggtgttttggcagaatctggctggctacaagagacaggaagccctgagaccatacctgagcagcgaggaagatcggaagaagggaaagaaattcgctcggtaccagctgggcgacctgctgctgcacctggaaaagaagcacggcgaggactggggaaaggtgtacgacgaggcctgggagcggattgacaagaaagtggaaggcctgagcaagcacatcaagctggaagaggaacggagaagcgaggacgcccagagcaaggccgccctgaccgactggctgcgggctaaggccagcttcgtgatcgagggcctgaaggaggccgacaaggacgagttctgcagatgcgagctgaagctgcagaagtggtacggggacctgcggggaaagcccttcgccatcgaagccgagaacagcatcctggacatcagcggcttcagcaagcagtacaactgtgccttcatctggcagaaggacggcgtgaagaagctgaacctgtacctgatcatcaactacttcaagggcggcaagctgcggttcaagaagatcaaacctgaagccttcgaagccaacagattctacaccgtgatcaacaaaaagagcggcgagatcgtgcccatggaggtgaacttcaacttcgacgaccccaacctgatcatcctgcctctggcctttggcaagagacagggcagagaattcatctggaacgacctgctgtccctggaaaccggcagcctgaagctggccaacggaagagtgatcgagaagacactgtacaacagaagaacccggcaggatgagcctgccctgttcgtggccctgaccttcgagcggcgggaggtcctggactcctccaatatcaaaccaatgaacctgatcggcgtggcaagaggcgaaaacatccccgccgtgatcgccctgaccgaccccgagggctgcccactgagccggtttaaggatagcctgggaaacccaacccacatcctgagaatcggcgagagctataaggagaagcagcggaccatccaggccaagaaggaggtggagcagcggagagccggcggctacagccggaagtacgccagcaaagccaagaatctggcagacgatatggtgagaaacaccgctagagatctgctgtactacgccgtgacccaggatgccatgctgatcttcgccaacctgagccggggcttcggccggcagggcaagcggaccttcatggccgagagacagtacacacggatggaggactggctgaccgccaagctggcctacgagggcctgagcaagacctacctgtccaagacactggcccagtacacctccaagacatgcagcaactgtgggtttaccatcaccagcgccgactacgacagggtgctggagaagctgaagaagacagcaacaggctggatgaccacaattaacggcaaggagctgaaggtggagggccagattacctactacaacagatacaagagacagaacgtagtcaaggacctgtccgtcgagctggatagactgagcgaagaatctgtgaacaacgacatctcctcctggacaaagggcagaagcggagaagctctgagcctcctgaagaaaagattctcccatagacccgtgcaggagaagttcgtgtgcctgaactgcggcttcgagacacacgcagccgagcaagccgccctgaacatcgccagatcctggctgttcctgcggagccaggagtacaagaaataccagacaaacaagacaaccggcaacaccgataagagagccttcgtcgagacctggcagtccttttaccggaagaagcttaaggaggtgtggaaacctgccgtgcggtctggcggatctggcggaggctccacaagcgagaagggccccctgaccttcagggacgtggtgatcgagttcagccaggaggagtggcagtgcctggacaccgcccagcaggacctgtacaggaaggtgatgctggagaacttcaggaacctggtgttcctgggcatcgacgtgagcaagcccgacctgatcacctgcctggagcagggcaagaacccctggaacatgaagaggcacagcatggtggccaccccccccggcgtgttcttcgtgaccagccccaagaaaaagagaaaagtctaagctgccttctgcggggcttgccttctggccatgcccttcttctctcccttgcacctgtacctcttggtctttgaataaagcctgagtaggaaggctagcaaaaaaaaaaaaaaaaaaaaaaaaaaaaaaaaaaaaaaaaaaaaaaaaaaaaaaaaaaaaaaaaaaaaaaaaaaaaaaaa

SEQ ID NO: 3415 - RNA, 5419 nt, synthetic construct
  source 1..5419: mol_type = other RNA
aggaaataagagagaaaagaagagtaagaagaaatataagagccaccatggcccctaagaagaagcgtaaagtgagccgggtgaacggcagcggcagcggcggcggcatgaaccacgaccaggagttcgacccccctaaggtgtaccctcccgtccccgccgagaagagaaagcccatccgggtcctgagcctgttcgatggcatcgccaccggtctgctggtgctgaaggacctgggcatccaggtggataggtacattgcctccgaggtgtgcgaggactccatcaccgtgggaatggtgcgtcatcagggcaagatcatgtacgtgggcgacgtgcggagcgtgacacagaagcatatccaggagtggggccctttcgacctggtgatcggcggcagcccttgcaatgacctgagcatcgtgaacccagcccggaagggcctgtacgagggaaccggcagactgttcttcgagttttacagactgctgcacgacgcccggcctaaggaaggcgacgaccggcccttcttttggctgttcgagaatgtggtggccatgggagtcagcgacaagcgggatattagccggttcctggagagcaaccccgtgatgatcgatgccaaggaagtgagcgccgcccaccgggccagatacttctggggcaatctgcctggcatgaacagacccctggccagcaccgtgaacgacaagctggagctgcaggagtgcctggagcacggccggatcgccaagttcagcaaggtgagaaccatcaccacccgaagcaacagcatcaaacaaggcaaggaccagcactttcctgtgttcatgaacgagaaggaggacatcctgtggtgtaccgagatggagagagtgttcgggttcccagtccactacacagatgtcagcaacatgtctagactggccagacagagactgctgggaagaagctggtccgtccctgtgatcagacacctgttcgcccctctgaaggagtacttcgcctgcgtgagcagcggcaacagcaacgccaacagccggggccccagcttctctagcggcctggtgccactgtccctgagagggagccacatgggccccatggagatctacaaaaccgtgagcgcctggaagcggcagcctgtgcgcgtgctgagcctgtttcggaatatcgataaagtcctgaaaagcctgggattcctggagagcggctctggctccggcggtggcaccctgaagtacgtggaggatgtgacaaacgtggtcagacgggatgtggagaagtggggccccttcgatctggtgtacggcagcacccaacccctgggcagctcttgtgaccggtgccctggctggtacatgtttcagttccaccggatcctgcagtacgccctgccgagacaggagtcccagcggccattcttttggattttcatggacaacttgctgctgaccgaggatgaccaggaaactaccactcggttcctgcagaccgaagccgtgaccctgcaggacgtgagaggccgggactaccagaacgccatgcgggtgtggtccaacatccctggactgaaaagcaagcacgcacctctgacccctaaagaagaggagtacctgcaggcccaggtgcggagcagaagcaagctggacgcccctaaggtggatctgctggtgaagaattgcctcctgcccctgagagagtacttcaagtatttcagccagaatagtctgcccctgggcggcccaagcagcggcgcccctcctcccagcggcggcagcccagccggctccccaacctctaccgaggagggcacctctgagtccgccacccccgagagcggccctggcacctccaccgagcccagcgagggcagcgcacccggcagccctgccggcagccccacctccacagaggagggaaccagcaccgagcccagcgaaggcagcgccccaggcaccagcaccgagcctagtgagggcggctctggcggcggcagcgcccaggagattaaacggatcaacaagatcagaagaagacttgtgaaagacagcaacaccaagaaggccggcaagacaggccccatgaaaaccctgctggttagagtgatgacacccgatctgagagagcggctggaaaacctgagaaagaagcctgaaaatatcccccagcccatcagcaatacatctagagccaacctgaataagctgctgaccgattacaccgaaatgaagaaggcgatcctgcatgtgtactgggaagagttccagaaggaccctgtgggcctgatgagccgggtggcccagcctgccagcaagaagatcgatcagaacaagctgaaacctgagatggacgagaagggcaacctgaccaccgccggctttgcctgctctcagtgtggccagcccctgttcgtgtacaagctggagcaggtgtctgagaagggcaaggcttacaccaactacttcggacggtgcaatgtggccgagcacgaaaagctgatcctgctggcccagctgaagcccgagaaggatagcgacgaagccgtgacatatagcctgggaaagtttgggcagagggccctggatttctacagcattcatgtgaccaaggagtccacccaccccgtgaagcccctggcccagatcgccggaaacagatacgcctccggacctgtgggaaaggccctgagcgacgcatgtatgggcacaatcgcctccttcctgtctaagtaccaggacatcatcatcgaacaccagaaggtggtgaagggcaaccagaagagactggagagcctgcgggagctggccggcaaggaaaacctggaataccctagcgtgaccctgccacctcagcctcacaccaaggagggcgttgatgcctacaacgaagtgatcgcccgggtgcgaatgtgggtgaacctgaacctgtggcagaagctgaagctaagcagagatgatgccaagcctctgctgagactgaagggattcccttcctttcctctggtcgagagacaggccaacgaagtggactggtgggacatggtgtgtaacgtgaagaagctgatcaacgagaaaaaggaggatggcaaggtgttttggcagaatctggctggctacaagagacaggaagccctgagaccatacctgagcagcgaggaagatcggaagaagggaaagaaattcgctcggtaccagctgggcgacctgctgctgcacctggaaaagaagcacggcgaggactggggaaaggtgtacgacgaggcctgggagcggattgacaagaaagtggaaggcctgagcaagcacatcaagctggaagaggaacggagaagcgaggacgcccagagcaaggccgccctgaccgactggctgcgggctaaggccagcttcgtgatcgagggcctgaaggaggccgacaaggacgagttctgcagatgcgagctgaagctgcagaagtggtacggggacctgcggggaaagcccttcgccatcgaagccgagaacagcatcctggacatcagcggcttcagcaagcagtacaactgtgccttcatctggcagaaggacggcgtgaagaagctgaacctgtacctgatcatcaactacttcaagggcggcaagctgcggttcaagaagatcaaacctgaagccttcgaagccaacagattctacaccgtgatcaacaaaaagagcggcgagatcgtgcccatggaggtgaacttcaacttcgacgaccccaacctgatcatcctgcctctggcctttggcaagagacagggcagagaattcatctggaacgacctgctgtccctggaaaccggcagcctgaagctggccaacggaagagtgatcgagaagacactgtacaacagaagaacccggcaggatgagcctgccctgttcgtggccctgaccttcgagcggcgggaggtcctggactcctccaatatcaaaccaatgaacctgatcggcgtggcaagaggcgaaaacatccccgccgtgatcgccctgaccgaccccgagggctgcccactgagccggtttaaggatagcctgggaaacccaacccacatcctgagaatcggcgagagctataaggagaagcagcggaccatccaggccaagaaggaggtggagcagcggagagccggcggctacagccggaagtacgccagcaaagccaagaatctggcagacgatatggtgagaaacaccgctagagatctgctgtactacgccgtgacccaggatgccatgctgatcttcgccaacctgagccggggcttcggccggcagggcaagcggaccttcatggccgagagacagtacacacggatggaggactggctgaccgccaagctggcctacgagggcctgagcaagacctacctgtccaagacactggcccagtacacctccaagacatgcagcaactgtgggtttaccatcaccagcgccgactacgacagggtgctggagaagctgaagaagacagcaacaggctggatgaccacaattaacggcaaggagctgaaggtggagggccagattacctactacaacagatacaagagacagaacgtagtcaaggacctgtccgtcgagctggatagactgagcgaagaatctgtgaacaacgacatctcctcctggacaaagggcagaagcggagaagctctgagcctcctgaagaaaagattctcccatagacccgtgcaggagaagttcgtgtgcctgaactgcggcttcgagacacacgcagccgagcaagccgccctgaacatcgccagatcctggctgttcctgcggagccaggagtacaagaaataccagacaaacaagacaaccggcaacaccgataagagagccttcgtcgagacctggcagtccttttaccggaagaagcttaaggaggtgtggaaacctgccgtgcggtctggcggatctggcggaggctccacaagcttccagcacctggtgatgttcagggacgtggccgtggacttcagccaggaggagtgggagtgcctgaacagctaccagaggaacctgtacagggacgtgatcctggagaactacagcaacctggtgagcgtgggctgcaccatcagcaagcccgacgtgatcaccctgctggagcagggcaaggagccctggatggtggtgagggacgagaggaggaggaggagcctggacctggaggccaggaccagccccaagaaaaagagaaaagtctaagctgccttctgcggggcttgccttctggccatgcccttcttctctcccttgcacctgtacctcttggtctttgaataaagcctgagtaggaaggctagcaaaaaaaaaaaaaaaaaaaaaaaaaaaaaaaaaaaaaaaaaaaaaaaaaaaaaaaaaaaaaaaaaaaaaaaaaaaaaaaa

SEQ ID NO: 3416 - RNA, 5428 nt, synthetic construct
  source 1..5428: mol_type = other RNA
aggaaataagagagaaaagaagagtaagaagaaatataagagccaccatggcccctaagaagaagcgtaaagtgagccgggtgaacggcagcggcagcggcggcggcatgaaccacgaccaggagttcgacccccctaaggtgtaccctcccgtccccgccgagaagagaaagcccatccgggtcctgagcctgttcgatggcatcgccaccggtctgctggtgctgaaggacctgggcatccaggtggataggtacattgcctccgaggtgtgcgaggactccatcaccgtgggaatggtgcgtcatcagggcaagatcatgtacgtgggcgacgtgcggagcgtgacacagaagcatatccaggagtggggccctttcgacctggtgatcggcggcagcccttgcaatgacctgagcatcgtgaacccagcccggaagggcctgtacgagggaaccggcagactgttcttcgagttttacagactgctgcacgacgcccggcctaaggaaggcgacgaccggcccttcttttggctgttcgagaatgtggtggccatgggagtcagcgacaagcgggatattagccggttcctggagagcaaccccgtgatgatcgatgccaaggaagtgagcgccgcccaccgggccagatacttctggggcaatctgcctggcatgaacagacccctggccagcaccgtgaacgacaagctggagctgcaggagtgcctggagcacggccggatcgccaagttcagcaaggtgagaaccatcaccacccgaagcaacagcatcaaacaaggcaaggaccagcactttcctgtgttcatgaacgagaaggaggacatcctgtggtgtaccgagatggagagagtgttcgggttcccagtccactacacagatgtcagcaacatgtctagactggccagacagagactgctgggaagaagctggtccgtccctgtgatcagacacctgttcgcccctctgaaggagtacttcgcctgcgtgagcagcggcaacagcaacgccaacagccggggccccagcttctctagcggcctggtgccactgtccctgagagggagccacatgggccccatggagatctacaaaaccgtgagcgcctggaagcggcagcctgtgcgcgtgctgagcctgtttcggaatatcgataaagtcctgaaaagcctgggattcctggagagcggctctggctccggcggtggcaccctgaagtacgtggaggatgtgacaaacgtggtcagacgggatgtggagaagtggggccccttcgatctggtgtacggcagcacccaacccctgggcagctcttgtgaccggtgccctggctggtacatgtttcagttccaccggatcctgcagtacgccctgccgagacaggagtcccagcggccattcttttggattttcatggacaacttgctgctgaccgaggatgaccaggaaactaccactcggttcctgcagaccgaagccgtgaccctgcaggacgtgagaggccgggactaccagaacgccatgcgggtgtggtccaacatccctggactgaaaagcaagcacgcacctctgacccctaaagaagaggagtacctgcaggcccaggtgcggagcagaagcaagctggacgcccctaaggtggatctgctggtgaagaattgcctcctgcccctgagagagtacttcaagtatttcagccagaatagtctgcccctgggcggcccaagcagcggcgcccctcctcccagcggcggcagcccagccggctccccaacctctaccgaggagggcacctctgagtccgccacccccgagagcggccctggcacctccaccgagcccagcgagggcagcgcacccggcagccctgccggcagccccacctccacagaggagggaaccagcaccgagcccagcgaaggcagcgccccaggcaccagcaccgagcctagtgagggcggctctggcggcggcagcgcccaggagattaaacggatcaacaagatcagaagaagacttgtgaaagacagcaacaccaagaaggccggcaagacaggccccatgaaaaccctgctggttagagtgatgacacccgatctgagagagcggctggaaaacctgagaaagaagcctgaaaatatcccccagcccatcagcaatacatctagagccaacctgaataagctgctgaccgattacaccgaaatgaagaaggcgatcctgcatgtgtactgggaagagttccagaaggaccctgtgggcctgatgagccgggtggcccagcctgccagcaagaagatcgatcagaacaagctgaaacctgagatggacgagaagggcaacctgaccaccgccggctttgcctgctctcagtgtggccagcccctgttcgtgtacaagctggagcaggtgtctgagaagggcaaggcttacaccaactacttcggacggtgcaatgtggccgagcacgaaaagctgatcctgctggcccagctgaagcccgagaaggatagcgacgaagccgtgacatatagcctgggaaagtttgggcagagggccctggatttctacagcattcatgtgaccaaggagtccacccaccccgtgaagcccctggcccagatcgccggaaacagatacgcctccggacctgtgggaaaggccctgagcgacgcatgtatgggcacaatcgcctccttcctgtctaagtaccaggacatcatcatcgaacaccagaaggtggtgaagggcaaccagaagagactggagagcctgcgggagctggccggcaaggaaaacctggaataccctagcgtgaccctgccacctcagcctcacaccaaggagggcgttgatgcctacaacgaagtgatcgcccgggtgcgaatgtgggtgaacctgaacctgtggcagaagctgaagctaagcagagatgatgccaagcctctgctgagactgaagggattcccttcctttcctctggtcgagagacaggccaacgaagtggactggtgggacatggtgtgtaacgtgaagaagctgatcaacgagaaaaaggaggatggcaaggtgttttggcagaatctggctggctacaagagacaggaagccctgagaccatacctgagcagcgaggaagatcggaagaagggaaagaaattcgctcggtaccagctgggcgacctgctgctgcacctggaaaagaagcacggcgaggactggggaaaggtgtacgacgaggcctgggagcggattgacaagaaagtggaaggcctgagcaagcacatcaagctggaagaggaacggagaagcgaggacgcccagagcaaggccgccctgaccgactggctgcgggctaaggccagcttcgtgatcgagggcctgaaggaggccgacaaggacgagttctgcagatgcgagctgaagctgcagaagtggtacggggacctgcggggaaagcccttcgccatcgaagccgagaacagcatcctggacatcagcggcttcagcaagcagtacaactgtgccttcatctggcagaaggacggcgtgaagaagctgaacctgtacctgatcatcaactacttcaagggcggcaagctgcggttcaagaagatcaaacctgaagccttcgaagccaacagattctacaccgtgatcaacaaaaagagcggcgagatcgtgcccatggaggtgaacttcaacttcgacgaccccaacctgatcatcctgcctctggcctttggcaagagacagggcagagaattcatctggaacgacctgctgtccctggaaaccggcagcctgaagctggccaacggaagagtgatcgagaagacactgtacaacagaagaacccggcaggatgagcctgccctgttcgtggccctgaccttcgagcggcgggaggtcctggactcctccaatatcaaaccaatgaacctgatcggcgtggcaagaggcgaaaacatccccgccgtgatcgccctgaccgaccccgagggctgcccactgagccggtttaaggatagcctgggaaacccaacccacatcctgagaatcggcgagagctataaggagaagcagcggaccatccaggccaagaaggaggtggagcagcggagagccggcggctacagccggaagtacgccagcaaagccaagaatctggcagacgatatggtgagaaacaccgctagagatctgctgtactacgccgtgacccaggatgccatgctgatcttcgccaacctgagccggggcttcggccggcagggcaagcggaccttcatggccgagagacagtacacacggatggaggactggctgaccgccaagctggcctacgagggcctgagcaagacctacctgtccaagacactggcccagtacacctccaagacatgcagcaactgtgggtttaccatcaccagcgccgactacgacagggtgctggagaagctgaagaagacagcaacaggctggatgaccacaattaacggcaaggagctgaaggtggagggccagattacctactacaacagatacaagagacagaacgtagtcaaggacctgtccgtcgagctggatagactgagcgaagaatctgtgaacaacgacatctcctcctggacaaagggcagaagcggagaagctctgagcctcctgaagaaaagattctcccatagacccgtgcaggagaagttcgtgtgcctgaactgcggcttcgagacacacgcagccgagcaagccgccctgaacatcgccagatcctggctgttcctgcggagccaggagtacaagaaataccagacaaacaagacaaccggcaacaccgataagagagccttcgtcgagacctggcagtccttttaccggaagaagcttaaggaggtgtggaaacctgccgtgcggtctggcggatctggcggaggctccacaagcctgaccttcgaggacgtggccgtgtacttcagcgaggaggagtggcagctgctgaaccccctggagaagaccctgtacaacgacgtgatgcaggacatctacgagaccgtgatcagcctgggcctgaagctgaagaacgacaccggcaacgaccaccccatcagcgtgagcaccagcgagatccagaccagcggctgcgaggtgagcaagaagaccaggatgaagatcgcccagaagaccatgggcagggagaccagccccaagaaaaagagaaaagtctaagctgccttctgcggggcttgccttctggccatgcccttcttctctcccttgcacctgtacctcttggtctttgaataaagcctgagtaggaaggctagcaaaaaaaaaaaaaaaaaaaaaaaaaaaaaaaaaaaaaaaaaaaaaaaaaaaaaaaaaaaaaaaaaaaaaaaaaaaaaaaa

SEQ ID NO: 3417 - RNA, 5419 nt, synthetic construct
  source 1..5419: mol_type = other RNA
aggaaataagagagaaaagaagagtaagaagaaatataagagccaccatggcccctaagaagaagcgtaaagtgagccgggtgaacggcagcggcagcggcggcggcatgaaccacgaccaggagttcgacccccctaaggtgtaccctcccgtccccgccgagaagagaaagcccatccgggtcctgagcctgttcgatggcatcgccaccggtctgctggtgctgaaggacctgggcatccaggtggataggtacattgcctccgaggtgtgcgaggactccatcaccgtgggaatggtgcgtcatcagggcaagatcatgtacgtgggcgacgtgcggagcgtgacacagaagcatatccaggagtggggccctttcgacctggtgatcggcggcagcccttgcaatgacctgagcatcgtgaacccagcccggaagggcctgtacgagggaaccggcagactgttcttcgagttttacagactgctgcacgacgcccggcctaaggaaggcgacgaccggcccttcttttggctgttcgagaatgtggtggccatgggagtcagcgacaagcgggatattagccggttcctggagagcaaccccgtgatgatcgatgccaaggaagtgagcgccgcccaccgggccagatacttctggggcaatctgcctggcatgaacagacccctggccagcaccgtgaacgacaagctggagctgcaggagtgcctggagcacggccggatcgccaagttcagcaaggtgagaaccatcaccacccgaagcaacagcatcaaacaaggcaaggaccagcactttcctgtgttcatgaacgagaaggaggacatcctgtggtgtaccgagatggagagagtgttcgggttcccagtccactacacagatgtcagcaacatgtctagactggccagacagagactgctgggaagaagctggtccgtccctgtgatcagacacctgttcgcccctctgaaggagtacttcgcctgcgtgagcagcggcaacagcaacgccaacagccggggccccagcttctctagcggcctggtgccactgtccctgagagggagccacatgggccccatggagatctacaaaaccgtgagcgcctggaagcggcagcctgtgcgcgtgctgagcctgtttcggaatatcgataaagtcctgaaaagcctgggattcctggagagcggctctggctccggcggtggcaccctgaagtacgtggaggatgtgacaaacgtggtcagacgggatgtggagaagtggggccccttcgatctggtgtacggcagcacccaacccctgggcagctcttgtgaccggtgccctggctggtacatgtttcagttccaccggatcctgcagtacgccctgccgagacaggagtcccagcggccattcttttggattttcatggacaacttgctgctgaccgaggatgaccaggaaactaccactcggttcctgcagaccgaagccgtgaccctgcaggacgtgagaggccgggactaccagaacgccatgcgggtgtggtccaacatccctggactgaaaagcaagcacgcacctctgacccctaaagaagaggagtacctgcaggcccaggtgcggagcagaagcaagctggacgcccctaaggtggatctgctggtgaagaattgcctcctgcccctgagagagtacttcaagtatttcagccagaatagtctgcccctgggcggcccaagcagcggcgcccctcctcccagcggcggcagcccagccggctccccaacctctaccgaggagggcacctctgagtccgccacccccgagagcggccctggcacctccaccgagcccagcgagggcagcgcacccggcagccctgccggcagccccacctccacagaggagggaaccagcaccgagcccagcgaaggcagcgccccaggcaccagcaccgagcctagtgagggcggctctggcggcggcagcgcccaggagattaaacggatcaacaagatcagaagaagacttgtgaaagacagcaacaccaagaaggccggcaagacaggccccatgaaaaccctgctggttagagtgatgacacccgatctgagagagcggctggaaaacctgagaaagaagcctgaaaatatcccccagcccatcagcaatacatctagagccaacctgaataagctgctgaccgattacaccgaaatgaagaaggcgatcctgcatgtgtactgggaagagttccagaaggaccctgtgggcctgatgagccgggtggcccagcctgccagcaagaagatcgatcagaacaagctgaaacctgagatggacgagaagggcaacctgaccaccgccggctttgcctgctctcagtgtggccagcccctgttcgtgtacaagctggagcaggtgtctgagaagggcaaggcttacaccaactacttcggacggtgcaatgtggccgagcacgaaaagctgatcctgctggcccagctgaagcccgagaaggatagcgacgaagccgtgacatatagcctgggaaagtttgggcagagggccctggatttctacagcattcatgtgaccaaggagtccacccaccccgtgaagcccctggcccagatcgccggaaacagatacgcctccggacctgtgggaaaggccctgagcgacgcatgtatgggcacaatcgcctccttcctgtctaagtaccaggacatcatcatcgaacaccagaaggtggtgaagggcaaccagaagagactggagagcctgcgggagctggccggcaaggaaaacctggaataccctagcgtgaccctgccacctcagcctcacaccaaggagggcgttgatgcctacaacgaagtgatcgcccgggtgcgaatgtgggtgaacctgaacctgtggcagaagctgaagctaagcagagatgatgccaagcctctgctgagactgaagggattcccttcctttcctctggtcgagagacaggccaacgaagtggactggtgggacatggtgtgtaacgtgaagaagctgatcaacgagaaaaaggaggatggcaaggtgttttggcagaatctggctggctacaagagacaggaagccctgagaccatacctgagcagcgaggaagatcggaagaagggaaagaaattcgctcggtaccagctgggcgacctgctgctgcacctggaaaagaagcacggcgaggactggggaaaggtgtacgacgaggcctgggagcggattgacaagaaagtggaaggcctgagcaagcacatcaagctggaagaggaacggagaagcgaggacgcccagagcaaggccgccctgaccgactggctgcgggctaaggccagcttcgtgatcgagggcctgaaggaggccgacaaggacgagttctgcagatgcgagctgaagctgcagaagtggtacggggacctgcggggaaagcccttcgccatcgaagccgagaacagcatcctggacatcagcggcttcagcaagcagtacaactgtgccttcatctggcagaaggacggcgtgaagaagctgaacctgtacctgatcatcaactacttcaagggcggcaagctgcggttcaagaagatcaaacctgaagccttcgaagccaacagattctacaccgtgatcaacaaaaagagcggcgagatcgtgcccatggaggtgaacttcaacttcgacgaccccaacctgatcatcctgcctctggcctttggcaagagacagggcagagaattcatctggaacgacctgctgtccctggaaaccggcagcctgaagctggccaacggaagagtgatcgagaagacactgtacaacagaagaacccggcaggatgagcctgccctgttcgtggccctgaccttcgagcggcgggaggtcctggactcctccaatatcaaaccaatgaacctgatcggcgtggcaagaggcgaaaacatccccgccgtgatcgccctgaccgaccccgagggctgcccactgagccggtttaaggatagcctgggaaacccaacccacatcctgagaatcggcgagagctataaggagaagcagcggaccatccaggccaagaaggaggtggagcagcggagagccggcggctacagccggaagtacgccagcaaagccaagaatctggcagacgatatggtgagaaacaccgctagagatctgctgtactacgccgtgacccaggatgccatgctgatcttcgccaacctgagccggggcttcggccggcagggcaagcggaccttcatggccgagagacagtacacacggatggaggactggctgaccgccaagctggcctacgagggcctgagcaagacctacctgtccaagacactggcccagtacacctccaagacatgcagcaactgtgggtttaccatcaccagcgccgactacgacagggtgctggagaagctgaagaagacagcaacaggctggatgaccacaattaacggcaaggagctgaaggtggagggccagattacctactacaacagatacaagagacagaacgtagtcaaggacctgtccgtcgagctggatagactgagcgaagaatctgtgaacaacgacatctcctcctggacaaagggcagaagcggagaagctctgagcctcctgaagaaaagattctcccatagacccgtgcaggagaagttcgtgtgcctgaactgcggcttcgagacacacgcagccgagcaagccgccctgaacatcgccagatcctggctgttcctgcggagccaggagtacaagaaataccagacaaacaagacaaccggcaacaccgataagagagccttcgtcgagacctggcagtccttttaccggaagaagcttaaggaggtgtggaaacctgccgtgcggtctggcggatctggcggaggctccacaagccccaggctgcccctgaccttcgaggacgtggccatctacttcagcgagcaggagtggcaggacctggaggcctggcagaaggagctgtacaagcacgtgatgaggagcaactacgagaccctggtgagcctggacgacggcctgcccaagcccgagctgatcagctggatcgagcacggcggcgagcccttcaggaactggagggagagccagaagagcaggaacatcatctgcagcagcagcaccagccccaagaaaaagagaaaagtctaagctgccttctgcggggcttgccttctggccatgcccttcttctctcccttgcacctgtacctcttggtctttgaataaagcctgagtaggaaggctagcaaaaaaaaaaaaaaaaaaaaaaaaaaaaaaaaaaaaaaaaaaaaaaaaaaaaaaaaaaaaaaaaaaaaaaaaaaaaaaaa

SEQ ID NO: 3418 - RNA, 5419 nt, synthetic construct
  source 1..5419: mol_type = other RNA
aggaaataagagagaaaagaagagtaagaagaaatataagagccaccatggcccctaagaagaagcgtaaagtgagccgggtgaacggcagcggcagcggcggcggcatgaaccacgaccaggagttcgacccccctaaggtgtaccctcccgtccccgccgagaagagaaagcccatccgggtcctgagcctgttcgatggcatcgccaccggtctgctggtgctgaaggacctgggcatccaggtggataggtacattgcctccgaggtgtgcgaggactccatcaccgtgggaatggtgcgtcatcagggcaagatcatgtacgtgggcgacgtgcggagcgtgacacagaagcatatccaggagtggggccctttcgacctggtgatcggcggcagcccttgcaatgacctgagcatcgtgaacccagcccggaagggcctgtacgagggaaccggcagactgttcttcgagttttacagactgctgcacgacgcccggcctaaggaaggcgacgaccggcccttcttttggctgttcgagaatgtggtggccatgggagtcagcgacaagcgggatattagccggttcctggagagcaaccccgtgatgatcgatgccaaggaagtgagcgccgcccaccgggccagatacttctggggcaatctgcctggcatgaacagacccctggccagcaccgtgaacgacaagctggagctgcaggagtgcctggagcacggccggatcgccaagttcagcaaggtgagaaccatcaccacccgaagcaacagcatcaaacaaggcaaggaccagcactttcctgtgttcatgaacgagaaggaggacatcctgtggtgtaccgagatggagagagtgttcgggttcccagtccactacacagatgtcagcaacatgtctagactggccagacagagactgctgggaagaagctggtccgtccctgtgatcagacacctgttcgcccctctgaaggagtacttcgcctgcgtgagcagcggcaacagcaacgccaacagccggggccccagcttctctagcggcctggtgccactgtccctgagagggagccacatgggccccatggagatctacaaaaccgtgagcgcctggaagcggcagcctgtgcgcgtgctgagcctgtttcggaatatcgataaagtcctgaaaagcctgggattcctggagagcggctctggctccggcggtggcaccctgaagtacgtggaggatgtgacaaacgtggtcagacgggatgtggagaagtggggccccttcgatctggtgtacggcagcacccaacccctgggcagctcttgtgaccggtgccctggctggtacatgtttcagttccaccggatcctgcagtacgccctgccgagacaggagtcccagcggccattcttttggattttcatggacaacttgctgctgaccgaggatgaccaggaaactaccactcggttcctgcagaccgaagccgtgaccctgcaggacgtgagaggccgggactaccagaacgccatgcgggtgtggtccaacatccctggactgaaaagcaagcacgcacctctgacccctaaagaagaggagtacctgcaggcccaggtgcggagcagaagcaagctggacgcccctaaggtggatctgctggtgaagaattgcctcctgcccctgagagagtacttcaagtatttcagccagaatagtctgcccctgggcggcccaagcagcggcgcccctcctcccagcggcggcagcccagccggctccccaacctctaccgaggagggcacctctgagtccgccacccccgagagcggccctggcacctccaccgagcccagcgagggcagcgcacccggcagccctgccggcagccccacctccacagaggagggaaccagcaccgagcccagcgaaggcagcgccccaggcaccagcaccgagcctagtgagggcggctctggcggcggcagcgcccaggagattaaacggatcaacaagatcagaagaagacttgtgaaagacagcaacaccaagaaggccggcaagacaggccccatgaaaaccctgctggttagagtgatgacacccgatctgagagagcggctggaaaacctgagaaagaagcctgaaaatatcccccagcccatcagcaatacatctagagccaacctgaataagctgctgaccgattacaccgaaatgaagaaggcgatcctgcatgtgtactgggaagagttccagaaggaccctgtgggcctgatgagccgggtggcccagcctgccagcaagaagatcgatcagaacaagctgaaacctgagatggacgagaagggcaacctgaccaccgccggctttgcctgctctcagtgtggccagcccctgttcgtgtacaagctggagcaggtgtctgagaagggcaaggcttacaccaactacttcggacggtgcaatgtggccgagcacgaaaagctgatcctgctggcccagctgaagcccgagaaggatagcgacgaagccgtgacatatagcctgggaaagtttgggcagagggccctggatttctacagcattcatgtgaccaaggagtccacccaccccgtgaagcccctggcccagatcgccggaaacagatacgcctccggacctgtgggaaaggccctgagcgacgcatgtatgggcacaatcgcctccttcctgtctaagtaccaggacatcatcatcgaacaccagaaggtggtgaagggcaaccagaagagactggagagcctgcgggagctggccggcaaggaaaacctggaataccctagcgtgaccctgccacctcagcctcacaccaaggagggcgttgatgcctacaacgaagtgatcgcccgggtgcgaatgtgggtgaacctgaacctgtggcagaagctgaagctaagcagagatgatgccaagcctctgctgagactgaagggattcccttcctttcctctggtcgagagacaggccaacgaagtggactggtgggacatggtgtgtaacgtgaagaagctgatcaacgagaaaaaggaggatggcaaggtgttttggcagaatctggctggctacaagagacaggaagccctgagaccatacctgagcagcgaggaagatcggaagaagggaaagaaattcgctcggtaccagctgggcgacctgctgctgcacctggaaaagaagcacggcgaggactggggaaaggtgtacgacgaggcctgggagcggattgacaagaaagtggaaggcctgagcaagcacatcaagctggaagaggaacggagaagcgaggacgcccagagcaaggccgccctgaccgactggctgcgggctaaggccagcttcgtgatcgagggcctgaaggaggccgacaaggacgagttctgcagatgcgagctgaagctgcagaagtggtacggggacctgcggggaaagcccttcgccatcgaagccgagaacagcatcctggacatcagcggcttcagcaagcagtacaactgtgccttcatctggcagaaggacggcgtgaagaagctgaacctgtacctgatcatcaactacttcaagggcggcaagctgcggttcaagaagatcaaacctgaagccttcgaagccaacagattctacaccgtgatcaacaaaaagagcggcgagatcgtgcccatggaggtgaacttcaacttcgacgaccccaacctgatcatcctgcctctggcctttggcaagagacagggcagagaattcatctggaacgacctgctgtccctggaaaccggcagcctgaagctggccaacggaagagtgatcgagaagacactgtacaacagaagaacccggcaggatgagcctgccctgttcgtggccctgaccttcgagcggcgggaggtcctggactcctccaatatcaaaccaatgaacctgatcggcgtggcaagaggcgaaaacatccccgccgtgatcgccctgaccgaccccgagggctgcccactgagccggtttaaggatagcctgggaaacccaacccacatcctgagaatcggcgagagctataaggagaagcagcggaccatccaggccaagaaggaggtggagcagcggagagccggcggctacagccggaagtacgccagcaaagccaagaatctggcagacgatatggtgagaaacaccgctagagatctgctgtactacgccgtgacccaggatgccatgctgatcttcgccaacctgagccggggcttcggccggcagggcaagcggaccttcatggccgagagacagtacacacggatggaggactggctgaccgccaagctggcctacgagggcctgagcaagacctacctgtccaagacactggcccagtacacctccaagacatgcagcaactgtgggtttaccatcaccagcgccgactacgacagggtgctggagaagctgaagaagacagcaacaggctggatgaccacaattaacggcaaggagctgaaggtggagggccagattacctactacaacagatacaagagacagaacgtagtcaaggacctgtccgtcgagctggatagactgagcgaagaatctgtgaacaacgacatctcctcctggacaaagggcagaagcggagaagctctgagcctcctgaagaaaagattctcccatagacccgtgcaggagaagttcgtgtgcctgaactgcggcttcgagacacacgcagccgagcaagccgccctgaacatcgccagatcctggctgttcctgcggagccaggagtacaagaaataccagacaaacaagacaaccggcaacaccgataagagagccttcgtcgagacctggcagtccttttaccggaagaagcttaaggaggtgtggaaacctgccgtgcggtctggcggatctggcggaggctccacaagcatgagccagggcagcgtgaccttcagggacgtggccatcgacttcagccaggaggagtggaagtggctgcagcccgcccagagggacctgtacaggtgcgtgatgctggagaactacggccacctggtgagcctgggcctgagcatcagcaagcccgacgtggtgagcctgctggagcagggcaaggagccctggctgggcaagagggacgtgaagagggacctgttccccgtgagcgagagcaccagccccaagaaaaagagaaaagtctaagctgccttctgcggggcttgccttctggccatgcccttcttctctcccttgcacctgtacctcttggtctttgaataaagcctgagtaggaaggctagcaaaaaaaaaaaaaaaaaaaaaaaaaaaaaaaaaaaaaaaaaaaaaaaaaaaaaaaaaaaaaaaaaaaaaaaaaaaaaaaa

SEQ ID NO: 3419 - RNA, 5419 nt, synthetic construct
  source 1..5419: mol_type = other RNA
aggaaataagagagaaaagaagagtaagaagaaatataagagccaccatggcccctaagaagaagcgtaaagtgagccgggtgaacggcagcggcagcggcggcggcatgaaccacgaccaggagttcgacccccctaaggtgtaccctcccgtccccgccgagaagagaaagcccatccgggtcctgagcctgttcgatggcatcgccaccggtctgctggtgctgaaggacctgggcatccaggtggataggtacattgcctccgaggtgtgcgaggactccatcaccgtgggaatggtgcgtcatcagggcaagatcatgtacgtgggcgacgtgcggagcgtgacacagaagcatatccaggagtggggccctttcgacctggtgatcggcggcagcccttgcaatgacctgagcatcgtgaacccagcccggaagggcctgtacgagggaaccggcagactgttcttcgagttttacagactgctgcacgacgcccggcctaaggaaggcgacgaccggcccttcttttggctgttcgagaatgtggtggccatgggagtcagcgacaagcgggatattagccggttcctggagagcaaccccgtgatgatcgatgccaaggaagtgagcgccgcccaccgggccagatacttctggggcaatctgcctggcatgaacagacccctggccagcaccgtgaacgacaagctggagctgcaggagtgcctggagcacggccggatcgccaagttcagcaaggtgagaaccatcaccacccgaagcaacagcatcaaacaaggcaaggaccagcactttcctgtgttcatgaacgagaaggaggacatcctgtggtgtaccgagatggagagagtgttcgggttcccagtccactacacagatgtcagcaacatgtctagactggccagacagagactgctgggaagaagctggtccgtccctgtgatcagacacctgttcgcccctctgaaggagtacttcgcctgcgtgagcagcggcaacagcaacgccaacagccggggccccagcttctctagcggcctggtgccactgtccctgagagggagccacatgggccccatggagatctacaaaaccgtgagcgcctggaagcggcagcctgtgcgcgtgctgagcctgtttcggaatatcgataaagtcctgaaaagcctgggattcctggagagcggctctggctccggcggtggcaccctgaagtacgtggaggatgtgacaaacgtggtcagacgggatgtggagaagtggggccccttcgatctggtgtacggcagcacccaacccctgggcagctcttgtgaccggtgccctggctggtacatgtttcagttccaccggatcctgcagtacgccctgccgagacaggagtcccagcggccattcttttggattttcatggacaacttgctgctgaccgaggatgaccaggaaactaccactcggttcctgcagaccgaagccgtgaccctgcaggacgtgagaggccgggactaccagaacgccatgcgggtgtggtccaacatccctggactgaaaagcaagcacgcacctctgacccctaaagaagaggagtacctgcaggcccaggtgcggagcagaagcaagctggacgcccctaaggtggatctgctggtgaagaattgcctcctgcccctgagagagtacttcaagtatttcagccagaatagtctgcccctgggcggcccaagcagcggcgcccctcctcccagcggcggcagcccagccggctccccaacctctaccgaggagggcacctctgagtccgccacccccgagagcggccctggcacctccaccgagcccagcgagggcagcgcacccggcagccctgccggcagccccacctccacagaggagggaaccagcaccgagcccagcgaaggcagcgccccaggcaccagcaccgagcctagtgagggcggctctggcggcggcagcgcccaggagattaaacggatcaacaagatcagaagaagacttgtgaaagacagcaacaccaagaaggccggcaagacaggccccatgaaaaccctgctggttagagtgatgacacccgatctgagagagcggctggaaaacctgagaaagaagcctgaaaatatcccccagcccatcagcaatacatctagagccaacctgaataagctgctgaccgattacaccgaaatgaagaaggcgatcctgcatgtgtactgggaagagttccagaaggaccctgtgggcctgatgagccgggtggcccagcctgccagcaagaagatcgatcagaacaagctgaaacctgagatggacgagaagggcaacctgaccaccgccggctttgcctgctctcagtgtggccagcccctgttcgtgtacaagctggagcaggtgtctgagaagggcaaggcttacaccaactacttcggacggtgcaatgtggccgagcacgaaaagctgatcctgctggcccagctgaagcccgagaaggatagcgacgaagccgtgacatatagcctgggaaagtttgggcagagggccctggatttctacagcattcatgtgaccaaggagtccacccaccccgtgaagcccctggcccagatcgccggaaacagatacgcctccggacctgtgggaaaggccctgagcgacgcatgtatgggcacaatcgcctccttcctgtctaagtaccaggacatcatcatcgaacaccagaaggtggtgaagggcaaccagaagagactggagagcctgcgggagctggccggcaaggaaaacctggaataccctagcgtgaccctgccacctcagcctcacaccaaggagggcgttgatgcctacaacgaagtgatcgcccgggtgcgaatgtgggtgaacctgaacctgtggcagaagctgaagctaagcagagatgatgccaagcctctgctgagactgaagggattcccttcctttcctctggtcgagagacaggccaacgaagtggactggtgggacatggtgtgtaacgtgaagaagctgatcaacgagaaaaaggaggatggcaaggtgttttggcagaatctggctggctacaagagacaggaagccctgagaccatacctgagcagcgaggaagatcggaagaagggaaagaaattcgctcggtaccagctgggcgacctgctgctgcacctggaaaagaagcacggcgaggactggggaaaggtgtacgacgaggcctgggagcggattgacaagaaagtggaaggcctgagcaagcacatcaagctggaagaggaacggagaagcgaggacgcccagagcaaggccgccctgaccgactggctgcgggctaaggccagcttcgtgatcgagggcctgaaggaggccgacaaggacgagttctgcagatgcgagctgaagctgcagaagtggtacggggacctgcggggaaagcccttcgccatcgaagccgagaacagcatcctggacatcagcggcttcagcaagcagtacaactgtgccttcatctggcagaaggacggcgtgaagaagctgaacctgtacctgatcatcaactacttcaagggcggcaagctgcggttcaagaagatcaaacctgaagccttcgaagccaacagattctacaccgtgatcaacaaaaagagcggcgagatcgtgcccatggaggtgaacttcaacttcgacgaccccaacctgatcatcctgcctctggcctttggcaagagacagggcagagaattcatctggaacgacctgctgtccctggaaaccggcagcctgaagctggccaacggaagagtgatcgagaagacactgtacaacagaagaacccggcaggatgagcctgccctgttcgtggccctgaccttcgagcggcgggaggtcctggactcctccaatatcaaaccaatgaacctgatcggcgtggcaagaggcgaaaacatccccgccgtgatcgccctgaccgaccccgagggctgcccactgagccggtttaaggatagcctgggaaacccaacccacatcctgagaatcggcgagagctataaggagaagcagcggaccatccaggccaagaaggaggtggagcagcggagagccggcggctacagccggaagtacgccagcaaagccaagaatctggcagacgatatggtgagaaacaccgctagagatctgctgtactacgccgtgacccaggatgccatgctgatcttcgccaacctgagccggggcttcggccggcagggcaagcggaccttcatggccgagagacagtacacacggatggaggactggctgaccgccaagctggcctacgagggcctgagcaagacctacctgtccaagacactggcccagtacacctccaagacatgcagcaactgtgggtttaccatcaccagcgccgactacgacagggtgctggagaagctgaagaagacagcaacaggctggatgaccacaattaacggcaaggagctgaaggtggagggccagattacctactacaacagatacaagagacagaacgtagtcaaggacctgtccgtcgagctggatagactgagcgaagaatctgtgaacaacgacatctcctcctggacaaagggcagaagcggagaagctctgagcctcctgaagaaaagattctcccatagacccgtgcaggagaagttcgtgtgcctgaactgcggcttcgagacacacgcagccgagcaagccgccctgaacatcgccagatcctggctgttcctgcggagccaggagtacaagaaataccagacaaacaagacaaccggcaacaccgataagagagccttcgtcgagacctggcagtccttttaccggaagaagcttaaggaggtgtggaaacctgccgtgcggtctggcggatctggcggaggctccacaagcgtggccttcgaggacgtggccgtgaacttcacccaggaggagtgggccctgctggaccccagccagaagaacctgtacagggaggtgatgcaggagaccctgaggaacctggccagcatcggccagaggtggagcaaccagaacgccgaggacaagcaccagaaccccaggaggaacctgaggaggctgatcggcgagaggctgttccagagcaaggagagccaccagcacgtggaggtgctgaccagccccaagaaaaagagaaaagtctaagctgccttctgcggggcttgccttctggccatgcccttcttctctcccttgcacctgtacctcttggtctttgaataaagcctgagtaggaaggctagcaaaaaaaaaaaaaaaaaaaaaaaaaaaaaaaaaaaaaaaaaaaaaaaaaaaaaaaaaaaaaaaaaaaaaaaaaaaaaaaa

SEQ ID NO: 3420 - RNA, 5419 nt, synthetic construct
  source 1..5419: mol_type = other RNA
aggaaataagagagaaaagaagagtaagaagaaatataagagccaccatggcccctaagaagaagcgtaaagtgagccgggtgaacggcagcggcagcggcggcggcatgaaccacgaccaggagttcgacccccctaaggtgtaccctcccgtccccgccgagaagagaaagcccatccgggtcctgagcctgttcgatggcatcgccaccggtctgctggtgctgaaggacctgggcatccaggtggataggtacattgcctccgaggtgtgcgaggactccatcaccgtgggaatggtgcgtcatcagggcaagatcatgtacgtgggcgacgtgcggagcgtgacacagaagcatatccaggagtggggccctttcgacctggtgatcggcggcagcccttgcaatgacctgagcatcgtgaacccagcccggaagggcctgtacgagggaaccggcagactgttcttcgagttttacagactgctgcacgacgcccggcctaaggaaggcgacgaccggcccttcttttggctgttcgagaatgtggtggccatgggagtcagcgacaagcgggatattagccggttcctggagagcaaccccgtgatgatcgatgccaaggaagtgagcgccgcccaccgggccagatacttctggggcaatctgcctggcatgaacagacccctggccagcaccgtgaacgacaagctggagctgcaggagtgcctggagcacggccggatcgccaagttcagcaaggtgagaaccatcaccacccgaagcaacagcatcaaacaaggcaaggaccagcactttcctgtgttcatgaacgagaaggaggacatcctgtggtgtaccgagatggagagagtgttcgggttcccagtccactacacagatgtcagcaacatgtctagactggccagacagagactgctgggaagaagctggtccgtccctgtgatcagacacctgttcgcccctctgaaggagtacttcgcctgcgtgagcagcggcaacagcaacgccaacagccggggccccagcttctctagcggcctggtgccactgtccctgagagggagccacatgggccccatggagatctacaaaaccgtgagcgcctggaagcggcagcctgtgcgcgtgctgagcctgtttcggaatatcgataaagtcctgaaaagcctgggattcctggagagcggctctggctccggcggtggcaccctgaagtacgtggaggatgtgacaaacgtggtcagacgggatgtggagaagtggggccccttcgatctggtgtacggcagcacccaacccctgggcagctcttgtgaccggtgccctggctggtacatgtttcagttccaccggatcctgcagtacgccctgccgagacaggagtcccagcggccattcttttggattttcatggacaacttgctgctgaccgaggatgaccaggaaactaccactcggttcctgcagaccgaagccgtgaccctgcaggacgtgagaggccgggactaccagaacgccatgcgggtgtggtccaacatccctggactgaaaagcaagcacgcacctctgacccctaaagaagaggagtacctgcaggcccaggtgcggagcagaagcaagctggacgcccctaaggtggatctgctggtgaagaattgcctcctgcccctgagagagtacttcaagtatttcagccagaatagtctgcccctgggcggcccaagcagcggcgcccctcctcccagcggcggcagcccagccggctccccaacctctaccgaggagggcacctctgagtccgccacccccgagagcggccctggcacctccaccgagcccagcgagggcagcgcacccggcagccctgccggcagccccacctccacagaggagggaaccagcaccgagcccagcgaaggcagcgccccaggcaccagcaccgagcctagtgagggcggctctggcggcggcagcgcccaggagattaaacggatcaacaagatcagaagaagacttgtgaaagacagcaacaccaagaaggccggcaagacaggccccatgaaaaccctgctggttagagtgatgacacccgatctgagagagcggctggaaaacctgagaaagaagcctgaaaatatcccccagcccatcagcaatacatctagagccaacctgaataagctgctgaccgattacaccgaaatgaagaaggcgatcctgcatgtgtactgggaagagttccagaaggaccctgtgggcctgatgagccgggtggcccagcctgccagcaagaagatcgatcagaacaagctgaaacctgagatggacgagaagggcaacctgaccaccgccggctttgcctgctctcagtgtggccagcccctgttcgtgtacaagctggagcaggtgtctgagaagggcaaggcttacaccaactacttcggacggtgcaatgtggccgagcacgaaaagctgatcctgctggcccagctgaagcccgagaaggatagcgacgaagccgtgacatatagcctgggaaagtttgggcagagggccctggatttctacagcattcatgtgaccaaggagtccacccaccccgtgaagcccctggcccagatcgccggaaacagatacgcctccggacctgtgggaaaggccctgagcgacgcatgtatgggcacaatcgcctccttcctgtctaagtaccaggacatcatcatcgaacaccagaaggtggtgaagggcaaccagaagagactggagagcctgcgggagctggccggcaaggaaaacctggaataccctagcgtgaccctgccacctcagcctcacaccaaggagggcgttgatgcctacaacgaagtgatcgcccgggtgcgaatgtgggtgaacctgaacctgtggcagaagctgaagctaagcagagatgatgccaagcctctgctgagactgaagggattcccttcctttcctctggtcgagagacaggccaacgaagtggactggtgggacatggtgtgtaacgtgaagaagctgatcaacgagaaaaaggaggatggcaaggtgttttggcagaatctggctggctacaagagacaggaagccctgagaccatacctgagcagcgaggaagatcggaagaagggaaagaaattcgctcggtaccagctgggcgacctgctgctgcacctggaaaagaagcacggcgaggactggggaaaggtgtacgacgaggcctgggagcggattgacaagaaagtggaaggcctgagcaagcacatcaagctggaagaggaacggagaagcgaggacgcccagagcaaggccgccctgaccgactggctgcgggctaaggccagcttcgtgatcgagggcctgaaggaggccgacaaggacgagttctgcagatgcgagctgaagctgcagaagtggtacggggacctgcggggaaagcccttcgccatcgaagccgagaacagcatcctggacatcagcggcttcagcaagcagtacaactgtgccttcatctggcagaaggacggcgtgaagaagctgaacctgtacctgatcatcaactacttcaagggcggcaagctgcggttcaagaagatcaaacctgaagccttcgaagccaacagattctacaccgtgatcaacaaaaagagcggcgagatcgtgcccatggaggtgaacttcaacttcgacgaccccaacctgatcatcctgcctctggcctttggcaagagacagggcagagaattcatctggaacgacctgctgtccctggaaaccggcagcctgaagctggccaacggaagagtgatcgagaagacactgtacaacagaagaacccggcaggatgagcctgccctgttcgtggccctgaccttcgagcggcgggaggtcctggactcctccaatatcaaaccaatgaacctgatcggcgtggcaagaggcgaaaacatccccgccgtgatcgccctgaccgaccccgagggctgcccactgagccggtttaaggatagcctgggaaacccaacccacatcctgagaatcggcgagagctataaggagaagcagcggaccatccaggccaagaaggaggtggagcagcggagagccggcggctacagccggaagtacgccagcaaagccaagaatctggcagacgatatggtgagaaacaccgctagagatctgctgtactacgccgtgacccaggatgccatgctgatcttcgccaacctgagccggggcttcggccggcagggcaagcggaccttcatggccgagagacagtacacacggatggaggactggctgaccgccaagctggcctacgagggcctgagcaagacctacctgtccaagacactggcccagtacacctccaagacatgcagcaactgtgggtttaccatcaccagcgccgactacgacagggtgctggagaagctgaagaagacagcaacaggctggatgaccacaattaacggcaaggagctgaaggtggagggccagattacctactacaacagatacaagagacagaacgtagtcaaggacctgtccgtcgagctggatagactgagcgaagaatctgtgaacaacgacatctcctcctggacaaagggcagaagcggagaagctctgagcctcctgaagaaaagattctcccatagacccgtgcaggagaagttcgtgtgcctgaactgcggcttcgagacacacgcagccgagcaagccgccctgaacatcgccagatcctggctgttcctgcggagccaggagtacaagaaataccagacaaacaagacaaccggcaacaccgataagagagccttcgtcgagacctggcagtccttttaccggaagaagcttaaggaggtgtggaaacctgccgtgcggtctggcggatctggcggaggctccacaagcgtggaggagcccgtgaccttcaaggacgtggccgtggccttcacccaggaggagtggggccagctggacctggtgcagaggaccctgtacagggacgtgatgctggagacctacggccacctgctgagcgtgggcaaccagatcgccaagcccgaggtgatcagcctgctggagcagggcgaggagccctggagcgtggagcagggctaccccaagagcagctgccccgagtggatgaggaacaccagccccaagaaaaagagaaaagtctaagctgccttctgcggggcttgccttctggccatgcccttcttctctcccttgcacctgtacctcttggtctttgaataaagcctgagtaggaaggctagcaaaaaaaaaaaaaaaaaaaaaaaaaaaaaaaaaaaaaaaaaaaaaaaaaaaaaaaaaaaaaaaaaaaaaaaaaaaaaaaa

SEQ ID NO: 3421 - RNA, 5419 nt, synthetic construct
  source 1..5419: mol_type = other RNA
aggaaataagagagaaaagaagagtaagaagaaatataagagccaccatggcccctaagaagaagcgtaaagtgagccgggtgaacggcagcggcagcggcggcggcatgaaccacgaccaggagttcgacccccctaaggtgtaccctcccgtccccgccgagaagagaaagcccatccgggtcctgagcctgttcgatggcatcgccaccggtctgctggtgctgaaggacctgggcatccaggtggataggtacattgcctccgaggtgtgcgaggactccatcaccgtgggaatggtgcgtcatcagggcaagatcatgtacgtgggcgacgtgcggagcgtgacacagaagcatatccaggagtggggccctttcgacctggtgatcggcggcagcccttgcaatgacctgagcatcgtgaacccagcccggaagggcctgtacgagggaaccggcagactgttcttcgagttttacagactgctgcacgacgcccggcctaaggaaggcgacgaccggcccttcttttggctgttcgagaatgtggtggccatgggagtcagcgacaagcgggatattagccggttcctggagagcaaccccgtgatgatcgatgccaaggaagtgagcgccgcccaccgggccagatacttctggggcaatctgcctggcatgaacagacccctggccagcaccgtgaacgacaagctggagctgcaggagtgcctggagcacggccggatcgccaagttcagcaaggtgagaaccatcaccacccgaagcaacagcatcaaacaaggcaaggaccagcactttcctgtgttcatgaacgagaaggaggacatcctgtggtgtaccgagatggagagagtgttcgggttcccagtccactacacagatgtcagcaacatgtctagactggccagacagagactgctgggaagaagctggtccgtccctgtgatcagacacctgttcgcccctctgaaggagtacttcgcctgcgtgagcagcggcaacagcaacgccaacagccggggccccagcttctctagcggcctggtgccactgtccctgagagggagccacatgggccccatggagatctacaaaaccgtgagcgcctggaagcggcagcctgtgcgcgtgctgagcctgtttcggaatatcgataaagtcctgaaaagcctgggattcctggagagcggctctggctccggcggtggcaccctgaagtacgtggaggatgtgacaaacgtggtcagacgggatgtggagaagtggggccccttcgatctggtgtacggcagcacccaacccctgggcagctcttgtgaccggtgccctggctggtacatgtttcagttccaccggatcctgcagtacgccctgccgagacaggagtcccagcggccattcttttggattttcatggacaacttgctgctgaccgaggatgaccaggaaactaccactcggttcctgcagaccgaagccgtgaccctgcaggacgtgagaggccgggactaccagaacgccatgcgggtgtggtccaacatccctggactgaaaagcaagcacgcacctctgacccctaaagaagaggagtacctgcaggcccaggtgcggagcagaagcaagctggacgcccctaaggtggatctgctggtgaagaattgcctcctgcccctgagagagtacttcaagtatttcagccagaatagtctgcccctgggcggcccaagcagcggcgcccctcctcccagcggcggcagcccagccggctccccaacctctaccgaggagggcacctctgagtccgccacccccgagagcggccctggcacctccaccgagcccagcgagggcagcgcacccggcagccctgccggcagccccacctccacagaggagggaaccagcaccgagcccagcgaaggcagcgccccaggcaccagcaccgagcctagtgagggcggctctggcggcggcagcgcccaggagattaaacggatcaacaagatcagaagaagacttgtgaaagacagcaacaccaagaaggccggcaagacaggccccatgaaaaccctgctggttagagtgatgacacccgatctgagagagcggctggaaaacctgagaaagaagcctgaaaatatcccccagcccatcagcaatacatctagagccaacctgaataagctgctgaccgattacaccgaaatgaagaaggcgatcctgcatgtgtactgggaagagttccagaaggaccctgtgggcctgatgagccgggtggcccagcctgccagcaagaagatcgatcagaacaagctgaaacctgagatggacgagaagggcaacctgaccaccgccggctttgcctgctctcagtgtggccagcccctgttcgtgtacaagctggagcaggtgtctgagaagggcaaggcttacaccaactacttcggacggtgcaatgtggccgagcacgaaaagctgatcctgctggcccagctgaagcccgagaaggatagcgacgaagccgtgacatatagcctgggaaagtttgggcagagggccctggatttctacagcattcatgtgaccaaggagtccacccaccccgtgaagcccctggcccagatcgccggaaacagatacgcctccggacctgtgggaaaggccctgagcgacgcatgtatgggcacaatcgcctccttcctgtctaagtaccaggacatcatcatcgaacaccagaaggtggtgaagggcaaccagaagagactggagagcctgcgggagctggccggcaaggaaaacctggaataccctagcgtgaccctgccacctcagcctcacaccaaggagggcgttgatgcctacaacgaagtgatcgcccgggtgcgaatgtgggtgaacctgaacctgtggcagaagctgaagctaagcagagatgatgccaagcctctgctgagactgaagggattcccttcctttcctctggtcgagagacaggccaacgaagtggactggtgggacatggtgtgtaacgtgaagaagctgatcaacgagaaaaaggaggatggcaaggtgttttggcagaatctggctggctacaagagacaggaagccctgagaccatacctgagcagcgaggaagatcggaagaagggaaagaaattcgctcggtaccagctgggcgacctgctgctgcacctggaaaagaagcacggcgaggactggggaaaggtgtacgacgaggcctgggagcggattgacaagaaagtggaaggcctgagcaagcacatcaagctggaagaggaacggagaagcgaggacgcccagagcaaggccgccctgaccgactggctgcgggctaaggccagcttcgtgatcgagggcctgaaggaggccgacaaggacgagttctgcagatgcgagctgaagctgcagaagtggtacggggacctgcggggaaagcccttcgccatcgaagccgagaacagcatcctggacatcagcggcttcagcaagcagtacaactgtgccttcatctggcagaaggacggcgtgaagaagctgaacctgtacctgatcatcaactacttcaagggcggcaagctgcggttcaagaagatcaaacctgaagccttcgaagccaacagattctacaccgtgatcaacaaaaagagcggcgagatcgtgcccatggaggtgaacttcaacttcgacgaccccaacctgatcatcctgcctctggcctttggcaagagacagggcagagaattcatctggaacgacctgctgtccctggaaaccggcagcctgaagctggccaacggaagagtgatcgagaagacactgtacaacagaagaacccggcaggatgagcctgccctgttcgtggccctgaccttcgagcggcgggaggtcctggactcctccaatatcaaaccaatgaacctgatcggcgtggcaagaggcgaaaacatccccgccgtgatcgccctgaccgaccccgagggctgcccactgagccggtttaaggatagcctgggaaacccaacccacatcctgagaatcggcgagagctataaggagaagcagcggaccatccaggccaagaaggaggtggagcagcggagagccggcggctacagccggaagtacgccagcaaagccaagaatctggcagacgatatggtgagaaacaccgctagagatctgctgtactacgccgtgacccaggatgccatgctgatcttcgccaacctgagccggggcttcggccggcagggcaagcggaccttcatggccgagagacagtacacacggatggaggactggctgaccgccaagctggcctacgagggcctgagcaagacctacctgtccaagacactggcccagtacacctccaagacatgcagcaactgtgggtttaccatcaccagcgccgactacgacagggtgctggagaagctgaagaagacagcaacaggctggatgaccacaattaacggcaaggagctgaaggtggagggccagattacctactacaacagatacaagagacagaacgtagtcaaggacctgtccgtcgagctggatagactgagcgaagaatctgtgaacaacgacatctcctcctggacaaagggcagaagcggagaagctctgagcctcctgaagaaaagattctcccatagacccgtgcaggagaagttcgtgtgcctgaactgcggcttcgagacacacgcagccgagcaagccgccctgaacatcgccagatcctggctgttcctgcggagccaggagtacaagaaataccagacaaacaagacaaccggcaacaccgataagagagccttcgtcgagacctggcagtccttttaccggaagaagcttaaggaggtgtggaaacctgccgtgcggtctggcggatctggcggaggctccacaagctgcgaggtgagcgtgagcttcgaggacgtgaccgtggacttcagcagggaggagtggcagcacctggaccccgcccagaggaggctgtacagggacgtgaccctggagaactacagccacctgtgcagcgtgggctaccaggtgcccaagcccgaggtgatcttcaagctggagcagggcgagggcccctggaccctggaggaggagaccccccaccagagctgcagcgacgaggacatgggcaccagccccaagaaaaagagaaaagtctaagctgccttctgcggggcttgccttctggccatgcccttcttctctcccttgcacctgtacctcttggtctttgaataaagcctgagtaggaaggctagcaaaaaaaaaaaaaaaaaaaaaaaaaaaaaaaaaaaaaaaaaaaaaaaaaaaaaaaaaaaaaaaaaaaaaaaaaaaaaaaa

SEQ ID NO: 3422 - RNA, 5419 nt, synthetic construct
  source 1..5419: mol_type = other RNA
aggaaataagagagaaaagaagagtaagaagaaatataagagccaccatggcccctaagaagaagcgtaaagtgagccgggtgaacggcagcggcagcggcggcggcatgaaccacgaccaggagttcgacccccctaaggtgtaccctcccgtccccgccgagaagagaaagcccatccgggtcctgagcctgttcgatggcatcgccaccggtctgctggtgctgaaggacctgggcatccaggtggataggtacattgcctccgaggtgtgcgaggactccatcaccgtgggaatggtgcgtcatcagggcaagatcatgtacgtgggcgacgtgcggagcgtgacacagaagcatatccaggagtggggccctttcgacctggtgatcggcggcagcccttgcaatgacctgagcatcgtgaacccagcccggaagggcctgtacgagggaaccggcagactgttcttcgagttttacagactgctgcacgacgcccggcctaaggaaggcgacgaccggcccttcttttggctgttcgagaatgtggtggccatgggagtcagcgacaagcgggatattagccggttcctggagagcaaccccgtgatgatcgatgccaaggaagtgagcgccgcccaccgggccagatacttctggggcaatctgcctggcatgaacagacccctggccagcaccgtgaacgacaagctggagctgcaggagtgcctggagcacggccggatcgccaagttcagcaaggtgagaaccatcaccacccgaagcaacagcatcaaacaaggcaaggaccagcactttcctgtgttcatgaacgagaaggaggacatcctgtggtgtaccgagatggagagagtgttcgggttcccagtccactacacagatgtcagcaacatgtctagactggccagacagagactgctgggaagaagctggtccgtccctgtgatcagacacctgttcgcccctctgaaggagtacttcgcctgcgtgagcagcggcaacagcaacgccaacagccggggccccagcttctctagcggcctggtgccactgtccctgagagggagccacatgggccccatggagatctacaaaaccgtgagcgcctggaagcggcagcctgtgcgcgtgctgagcctgtttcggaatatcgataaagtcctgaaaagcctgggattcctggagagcggctctggctccggcggtggcaccctgaagtacgtggaggatgtgacaaacgtggtcagacgggatgtggagaagtggggccccttcgatctggtgtacggcagcacccaacccctgggcagctcttgtgaccggtgccctggctggtacatgtttcagttccaccggatcctgcagtacgccctgccgagacaggagtcccagcggccattcttttggattttcatggacaacttgctgctgaccgaggatgaccaggaaactaccactcggttcctgcagaccgaagccgtgaccctgcaggacgtgagaggccgggactaccagaacgccatgcgggtgtggtccaacatccctggactgaaaagcaagcacgcacctctgacccctaaagaagaggagtacctgcaggcccaggtgcggagcagaagcaagctggacgcccctaaggtggatctgctggtgaagaattgcctcctgcccctgagagagtacttcaagtatttcagccagaatagtctgcccctgggcggcccaagcagcggcgcccctcctcccagcggcggcagcccagccggctccccaacctctaccgaggagggcacctctgagtccgccacccccgagagcggccctggcacctccaccgagcccagcgagggcagcgcacccggcagccctgccggcagccccacctccacagaggagggaaccagcaccgagcccagcgaaggcagcgccccaggcaccagcaccgagcctagtgagggcggctctggcggcggcagcgcccaggagattaaacggatcaacaagatcagaagaagacttgtgaaagacagcaacaccaagaaggccggcaagacaggccccatgaaaaccctgctggttagagtgatgacacccgatctgagagagcggctggaaaacctgagaaagaagcctgaaaatatcccccagcccatcagcaatacatctagagccaacctgaataagctgctgaccgattacaccgaaatgaagaaggcgatcctgcatgtgtactgggaagagttccagaaggaccctgtgggcctgatgagccgggtggcccagcctgccagcaagaagatcgatcagaacaagctgaaacctgagatggacgagaagggcaacctgaccaccgccggctttgcctgctctcagtgtggccagcccctgttcgtgtacaagctggagcaggtgtctgagaagggcaaggcttacaccaactacttcggacggtgcaatgtggccgagcacgaaaagctgatcctgctggcccagctgaagcccgagaaggatagcgacgaagccgtgacatatagcctgggaaagtttgggcagagggccctggatttctacagcattcatgtgaccaaggagtccacccaccccgtgaagcccctggcccagatcgccggaaacagatacgcctccggacctgtgggaaaggccctgagcgacgcatgtatgggcacaatcgcctccttcctgtctaagtaccaggacatcatcatcgaacaccagaaggtggtgaagggcaaccagaagagactggagagcctgcgggagctggccggcaaggaaaacctggaataccctagcgtgaccctgccacctcagcctcacaccaaggagggcgttgatgcctacaacgaagtgatcgcccgggtgcgaatgtgggtgaacctgaacctgtggcagaagctgaagctaagcagagatgatgccaagcctctgctgagactgaagggattcccttcctttcctctggtcgagagacaggccaacgaagtggactggtgggacatggtgtgtaacgtgaagaagctgatcaacgagaaaaaggaggatggcaaggtgttttggcagaatctggctggctacaagagacaggaagccctgagaccatacctgagcagcgaggaagatcggaagaagggaaagaaattcgctcggtaccagctgggcgacctgctgctgcacctggaaaagaagcacggcgaggactggggaaaggtgtacgacgaggcctgggagcggattgacaagaaagtggaaggcctgagcaagcacatcaagctggaagaggaacggagaagcgaggacgcccagagcaaggccgccctgaccgactggctgcgggctaaggccagcttcgtgatcgagggcctgaaggaggccgacaaggacgagttctgcagatgcgagctgaagctgcagaagtggtacggggacctgcggggaaagcccttcgccatcgaagccgagaacagcatcctggacatcagcggcttcagcaagcagtacaactgtgccttcatctggcagaaggacggcgtgaagaagctgaacctgtacctgatcatcaactacttcaagggcggcaagctgcggttcaagaagatcaaacctgaagccttcgaagccaacagattctacaccgtgatcaacaaaaagagcggcgagatcgtgcccatggaggtgaacttcaacttcgacgaccccaacctgatcatcctgcctctggcctttggcaagagacagggcagagaattcatctggaacgacctgctgtccctggaaaccggcagcctgaagctggccaacggaagagtgatcgagaagacactgtacaacagaagaacccggcaggatgagcctgccctgttcgtggccctgaccttcgagcggcgggaggtcctggactcctccaatatcaaaccaatgaacctgatcggcgtggcaagaggcgaaaacatccccgccgtgatcgccctgaccgaccccgagggctgcccactgagccggtttaaggatagcctgggaaacccaacccacatcctgagaatcggcgagagctataaggagaagcagcggaccatccaggccaagaaggaggtggagcagcggagagccggcggctacagccggaagtacgccagcaaagccaagaatctggcagacgatatggtgagaaacaccgctagagatctgctgtactacgccgtgacccaggatgccatgctgatcttcgccaacctgagccggggcttcggccggcagggcaagcggaccttcatggccgagagacagtacacacggatggaggactggctgaccgccaagctggcctacgagggcctgagcaagacctacctgtccaagacactggcccagtacacctccaagacatgcagcaactgtgggtttaccatcaccagcgccgactacgacagggtgctggagaagctgaagaagacagcaacaggctggatgaccacaattaacggcaaggagctgaaggtggagggccagattacctactacaacagatacaagagacagaacgtagtcaaggacctgtccgtcgagctggatagactgagcgaagaatctgtgaacaacgacatctcctcctggacaaagggcagaagcggagaagctctgagcctcctgaagaaaagattctcccatagacccgtgcaggagaagttcgtgtgcctgaactgcggcttcgagacacacgcagccgagcaagccgccctgaacatcgccagatcctggctgttcctgcggagccaggagtacaagaaataccagacaaacaagacaaccggcaacaccgataagagagccttcgtcgagacctggcagtccttttaccggaagaagcttaaggaggtgtggaaacctgccgtgcggtctggcggatctggcggaggctccacaagcttcggcaacctgctgggcgtgccctgggcccagggcaacagcgccctgcccgagggcctgctgagcttcaaggacatcagcatggagttcacctgggacgagtggcagctgctggacagcacccagaagtacctgtacagggacgtgatcctggagaactaccacaacctgatcagcgtgggctaccacggcaccaagcccgacctgatcttcaagctggagcagggcgaggacccctggatcaccagccccaagaaaaagagaaaagtctaagctgccttctgcggggcttgccttctggccatgcccttcttctctcccttgcacctgtacctcttggtctttgaataaagcctgagtaggaaggctagcaaaaaaaaaaaaaaaaaaaaaaaaaaaaaaaaaaaaaaaaaaaaaaaaaaaaaaaaaaaaaaaaaaaaaaaaaaaaaaaa

SEQ ID NO: 3423 - RNA, 5419 nt, synthetic construct
  source 1..5419: mol_type = other RNA
aggaaataagagagaaaagaagagtaagaagaaatataagagccaccatggcccctaagaagaagcgtaaagtgagccgggtgaacggcagcggcagcggcggcggcatgaaccacgaccaggagttcgacccccctaaggtgtaccctcccgtccccgccgagaagagaaagcccatccgggtcctgagcctgttcgatggcatcgccaccggtctgctggtgctgaaggacctgggcatccaggtggataggtacattgcctccgaggtgtgcgaggactccatcaccgtgggaatggtgcgtcatcagggcaagatcatgtacgtgggcgacgtgcggagcgtgacacagaagcatatccaggagtggggccctttcgacctggtgatcggcggcagcccttgcaatgacctgagcatcgtgaacccagcccggaagggcctgtacgagggaaccggcagactgttcttcgagttttacagactgctgcacgacgcccggcctaaggaaggcgacgaccggcccttcttttggctgttcgagaatgtggtggccatgggagtcagcgacaagcgggatattagccggttcctggagagcaaccccgtgatgatcgatgccaaggaagtgagcgccgcccaccgggccagatacttctggggcaatctgcctggcatgaacagacccctggccagcaccgtgaacgacaagctggagctgcaggagtgcctggagcacggccggatcgccaagttcagcaaggtgagaaccatcaccacccgaagcaacagcatcaaacaaggcaaggaccagcactttcctgtgttcatgaacgagaaggaggacatcctgtggtgtaccgagatggagagagtgttcgggttcccagtccactacacagatgtcagcaacatgtctagactggccagacagagactgctgggaagaagctggtccgtccctgtgatcagacacctgttcgcccctctgaaggagtacttcgcctgcgtgagcagcggcaacagcaacgccaacagccggggccccagcttctctagcggcctggtgccactgtccctgagagggagccacatgggccccatggagatctacaaaaccgtgagcgcctggaagcggcagcctgtgcgcgtgctgagcctgtttcggaatatcgataaagtcctgaaaagcctgggattcctggagagcggctctggctccggcggtggcaccctgaagtacgtggaggatgtgacaaacgtggtcagacgggatgtggagaagtggggccccttcgatctggtgtacggcagcacccaacccctgggcagctcttgtgaccggtgccctggctggtacatgtttcagttccaccggatcctgcagtacgccctgccgagacaggagtcccagcggccattcttttggattttcatggacaacttgctgctgaccgaggatgaccaggaaactaccactcggttcctgcagaccgaagccgtgaccctgcaggacgtgagaggccgggactaccagaacgccatgcgggtgtggtccaacatccctggactgaaaagcaagcacgcacctctgacccctaaagaagaggagtacctgcaggcccaggtgcggagcagaagcaagctggacgcccctaaggtggatctgctggtgaagaattgcctcctgcccctgagagagtacttcaagtatttcagccagaatagtctgcccctgggcggcccaagcagcggcgcccctcctcccagcggcggcagcccagccggctccccaacctctaccgaggagggcacctctgagtccgccacccccgagagcggccctggcacctccaccgagcccagcgagggcagcgcacccggcagccctgccggcagccccacctccacagaggagggaaccagcaccgagcccagcgaaggcagcgccccaggcaccagcaccgagcctagtgagggcggctctggcggcggcagcgcccaggagattaaacggatcaacaagatcagaagaagacttgtgaaagacagcaacaccaagaaggccggcaagacaggccccatgaaaaccctgctggttagagtgatgacacccgatctgagagagcggctggaaaacctgagaaagaagcctgaaaatatcccccagcccatcagcaatacatctagagccaacctgaataagctgctgaccgattacaccgaaatgaagaaggcgatcctgcatgtgtactgggaagagttccagaaggaccctgtgggcctgatgagccgggtggcccagcctgccagcaagaagatcgatcagaacaagctgaaacctgagatggacgagaagggcaacctgaccaccgccggctttgcctgctctcagtgtggccagcccctgttcgtgtacaagctggagcaggtgtctgagaagggcaaggcttacaccaactacttcggacggtgcaatgtggccgagcacgaaaagctgatcctgctggcccagctgaagcccgagaaggatagcgacgaagccgtgacatatagcctgggaaagtttgggcagagggccctggatttctacagcattcatgtgaccaaggagtccacccaccccgtgaagcccctggcccagatcgccggaaacagatacgcctccggacctgtgggaaaggccctgagcgacgcatgtatgggcacaatcgcctccttcctgtctaagtaccaggacatcatcatcgaacaccagaaggtggtgaagggcaaccagaagagactggagagcctgcgggagctggccggcaaggaaaacctggaataccctagcgtgaccctgccacctcagcctcacaccaaggagggcgttgatgcctacaacgaagtgatcgcccgggtgcgaatgtgggtgaacctgaacctgtggcagaagctgaagctaagcagagatgatgccaagcctctgctgagactgaagggattcccttcctttcctctggtcgagagacaggccaacgaagtggactggtgggacatggtgtgtaacgtgaagaagctgatcaacgagaaaaaggaggatggcaaggtgttttggcagaatctggctggctacaagagacaggaagccctgagaccatacctgagcagcgaggaagatcggaagaagggaaagaaattcgctcggtaccagctgggcgacctgctgctgcacctggaaaagaagcacggcgaggactggggaaaggtgtacgacgaggcctgggagcggattgacaagaaagtggaaggcctgagcaagcacatcaagctggaagaggaacggagaagcgaggacgcccagagcaaggccgccctgaccgactggctgcgggctaaggccagcttcgtgatcgagggcctgaaggaggccgacaaggacgagttctgcagatgcgagctgaagctgcagaagtggtacggggacctgcggggaaagcccttcgccatcgaagccgagaacagcatcctggacatcagcggcttcagcaagcagtacaactgtgccttcatctggcagaaggacggcgtgaagaagctgaacctgtacctgatcatcaactacttcaagggcggcaagctgcggttcaagaagatcaaacctgaagccttcgaagccaacagattctacaccgtgatcaacaaaaagagcggcgagatcgtgcccatggaggtgaacttcaacttcgacgaccccaacctgatcatcctgcctctggcctttggcaagagacagggcagagaattcatctggaacgacctgctgtccctggaaaccggcagcctgaagctggccaacggaagagtgatcgagaagacactgtacaacagaagaacccggcaggatgagcctgccctgttcgtggccctgaccttcgagcggcgggaggtcctggactcctccaatatcaaaccaatgaacctgatcggcgtggcaagaggcgaaaacatccccgccgtgatcgccctgaccgaccccgagggctgcccactgagccggtttaaggatagcctgggaaacccaacccacatcctgagaatcggcgagagctataaggagaagcagcggaccatccaggccaagaaggaggtggagcagcggagagccggcggctacagccggaagtacgccagcaaagccaagaatctggcagacgatatggtgagaaacaccgctagagatctgctgtactacgccgtgacccaggatgccatgctgatcttcgccaacctgagccggggcttcggccggcagggcaagcggaccttcatggccgagagacagtacacacggatggaggactggctgaccgccaagctggcctacgagggcctgagcaagacctacctgtccaagacactggcccagtacacctccaagacatgcagcaactgtgggtttaccatcaccagcgccgactacgacagggtgctggagaagctgaagaagacagcaacaggctggatgaccacaattaacggcaaggagctgaaggtggagggccagattacctactacaacagatacaagagacagaacgtagtcaaggacctgtccgtcgagctggatagactgagcgaagaatctgtgaacaacgacatctcctcctggacaaagggcagaagcggagaagctctgagcctcctgaagaaaagattctcccatagacccgtgcaggagaagttcgtgtgcctgaactgcggcttcgagacacacgcagccgagcaagccgccctgaacatcgccagatcctggctgttcctgcggagccaggagtacaagaaataccagacaaacaagacaaccggcaacaccgataagagagccttcgtcgagacctggcagtccttttaccggaagaagcttaaggaggtgtggaaacctgccgtgcggtctggcggatctggcggaggctccacaagcatgggcagcgtgagcttcgaggacatcagcctggacttcacctgggacgagtggcaggacctggacagcgcccagaggaccctgtacagggacgtgatgctggagaactacagcagcctgatgttcctgggccactgcaccaccaagcccgagctgatcttcaagctggagcacggcttcggcccctggagcctggccgaggccagcatccagagcctgcccggcgtgcacaagatgaccgtgaccagccccaagaaaaagagaaaagtctaagctgccttctgcggggcttgccttctggccatgcccttcttctctcccttgcacctgtacctcttggtctttgaataaagcctgagtaggaaggctagcaaaaaaaaaaaaaaaaaaaaaaaaaaaaaaaaaaaaaaaaaaaaaaaaaaaaaaaaaaaaaaaaaaaaaaaaaaaaaaaa

SEQ ID NO: 3424 - RNA, 5419 nt, synthetic construct
  source 1..5419: mol_type = other RNA
aggaaataagagagaaaagaagagtaagaagaaatataagagccaccatggcccctaagaagaagcgtaaagtgagccgggtgaacggcagcggcagcggcggcggcatgaaccacgaccaggagttcgacccccctaaggtgtaccctcccgtccccgccgagaagagaaagcccatccgggtcctgagcctgttcgatggcatcgccaccggtctgctggtgctgaaggacctgggcatccaggtggataggtacattgcctccgaggtgtgcgaggactccatcaccgtgggaatggtgcgtcatcagggcaagatcatgtacgtgggcgacgtgcggagcgtgacacagaagcatatccaggagtggggccctttcgacctggtgatcggcggcagcccttgcaatgacctgagcatcgtgaacccagcccggaagggcctgtacgagggaaccggcagactgttcttcgagttttacagactgctgcacgacgcccggcctaaggaaggcgacgaccggcccttcttttggctgttcgagaatgtggtggccatgggagtcagcgacaagcgggatattagccggttcctggagagcaaccccgtgatgatcgatgccaaggaagtgagcgccgcccaccgggccagatacttctggggcaatctgcctggcatgaacagacccctggccagcaccgtgaacgacaagctggagctgcaggagtgcctggagcacggccggatcgccaagttcagcaaggtgagaaccatcaccacccgaagcaacagcatcaaacaaggcaaggaccagcactttcctgtgttcatgaacgagaaggaggacatcctgtggtgtaccgagatggagagagtgttcgggttcccagtccactacacagatgtcagcaacatgtctagactggccagacagagactgctgggaagaagctggtccgtccctgtgatcagacacctgttcgcccctctgaaggagtacttcgcctgcgtgagcagcggcaacagcaacgccaacagccggggccccagcttctctagcggcctggtgccactgtccctgagagggagccacatgggccccatggagatctacaaaaccgtgagcgcctggaagcggcagcctgtgcgcgtgctgagcctgtttcggaatatcgataaagtcctgaaaagcctgggattcctggagagcggctctggctccggcggtggcaccctgaagtacgtggaggatgtgacaaacgtggtcagacgggatgtggagaagtggggccccttcgatctggtgtacggcagcacccaacccctgggcagctcttgtgaccggtgccctggctggtacatgtttcagttccaccggatcctgcagtacgccctgccgagacaggagtcccagcggccattcttttggattttcatggacaacttgctgctgaccgaggatgaccaggaaactaccactcggttcctgcagaccgaagccgtgaccctgcaggacgtgagaggccgggactaccagaacgccatgcgggtgtggtccaacatccctggactgaaaagcaagcacgcacctctgacccctaaagaagaggagtacctgcaggcccaggtgcggagcagaagcaagctggacgcccctaaggtggatctgctggtgaagaattgcctcctgcccctgagagagtacttcaagtatttcagccagaatagtctgcccctgggcggcccaagcagcggcgcccctcctcccagcggcggcagcccagccggctccccaacctctaccgaggagggcacctctgagtccgccacccccgagagcggccctggcacctccaccgagcccagcgagggcagcgcacccggcagccctgccggcagccccacctccacagaggagggaaccagcaccgagcccagcgaaggcagcgccccaggcaccagcaccgagcctagtgagggcggctctggcggcggcagcgcccaggagattaaacggatcaacaagatcagaagaagacttgtgaaagacagcaacaccaagaaggccggcaagacaggccccatgaaaaccctgctggttagagtgatgacacccgatctgagagagcggctggaaaacctgagaaagaagcctgaaaatatcccccagcccatcagcaatacatctagagccaacctgaataagctgctgaccgattacaccgaaatgaagaaggcgatcctgcatgtgtactgggaagagttccagaaggaccctgtgggcctgatgagccgggtggcccagcctgccagcaagaagatcgatcagaacaagctgaaacctgagatggacgagaagggcaacctgaccaccgccggctttgcctgctctcagtgtggccagcccctgttcgtgtacaagctggagcaggtgtctgagaagggcaaggcttacaccaactacttcggacggtgcaatgtggccgagcacgaaaagctgatcctgctggcccagctgaagcccgagaaggatagcgacgaagccgtgacatatagcctgggaaagtttgggcagagggccctggatttctacagcattcatgtgaccaaggagtccacccaccccgtgaagcccctggcccagatcgccggaaacagatacgcctccggacctgtgggaaaggccctgagcgacgcatgtatgggcacaatcgcctccttcctgtctaagtaccaggacatcatcatcgaacaccagaaggtggtgaagggcaaccagaagagactggagagcctgcgggagctggccggcaaggaaaacctggaataccctagcgtgaccctgccacctcagcctcacaccaaggagggcgttgatgcctacaacgaagtgatcgcccgggtgcgaatgtgggtgaacctgaacctgtggcagaagctgaagctaagcagagatgatgccaagcctctgctgagactgaagggattcccttcctttcctctggtcgagagacaggccaacgaagtggactggtgggacatggtgtgtaacgtgaagaagctgatcaacgagaaaaaggaggatggcaaggtgttttggcagaatctggctggctacaagagacaggaagccctgagaccatacctgagcagcgaggaagatcggaagaagggaaagaaattcgctcggtaccagctgggcgacctgctgctgcacctggaaaagaagcacggcgaggactggggaaaggtgtacgacgaggcctgggagcggattgacaagaaagtggaaggcctgagcaagcacatcaagctggaagaggaacggagaagcgaggacgcccagagcaaggccgccctgaccgactggctgcgggctaaggccagcttcgtgatcgagggcctgaaggaggccgacaaggacgagttctgcagatgcgagctgaagctgcagaagtggtacggggacctgcggggaaagcccttcgccatcgaagccgagaacagcatcctggacatcagcggcttcagcaagcagtacaactgtgccttcatctggcagaaggacggcgtgaagaagctgaacctgtacctgatcatcaactacttcaagggcggcaagctgcggttcaagaagatcaaacctgaagccttcgaagccaacagattctacaccgtgatcaacaaaaagagcggcgagatcgtgcccatggaggtgaacttcaacttcgacgaccccaacctgatcatcctgcctctggcctttggcaagagacagggcagagaattcatctggaacgacctgctgtccctggaaaccggcagcctgaagctggccaacggaagagtgatcgagaagacactgtacaacagaagaacccggcaggatgagcctgccctgttcgtggccctgaccttcgagcggcgggaggtcctggactcctccaatatcaaaccaatgaacctgatcggcgtggcaagaggcgaaaacatccccgccgtgatcgccctgaccgaccccgagggctgcccactgagccggtttaaggatagcctgggaaacccaacccacatcctgagaatcggcgagagctataaggagaagcagcggaccatccaggccaagaaggaggtggagcagcggagagccggcggctacagccggaagtacgccagcaaagccaagaatctggcagacgatatggtgagaaacaccgctagagatctgctgtactacgccgtgacccaggatgccatgctgatcttcgccaacctgagccggggcttcggccggcagggcaagcggaccttcatggccgagagacagtacacacggatggaggactggctgaccgccaagctggcctacgagggcctgagcaagacctacctgtccaagacactggcccagtacacctccaagacatgcagcaactgtgggtttaccatcaccagcgccgactacgacagggtgctggagaagctgaagaagacagcaacaggctggatgaccacaattaacggcaaggagctgaaggtggagggccagattacctactacaacagatacaagagacagaacgtagtcaaggacctgtccgtcgagctggatagactgagcgaagaatctgtgaacaacgacatctcctcctggacaaagggcagaagcggagaagctctgagcctcctgaagaaaagattctcccatagacccgtgcaggagaagttcgtgtgcctgaactgcggcttcgagacacacgcagccgagcaagccgccctgaacatcgccagatcctggctgttcctgcggagccaggagtacaagaaataccagacaaacaagacaaccggcaacaccgataagagagccttcgtcgagacctggcagtccttttaccggaagaagcttaaggaggtgtggaaacctgccgtgcggtctggcggatctggcggaggctccacaagcgtgcccgagcccgtgaccttcgaggacgtggccgtggacttcacccaggaggagtggggccagctggacctggtgcagaggaccctgtacagggacgtgatgctggagacctacggccacctgctgagcgtgggcaaccagatcgccaagcccgaggtgatcagcctgctggagcagggcgaggagccctggctggtggagcagacctgccccgagagcagctgccccgagtggatgagggacaccagccccaagaaaaagagaaaagtctaagctgccttctgcggggcttgccttctggccatgcccttcttctctcccttgcacctgtacctcttggtctttgaataaagcctgagtaggaaggctagcaaaaaaaaaaaaaaaaaaaaaaaaaaaaaaaaaaaaaaaaaaaaaaaaaaaaaaaaaaaaaaaaaaaaaaaaaaaaaaaa

SEQ ID NO: 3425 - RNA, 5419 nt, synthetic construct
  source 1..5419: mol_type = other RNA
aggaaataagagagaaaagaagagtaagaagaaatataagagccaccatggcccctaagaagaagcgtaaagtgagccgggtgaacggcagcggcagcggcggcggcatgaaccacgaccaggagttcgacccccctaaggtgtaccctcccgtccccgccgagaagagaaagcccatccgggtcctgagcctgttcgatggcatcgccaccggtctgctggtgctgaaggacctgggcatccaggtggataggtacattgcctccgaggtgtgcgaggactccatcaccgtgggaatggtgcgtcatcagggcaagatcatgtacgtgggcgacgtgcggagcgtgacacagaagcatatccaggagtggggccctttcgacctggtgatcggcggcagcccttgcaatgacctgagcatcgtgaacccagcccggaagggcctgtacgagggaaccggcagactgttcttcgagttttacagactgctgcacgacgcccggcctaaggaaggcgacgaccggcccttcttttggctgttcgagaatgtggtggccatgggagtcagcgacaagcgggatattagccggttcctggagagcaaccccgtgatgatcgatgccaaggaagtgagcgccgcccaccgggccagatacttctggggcaatctgcctggcatgaacagacccctggccagcaccgtgaacgacaagctggagctgcaggagtgcctggagcacggccggatcgccaagttcagcaaggtgagaaccatcaccacccgaagcaacagcatcaaacaaggcaaggaccagcactttcctgtgttcatgaacgagaaggaggacatcctgtggtgtaccgagatggagagagtgttcgggttcccagtccactacacagatgtcagcaacatgtctagactggccagacagagactgctgggaagaagctggtccgtccctgtgatcagacacctgttcgcccctctgaaggagtacttcgcctgcgtgagcagcggcaacagcaacgccaacagccggggccccagcttctctagcggcctggtgccactgtccctgagagggagccacatgggccccatggagatctacaaaaccgtgagcgcctggaagcggcagcctgtgcgcgtgctgagcctgtttcggaatatcgataaagtcctgaaaagcctgggattcctggagagcggctctggctccggcggtggcaccctgaagtacgtggaggatgtgacaaacgtggtcagacgggatgtggagaagtggggccccttcgatctggtgtacggcagcacccaacccctgggcagctcttgtgaccggtgccctggctggtacatgtttcagttccaccggatcctgcagtacgccctgccgagacaggagtcccagcggccattcttttggattttcatggacaacttgctgctgaccgaggatgaccaggaaactaccactcggttcctgcagaccgaagccgtgaccctgcaggacgtgagaggccgggactaccagaacgccatgcgggtgtggtccaacatccctggactgaaaagcaagcacgcacctctgacccctaaagaagaggagtacctgcaggcccaggtgcggagcagaagcaagctggacgcccctaaggtggatctgctggtgaagaattgcctcctgcccctgagagagtacttcaagtatttcagccagaatagtctgcccctgggcggcccaagcagcggcgcccctcctcccagcggcggcagcccagccggctccccaacctctaccgaggagggcacctctgagtccgccacccccgagagcggccctggcacctccaccgagcccagcgagggcagcgcacccggcagccctgccggcagccccacctccacagaggagggaaccagcaccgagcccagcgaaggcagcgccccaggcaccagcaccgagcctagtgagggcggctctggcggcggcagcgcccaggagattaaacggatcaacaagatcagaagaagacttgtgaaagacagcaacaccaagaaggccggcaagacaggccccatgaaaaccctgctggttagagtgatgacacccgatctgagagagcggctggaaaacctgagaaagaagcctgaaaatatcccccagcccatcagcaatacatctagagccaacctgaataagctgctgaccgattacaccgaaatgaagaaggcgatcctgcatgtgtactgggaagagttccagaaggaccctgtgggcctgatgagccgggtggcccagcctgccagcaagaagatcgatcagaacaagctgaaacctgagatggacgagaagggcaacctgaccaccgccggctttgcctgctctcagtgtggccagcccctgttcgtgtacaagctggagcaggtgtctgagaagggcaaggcttacaccaactacttcggacggtgcaatgtggccgagcacgaaaagctgatcctgctggcccagctgaagcccgagaaggatagcgacgaagccgtgacatatagcctgggaaagtttgggcagagggccctggatttctacagcattcatgtgaccaaggagtccacccaccccgtgaagcccctggcccagatcgccggaaacagatacgcctccggacctgtgggaaaggccctgagcgacgcatgtatgggcacaatcgcctccttcctgtctaagtaccaggacatcatcatcgaacaccagaaggtggtgaagggcaaccagaagagactggagagcctgcgggagctggccggcaaggaaaacctggaataccctagcgtgaccctgccacctcagcctcacaccaaggagggcgttgatgcctacaacgaagtgatcgcccgggtgcgaatgtgggtgaacctgaacctgtggcagaagctgaagctaagcagagatgatgccaagcctctgctgagactgaagggattcccttcctttcctctggtcgagagacaggccaacgaagtggactggtgggacatggtgtgtaacgtgaagaagctgatcaacgagaaaaaggaggatggcaaggtgttttggcagaatctggctggctacaagagacaggaagccctgagaccatacctgagcagcgaggaagatcggaagaagggaaagaaattcgctcggtaccagctgggcgacctgctgctgcacctggaaaagaagcacggcgaggactggggaaaggtgtacgacgaggcctgggagcggattgacaagaaagtggaaggcctgagcaagcacatcaagctggaagaggaacggagaagcgaggacgcccagagcaaggccgccctgaccgactggctgcgggctaaggccagcttcgtgatcgagggcctgaaggaggccgacaaggacgagttctgcagatgcgagctgaagctgcagaagtggtacggggacctgcggggaaagcccttcgccatcgaagccgagaacagcatcctggacatcagcggcttcagcaagcagtacaactgtgccttcatctggcagaaggacggcgtgaagaagctgaacctgtacctgatcatcaactacttcaagggcggcaagctgcggttcaagaagatcaaacctgaagccttcgaagccaacagattctacaccgtgatcaacaaaaagagcggcgagatcgtgcccatggaggtgaacttcaacttcgacgaccccaacctgatcatcctgcctctggcctttggcaagagacagggcagagaattcatctggaacgacctgctgtccctggaaaccggcagcctgaagctggccaacggaagagtgatcgagaagacactgtacaacagaagaacccggcaggatgagcctgccctgttcgtggccctgaccttcgagcggcgggaggtcctggactcctccaatatcaaaccaatgaacctgatcggcgtggcaagaggcgaaaacatccccgccgtgatcgccctgaccgaccccgagggctgcccactgagccggtttaaggatagcctgggaaacccaacccacatcctgagaatcggcgagagctataaggagaagcagcggaccatccaggccaagaaggaggtggagcagcggagagccggcggctacagccggaagtacgccagcaaagccaagaatctggcagacgatatggtgagaaacaccgctagagatctgctgtactacgccgtgacccaggatgccatgctgatcttcgccaacctgagccggggcttcggccggcagggcaagcggaccttcatggccgagagacagtacacacggatggaggactggctgaccgccaagctggcctacgagggcctgagcaagacctacctgtccaagacactggcccagtacacctccaagacatgcagcaactgtgggtttaccatcaccagcgccgactacgacagggtgctggagaagctgaagaagacagcaacaggctggatgaccacaattaacggcaaggagctgaaggtggagggccagattacctactacaacagatacaagagacagaacgtagtcaaggacctgtccgtcgagctggatagactgagcgaagaatctgtgaacaacgacatctcctcctggacaaagggcagaagcggagaagctctgagcctcctgaagaaaagattctcccatagacccgtgcaggagaagttcgtgtgcctgaactgcggcttcgagacacacgcagccgagcaagccgccctgaacatcgccagatcctggctgttcctgcggagccaggagtacaagaaataccagacaaacaagacaaccggcaacaccgataagagagccttcgtcgagacctggcagtccttttaccggaagaagcttaaggaggtgtggaaacctgccgtgcggtctggcggatctggcggaggctccacaagcttccaggagagcgtgaccttcaaggacgtggccgtggagttcaccggcgaggagtggaggcagctggacagggcccagaggagcctgttcagggacgtgatgctggagaactacaggaacctggtgagcctgggcctgaccgtggccaagcccaacctgatcttcctgctggagaggggcgaggccccctggaccctgcagaggcagatccccggcggcaccagcagcgactgcccctgctggaccagccccaagaaaaagagaaaagtctaagctgccttctgcggggcttgccttctggccatgcccttcttctctcccttgcacctgtacctcttggtctttgaataaagcctgagtaggaaggctagcaaaaaaaaaaaaaaaaaaaaaaaaaaaaaaaaaaaaaaaaaaaaaaaaaaaaaaaaaaaaaaaaaaaaaaaaaaaaaaaa

SEQ ID NO: 3426 - RNA, 5419 nt, synthetic construct
  source 1..5419: mol_type = other RNA
aggaaataagagagaaaagaagagtaagaagaaatataagagccaccatggcccctaagaagaagcgtaaagtgagccgggtgaacggcagcggcagcggcggcggcatgaaccacgaccaggagttcgacccccctaaggtgtaccctcccgtccccgccgagaagagaaagcccatccgggtcctgagcctgttcgatggcatcgccaccggtctgctggtgctgaaggacctgggcatccaggtggataggtacattgcctccgaggtgtgcgaggactccatcaccgtgggaatggtgcgtcatcagggcaagatcatgtacgtgggcgacgtgcggagcgtgacacagaagcatatccaggagtggggccctttcgacctggtgatcggcggcagcccttgcaatgacctgagcatcgtgaacccagcccggaagggcctgtacgagggaaccggcagactgttcttcgagttttacagactgctgcacgacgcccggcctaaggaaggcgacgaccggcccttcttttggctgttcgagaatgtggtggccatgggagtcagcgacaagcgggatattagccggttcctggagagcaaccccgtgatgatcgatgccaaggaagtgagcgccgcccaccgggccagatacttctggggcaatctgcctggcatgaacagacccctggccagcaccgtgaacgacaagctggagctgcaggagtgcctggagcacggccggatcgccaagttcagcaaggtgagaaccatcaccacccgaagcaacagcatcaaacaaggcaaggaccagcactttcctgtgttcatgaacgagaaggaggacatcctgtggtgtaccgagatggagagagtgttcgggttcccagtccactacacagatgtcagcaacatgtctagactggccagacagagactgctgggaagaagctggtccgtccctgtgatcagacacctgttcgcccctctgaaggagtacttcgcctgcgtgagcagcggcaacagcaacgccaacagccggggccccagcttctctagcggcctggtgccactgtccctgagagggagccacatgggccccatggagatctacaaaaccgtgagcgcctggaagcggcagcctgtgcgcgtgctgagcctgtttcggaatatcgataaagtcctgaaaagcctgggattcctggagagcggctctggctccggcggtggcaccctgaagtacgtggaggatgtgacaaacgtggtcagacgggatgtggagaagtggggccccttcgatctggtgtacggcagcacccaacccctgggcagctcttgtgaccggtgccctggctggtacatgtttcagttccaccggatcctgcagtacgccctgccgagacaggagtcccagcggccattcttttggattttcatggacaacttgctgctgaccgaggatgaccaggaaactaccactcggttcctgcagaccgaagccgtgaccctgcaggacgtgagaggccgggactaccagaacgccatgcgggtgtggtccaacatccctggactgaaaagcaagcacgcacctctgacccctaaagaagaggagtacctgcaggcccaggtgcggagcagaagcaagctggacgcccctaaggtggatctgctggtgaagaattgcctcctgcccctgagagagtacttcaagtatttcagccagaatagtctgcccctgggcggcccaagcagcggcgcccctcctcccagcggcggcagcccagccggctccccaacctctaccgaggagggcacctctgagtccgccacccccgagagcggccctggcacctccaccgagcccagcgagggcagcgcacccggcagccctgccggcagccccacctccacagaggagggaaccagcaccgagcccagcgaaggcagcgccccaggcaccagcaccgagcctagtgagggcggctctggcggcggcagcgcccaggagattaaacggatcaacaagatcagaagaagacttgtgaaagacagcaacaccaagaaggccggcaagacaggccccatgaaaaccctgctggttagagtgatgacacccgatctgagagagcggctggaaaacctgagaaagaagcctgaaaatatcccccagcccatcagcaatacatctagagccaacctgaataagctgctgaccgattacaccgaaatgaagaaggcgatcctgcatgtgtactgggaagagttccagaaggaccctgtgggcctgatgagccgggtggcccagcctgccagcaagaagatcgatcagaacaagctgaaacctgagatggacgagaagggcaacctgaccaccgccggctttgcctgctctcagtgtggccagcccctgttcgtgtacaagctggagcaggtgtctgagaagggcaaggcttacaccaactacttcggacggtgcaatgtggccgagcacgaaaagctgatcctgctggcccagctgaagcccgagaaggatagcgacgaagccgtgacatatagcctgggaaagtttgggcagagggccctggatttctacagcattcatgtgaccaaggagtccacccaccccgtgaagcccctggcccagatcgccggaaacagatacgcctccggacctgtgggaaaggccctgagcgacgcatgtatgggcacaatcgcctccttcctgtctaagtaccaggacatcatcatcgaacaccagaaggtggtgaagggcaaccagaagagactggagagcctgcgggagctggccggcaaggaaaacctggaataccctagcgtgaccctgccacctcagcctcacaccaaggagggcgttgatgcctacaacgaagtgatcgcccgggtgcgaatgtgggtgaacctgaacctgtggcagaagctgaagctaagcagagatgatgccaagcctctgctgagactgaagggattcccttcctttcctctggtcgagagacaggccaacgaagtggactggtgggacatggtgtgtaacgtgaagaagctgatcaacgagaaaaaggaggatggcaaggtgttttggcagaatctggctggctacaagagacaggaagccctgagaccatacctgagcagcgaggaagatcggaagaagggaaagaaattcgctcggtaccagctgggcgacctgctgctgcacctggaaaagaagcacggcgaggactggggaaaggtgtacgacgaggcctgggagcggattgacaagaaagtggaaggcctgagcaagcacatcaagctggaagaggaacggagaagcgaggacgcccagagcaaggccgccctgaccgactggctgcgggctaaggccagcttcgtgatcgagggcctgaaggaggccgacaaggacgagttctgcagatgcgagctgaagctgcagaagtggtacggggacctgcggggaaagcccttcgccatcgaagccgagaacagcatcctggacatcagcggcttcagcaagcagtacaactgtgccttcatctggcagaaggacggcgtgaagaagctgaacctgtacctgatcatcaactacttcaagggcggcaagctgcggttcaagaagatcaaacctgaagccttcgaagccaacagattctacaccgtgatcaacaaaaagagcggcgagatcgtgcccatggaggtgaacttcaacttcgacgaccccaacctgatcatcctgcctctggcctttggcaagagacagggcagagaattcatctggaacgacctgctgtccctggaaaccggcagcctgaagctggccaacggaagagtgatcgagaagacactgtacaacagaagaacccggcaggatgagcctgccctgttcgtggccctgaccttcgagcggcgggaggtcctggactcctccaatatcaaaccaatgaacctgatcggcgtggcaagaggcgaaaacatccccgccgtgatcgccctgaccgaccccgagggctgcccactgagccggtttaaggatagcctgggaaacccaacccacatcctgagaatcggcgagagctataaggagaagcagcggaccatccaggccaagaaggaggtggagcagcggagagccggcggctacagccggaagtacgccagcaaagccaagaatctggcagacgatatggtgagaaacaccgctagagatctgctgtactacgccgtgacccaggatgccatgctgatcttcgccaacctgagccggggcttcggccggcagggcaagcggaccttcatggccgagagacagtacacacggatggaggactggctgaccgccaagctggcctacgagggcctgagcaagacctacctgtccaagacactggcccagtacacctccaagacatgcagcaactgtgggtttaccatcaccagcgccgactacgacagggtgctggagaagctgaagaagacagcaacaggctggatgaccacaattaacggcaaggagctgaaggtggagggccagattacctactacaacagatacaagagacagaacgtagtcaaggacctgtccgtcgagctggatagactgagcgaagaatctgtgaacaacgacatctcctcctggacaaagggcagaagcggagaagctctgagcctcctgaagaaaagattctcccatagacccgtgcaggagaagttcgtgtgcctgaactgcggcttcgagacacacgcagccgagcaagccgccctgaacatcgccagatcctggctgttcctgcggagccaggagtacaagaaataccagacaaacaagacaaccggcaacaccgataagagagccttcgtcgagacctggcagtccttttaccggaagaagcttaaggaggtgtggaaacctgccgtgcggtctggcggatctggcggaggctccacaagcctgcagggcagcgtgagcttcaaggacgtgaccgtggacttcacccaggaggagtggcaccagctgaaccccgcccagaaggccctgtacagggacgtgatgctggagaactactgccacttcatcagcgtgggcttccacatgaccaagcccgacatgatcaggaagctggagcagggcgaggagctgtggaccgagaggatcttcagcaggcagagccacctggaggaggacggcaaggccaccagccccaagaaaaagagaaaagtctaagctgccttctgcggggcttgccttctggccatgcccttcttctctcccttgcacctgtacctcttggtctttgaataaagcctgagtaggaaggctagcaaaaaaaaaaaaaaaaaaaaaaaaaaaaaaaaaaaaaaaaaaaaaaaaaaaaaaaaaaaaaaaaaaaaaaaaaaaaaaaa

SEQ ID NO: 3427 - RNA, 5419 nt, synthetic construct
  source 1..5419: mol_type = other RNA
aggaaataagagagaaaagaagagtaagaagaaatataagagccaccatggcccctaagaagaagcgtaaagtgagccgggtgaacggcagcggcagcggcggcggcatgaaccacgaccaggagttcgacccccctaaggtgtaccctcccgtccccgccgagaagagaaagcccatccgggtcctgagcctgttcgatggcatcgccaccggtctgctggtgctgaaggacctgggcatccaggtggataggtacattgcctccgaggtgtgcgaggactccatcaccgtgggaatggtgcgtcatcagggcaagatcatgtacgtgggcgacgtgcggagcgtgacacagaagcatatccaggagtggggccctttcgacctggtgatcggcggcagcccttgcaatgacctgagcatcgtgaacccagcccggaagggcctgtacgagggaaccggcagactgttcttcgagttttacagactgctgcacgacgcccggcctaaggaaggcgacgaccggcccttcttttggctgttcgagaatgtggtggccatgggagtcagcgacaagcgggatattagccggttcctggagagcaaccccgtgatgatcgatgccaaggaagtgagcgccgcccaccgggccagatacttctggggcaatctgcctggcatgaacagacccctggccagcaccgtgaacgacaagctggagctgcaggagtgcctggagcacggccggatcgccaagttcagcaaggtgagaaccatcaccacccgaagcaacagcatcaaacaaggcaaggaccagcactttcctgtgttcatgaacgagaaggaggacatcctgtggtgtaccgagatggagagagtgttcgggttcccagtccactacacagatgtcagcaacatgtctagactggccagacagagactgctgggaagaagctggtccgtccctgtgatcagacacctgttcgcccctctgaaggagtacttcgcctgcgtgagcagcggcaacagcaacgccaacagccggggccccagcttctctagcggcctggtgccactgtccctgagagggagccacatgggccccatggagatctacaaaaccgtgagcgcctggaagcggcagcctgtgcgcgtgctgagcctgtttcggaatatcgataaagtcctgaaaagcctgggattcctggagagcggctctggctccggcggtggcaccctgaagtacgtggaggatgtgacaaacgtggtcagacgggatgtggagaagtggggccccttcgatctggtgtacggcagcacccaacccctgggcagctcttgtgaccggtgccctggctggtacatgtttcagttccaccggatcctgcagtacgccctgccgagacaggagtcccagcggccattcttttggattttcatggacaacttgctgctgaccgaggatgaccaggaaactaccactcggttcctgcagaccgaagccgtgaccctgcaggacgtgagaggccgggactaccagaacgccatgcgggtgtggtccaacatccctggactgaaaagcaagcacgcacctctgacccctaaagaagaggagtacctgcaggcccaggtgcggagcagaagcaagctggacgcccctaaggtggatctgctggtgaagaattgcctcctgcccctgagagagtacttcaagtatttcagccagaatagtctgcccctgggcggcccaagcagcggcgcccctcctcccagcggcggcagcccagccggctccccaacctctaccgaggagggcacctctgagtccgccacccccgagagcggccctggcacctccaccgagcccagcgagggcagcgcacccggcagccctgccggcagccccacctccacagaggagggaaccagcaccgagcccagcgaaggcagcgccccaggcaccagcaccgagcctagtgagggcggctctggcggcggcagcgcccaggagattaaacggatcaacaagatcagaagaagacttgtgaaagacagcaacaccaagaaggccggcaagacaggccccatgaaaaccctgctggttagagtgatgacacccgatctgagagagcggctggaaaacctgagaaagaagcctgaaaatatcccccagcccatcagcaatacatctagagccaacctgaataagctgctgaccgattacaccgaaatgaagaaggcgatcctgcatgtgtactgggaagagttccagaaggaccctgtgggcctgatgagccgggtggcccagcctgccagcaagaagatcgatcagaacaagctgaaacctgagatggacgagaagggcaacctgaccaccgccggctttgcctgctctcagtgtggccagcccctgttcgtgtacaagctggagcaggtgtctgagaagggcaaggcttacaccaactacttcggacggtgcaatgtggccgagcacgaaaagctgatcctgctggcccagctgaagcccgagaaggatagcgacgaagccgtgacatatagcctgggaaagtttgggcagagggccctggatttctacagcattcatgtgaccaaggagtccacccaccccgtgaagcccctggcccagatcgccggaaacagatacgcctccggacctgtgggaaaggccctgagcgacgcatgtatgggcacaatcgcctccttcctgtctaagtaccaggacatcatcatcgaacaccagaaggtggtgaagggcaaccagaagagactggagagcctgcgggagctggccggcaaggaaaacctggaataccctagcgtgaccctgccacctcagcctcacaccaaggagggcgttgatgcctacaacgaagtgatcgcccgggtgcgaatgtgggtgaacctgaacctgtggcagaagctgaagctaagcagagatgatgccaagcctctgctgagactgaagggattcccttcctttcctctggtcgagagacaggccaacgaagtggactggtgggacatggtgtgtaacgtgaagaagctgatcaacgagaaaaaggaggatggcaaggtgttttggcagaatctggctggctacaagagacaggaagccctgagaccatacctgagcagcgaggaagatcggaagaagggaaagaaattcgctcggtaccagctgggcgacctgctgctgcacctggaaaagaagcacggcgaggactggggaaaggtgtacgacgaggcctgggagcggattgacaagaaagtggaaggcctgagcaagcacatcaagctggaagaggaacggagaagcgaggacgcccagagcaaggccgccctgaccgactggctgcgggctaaggccagcttcgtgatcgagggcctgaaggaggccgacaaggacgagttctgcagatgcgagctgaagctgcagaagtggtacggggacctgcggggaaagcccttcgccatcgaagccgagaacagcatcctggacatcagcggcttcagcaagcagtacaactgtgccttcatctggcagaaggacggcgtgaagaagctgaacctgtacctgatcatcaactacttcaagggcggcaagctgcggttcaagaagatcaaacctgaagccttcgaagccaacagattctacaccgtgatcaacaaaaagagcggcgagatcgtgcccatggaggtgaacttcaacttcgacgaccccaacctgatcatcctgcctctggcctttggcaagagacagggcagagaattcatctggaacgacctgctgtccctggaaaccggcagcctgaagctggccaacggaagagtgatcgagaagacactgtacaacagaagaacccggcaggatgagcctgccctgttcgtggccctgaccttcgagcggcgggaggtcctggactcctccaatatcaaaccaatgaacctgatcggcgtggcaagaggcgaaaacatccccgccgtgatcgccctgaccgaccccgagggctgcccactgagccggtttaaggatagcctgggaaacccaacccacatcctgagaatcggcgagagctataaggagaagcagcggaccatccaggccaagaaggaggtggagcagcggagagccggcggctacagccggaagtacgccagcaaagccaagaatctggcagacgatatggtgagaaacaccgctagagatctgctgtactacgccgtgacccaggatgccatgctgatcttcgccaacctgagccggggcttcggccggcagggcaagcggaccttcatggccgagagacagtacacacggatggaggactggctgaccgccaagctggcctacgagggcctgagcaagacctacctgtccaagacactggcccagtacacctccaagacatgcagcaactgtgggtttaccatcaccagcgccgactacgacagggtgctggagaagctgaagaagacagcaacaggctggatgaccacaattaacggcaaggagctgaaggtggagggccagattacctactacaacagatacaagagacagaacgtagtcaaggacctgtccgtcgagctggatagactgagcgaagaatctgtgaacaacgacatctcctcctggacaaagggcagaagcggagaagctctgagcctcctgaagaaaagattctcccatagacccgtgcaggagaagttcgtgtgcctgaactgcggcttcgagacacacgcagccgagcaagccgccctgaacatcgccagatcctggctgttcctgcggagccaggagtacaagaaataccagacaaacaagacaaccggcaacaccgataagagagccttcgtcgagacctggcagtccttttaccggaagaagcttaaggaggtgtggaaacctgccgtgcggtctggcggatctggcggaggctccacaagcgccagcgtggtgttcgaggacgtggccgtgaacttcacccccgaggagtgggccctgctgaaccccggccagaggaagctgtacagggacgtgatgctggagacctgcaggaacctgagcgccgtgggctgcaggagccagggcaacaccagcacccccaggccccagtggagcatcctgctgaacgagccccccggcgaggacaagaccggcatcttcaccaggaaggacagctgcagcgtgaccagccccaagaaaaagagaaaagtctaagctgccttctgcggggcttgccttctggccatgcccttcttctctcccttgcacctgtacctcttggtctttgaataaagcctgagtaggaaggctagcaaaaaaaaaaaaaaaaaaaaaaaaaaaaaaaaaaaaaaaaaaaaaaaaaaaaaaaaaaaaaaaaaaaaaaaaaaaaaaaa

SEQ ID NO: 3428 - RNA, 5419 nt, synthetic construct
  source 1..5419: mol_type = other RNA
aggaaataagagagaaaagaagagtaagaagaaatataagagccaccatggcccctaagaagaagcgtaaagtgagccgggtgaacggcagcggcagcggcggcggcatgaaccacgaccaggagttcgacccccctaaggtgtaccctcccgtccccgccgagaagagaaagcccatccgggtcctgagcctgttcgatggcatcgccaccggtctgctggtgctgaaggacctgggcatccaggtggataggtacattgcctccgaggtgtgcgaggactccatcaccgtgggaatggtgcgtcatcagggcaagatcatgtacgtgggcgacgtgcggagcgtgacacagaagcatatccaggagtggggccctttcgacctggtgatcggcggcagcccttgcaatgacctgagcatcgtgaacccagcccggaagggcctgtacgagggaaccggcagactgttcttcgagttttacagactgctgcacgacgcccggcctaaggaaggcgacgaccggcccttcttttggctgttcgagaatgtggtggccatgggagtcagcgacaagcgggatattagccggttcctggagagcaaccccgtgatgatcgatgccaaggaagtgagcgccgcccaccgggccagatacttctggggcaatctgcctggcatgaacagacccctggccagcaccgtgaacgacaagctggagctgcaggagtgcctggagcacggccggatcgccaagttcagcaaggtgagaaccatcaccacccgaagcaacagcatcaaacaaggcaaggaccagcactttcctgtgttcatgaacgagaaggaggacatcctgtggtgtaccgagatggagagagtgttcgggttcccagtccactacacagatgtcagcaacatgtctagactggccagacagagactgctgggaagaagctggtccgtccctgtgatcagacacctgttcgcccctctgaaggagtacttcgcctgcgtgagcagcggcaacagcaacgccaacagccggggccccagcttctctagcggcctggtgccactgtccctgagagggagccacatgggccccatggagatctacaaaaccgtgagcgcctggaagcggcagcctgtgcgcgtgctgagcctgtttcggaatatcgataaagtcctgaaaagcctgggattcctggagagcggctctggctccggcggtggcaccctgaagtacgtggaggatgtgacaaacgtggtcagacgggatgtggagaagtggggccccttcgatctggtgtacggcagcacccaacccctgggcagctcttgtgaccggtgccctggctggtacatgtttcagttccaccggatcctgcagtacgccctgccgagacaggagtcccagcggccattcttttggattttcatggacaacttgctgctgaccgaggatgaccaggaaactaccactcggttcctgcagaccgaagccgtgaccctgcaggacgtgagaggccgggactaccagaacgccatgcgggtgtggtccaacatccctggactgaaaagcaagcacgcacctctgacccctaaagaagaggagtacctgcaggcccaggtgcggagcagaagcaagctggacgcccctaaggtggatctgctggtgaagaattgcctcctgcccctgagagagtacttcaagtatttcagccagaatagtctgcccctgggcggcccaagcagcggcgcccctcctcccagcggcggcagcccagccggctccccaacctctaccgaggagggcacctctgagtccgccacccccgagagcggccctggcacctccaccgagcccagcgagggcagcgcacccggcagccctgccggcagccccacctccacagaggagggaaccagcaccgagcccagcgaaggcagcgccccaggcaccagcaccgagcctagtgagggcggctctggcggcggcagcgcccaggagattaaacggatcaacaagatcagaagaagacttgtgaaagacagcaacaccaagaaggccggcaagacaggccccatgaaaaccctgctggttagagtgatgacacccgatctgagagagcggctggaaaacctgagaaagaagcctgaaaatatcccccagcccatcagcaatacatctagagccaacctgaataagctgctgaccgattacaccgaaatgaagaaggcgatcctgcatgtgtactgggaagagttccagaaggaccctgtgggcctgatgagccgggtggcccagcctgccagcaagaagatcgatcagaacaagctgaaacctgagatggacgagaagggcaacctgaccaccgccggctttgcctgctctcagtgtggccagcccctgttcgtgtacaagctggagcaggtgtctgagaagggcaaggcttacaccaactacttcggacggtgcaatgtggccgagcacgaaaagctgatcctgctggcccagctgaagcccgagaaggatagcgacgaagccgtgacatatagcctgggaaagtttgggcagagggccctggatttctacagcattcatgtgaccaaggagtccacccaccccgtgaagcccctggcccagatcgccggaaacagatacgcctccggacctgtgggaaaggccctgagcgacgcatgtatgggcacaatcgcctccttcctgtctaagtaccaggacatcatcatcgaacaccagaaggtggtgaagggcaaccagaagagactggagagcctgcgggagctggccggcaaggaaaacctggaataccctagcgtgaccctgccacctcagcctcacaccaaggagggcgttgatgcctacaacgaagtgatcgcccgggtgcgaatgtgggtgaacctgaacctgtggcagaagctgaagctaagcagagatgatgccaagcctctgctgagactgaagggattcccttcctttcctctggtcgagagacaggccaacgaagtggactggtgggacatggtgtgtaacgtgaagaagctgatcaacgagaaaaaggaggatggcaaggtgttttggcagaatctggctggctacaagagacaggaagccctgagaccatacctgagcagcgaggaagatcggaagaagggaaagaaattcgctcggtaccagctgggcgacctgctgctgcacctggaaaagaagcacggcgaggactggggaaaggtgtacgacgaggcctgggagcggattgacaagaaagtggaaggcctgagcaagcacatcaagctggaagaggaacggagaagcgaggacgcccagagcaaggccgccctgaccgactggctgcgggctaaggccagcttcgtgatcgagggcctgaaggaggccgacaaggacgagttctgcagatgcgagctgaagctgcagaagtggtacggggacctgcggggaaagcccttcgccatcgaagccgagaacagcatcctggacatcagcggcttcagcaagcagtacaactgtgccttcatctggcagaaggacggcgtgaagaagctgaacctgtacctgatcatcaactacttcaagggcggcaagctgcggttcaagaagatcaaacctgaagccttcgaagccaacagattctacaccgtgatcaacaaaaagagcggcgagatcgtgcccatggaggtgaacttcaacttcgacgaccccaacctgatcatcctgcctctggcctttggcaagagacagggcagagaattcatctggaacgacctgctgtccctggaaaccggcagcctgaagctggccaacggaagagtgatcgagaagacactgtacaacagaagaacccggcaggatgagcctgccctgttcgtggccctgaccttcgagcggcgggaggtcctggactcctccaatatcaaaccaatgaacctgatcggcgtggcaagaggcgaaaacatccccgccgtgatcgccctgaccgaccccgagggctgcccactgagccggtttaaggatagcctgggaaacccaacccacatcctgagaatcggcgagagctataaggagaagcagcggaccatccaggccaagaaggaggtggagcagcggagagccggcggctacagccggaagtacgccagcaaagccaagaatctggcagacgatatggtgagaaacaccgctagagatctgctgtactacgccgtgacccaggatgccatgctgatcttcgccaacctgagccggggcttcggccggcagggcaagcggaccttcatggccgagagacagtacacacggatggaggactggctgaccgccaagctggcctacgagggcctgagcaagacctacctgtccaagacactggcccagtacacctccaagacatgcagcaactgtgggtttaccatcaccagcgccgactacgacagggtgctggagaagctgaagaagacagcaacaggctggatgaccacaattaacggcaaggagctgaaggtggagggccagattacctactacaacagatacaagagacagaacgtagtcaaggacctgtccgtcgagctggatagactgagcgaagaatctgtgaacaacgacatctcctcctggacaaagggcagaagcggagaagctctgagcctcctgaagaaaagattctcccatagacccgtgcaggagaagttcgtgtgcctgaactgcggcttcgagacacacgcagccgagcaagccgccctgaacatcgccagatcctggctgttcctgcggagccaggagtacaagaaataccagacaaacaagacaaccggcaacaccgataagagagccttcgtcgagacctggcagtccttttaccggaagaagcttaaggaggtgtggaaacctgccgtgcggtctggcggatctggcggaggctccacaagcagcctgaccctggaggacgtggccgtggacttcacctgggaggagtggcagctgctgggccccgcccagaaggacctgtacagggacgtgatgctggagaactacagcaacctggtggccgtgggctaccaggccagcaagcccgacgccctgagcaagctggagcagggcgaggagccctgcaccaccgaggacgagatctacaccaggatctgctgcggcggccagccccagacctgcagcaccagccccaagaaaaagagaaaagtctaagctgccttctgcggggcttgccttctggccatgcccttcttctctcccttgcacctgtacctcttggtctttgaataaagcctgagtaggaaggctagcaaaaaaaaaaaaaaaaaaaaaaaaaaaaaaaaaaaaaaaaaaaaaaaaaaaaaaaaaaaaaaaaaaaaaaaaaaaaaaaa

SEQ ID NO: 3429 - RNA, 5419 nt, synthetic construct
  source 1..5419: mol_type = other RNA
aggaaataagagagaaaagaagagtaagaagaaatataagagccaccatggcccctaagaagaagcgtaaagtgagccgggtgaacggcagcggcagcggcggcggcatgaaccacgaccaggagttcgacccccctaaggtgtaccctcccgtccccgccgagaagagaaagcccatccgggtcctgagcctgttcgatggcatcgccaccggtctgctggtgctgaaggacctgggcatccaggtggataggtacattgcctccgaggtgtgcgaggactccatcaccgtgggaatggtgcgtcatcagggcaagatcatgtacgtgggcgacgtgcggagcgtgacacagaagcatatccaggagtggggccctttcgacctggtgatcggcggcagcccttgcaatgacctgagcatcgtgaacccagcccggaagggcctgtacgagggaaccggcagactgttcttcgagttttacagactgctgcacgacgcccggcctaaggaaggcgacgaccggcccttcttttggctgttcgagaatgtggtggccatgggagtcagcgacaagcgggatattagccggttcctggagagcaaccccgtgatgatcgatgccaaggaagtgagcgccgcccaccgggccagatacttctggggcaatctgcctggcatgaacagacccctggccagcaccgtgaacgacaagctggagctgcaggagtgcctggagcacggccggatcgccaagttcagcaaggtgagaaccatcaccacccgaagcaacagcatcaaacaaggcaaggaccagcactttcctgtgttcatgaacgagaaggaggacatcctgtggtgtaccgagatggagagagtgttcgggttcccagtccactacacagatgtcagcaacatgtctagactggccagacagagactgctgggaagaagctggtccgtccctgtgatcagacacctgttcgcccctctgaaggagtacttcgcctgcgtgagcagcggcaacagcaacgccaacagccggggccccagcttctctagcggcctggtgccactgtccctgagagggagccacatgggccccatggagatctacaaaaccgtgagcgcctggaagcggcagcctgtgcgcgtgctgagcctgtttcggaatatcgataaagtcctgaaaagcctgggattcctggagagcggctctggctccggcggtggcaccctgaagtacgtggaggatgtgacaaacgtggtcagacgggatgtggagaagtggggccccttcgatctggtgtacggcagcacccaacccctgggcagctcttgtgaccggtgccctggctggtacatgtttcagttccaccggatcctgcagtacgccctgccgagacaggagtcccagcggccattcttttggattttcatggacaacttgctgctgaccgaggatgaccaggaaactaccactcggttcctgcagaccgaagccgtgaccctgcaggacgtgagaggccgggactaccagaacgccatgcgggtgtggtccaacatccctggactgaaaagcaagcacgcacctctgacccctaaagaagaggagtacctgcaggcccaggtgcggagcagaagcaagctggacgcccctaaggtggatctgctggtgaagaattgcctcctgcccctgagagagtacttcaagtatttcagccagaatagtctgcccctgggcggcccaagcagcggcgcccctcctcccagcggcggcagcccagccggctccccaacctctaccgaggagggcacctctgagtccgccacccccgagagcggccctggcacctccaccgagcccagcgagggcagcgcacccggcagccctgccggcagccccacctccacagaggagggaaccagcaccgagcccagcgaaggcagcgccccaggcaccagcaccgagcctagtgagggcggctctggcggcggcagcgcccaggagattaaacggatcaacaagatcagaagaagacttgtgaaagacagcaacaccaagaaggccggcaagacaggccccatgaaaaccctgctggttagagtgatgacacccgatctgagagagcggctggaaaacctgagaaagaagcctgaaaatatcccccagcccatcagcaatacatctagagccaacctgaataagctgctgaccgattacaccgaaatgaagaaggcgatcctgcatgtgtactgggaagagttccagaaggaccctgtgggcctgatgagccgggtggcccagcctgccagcaagaagatcgatcagaacaagctgaaacctgagatggacgagaagggcaacctgaccaccgccggctttgcctgctctcagtgtggccagcccctgttcgtgtacaagctggagcaggtgtctgagaagggcaaggcttacaccaactacttcggacggtgcaatgtggccgagcacgaaaagctgatcctgctggcccagctgaagcccgagaaggatagcgacgaagccgtgacatatagcctgggaaagtttgggcagagggccctggatttctacagcattcatgtgaccaaggagtccacccaccccgtgaagcccctggcccagatcgccggaaacagatacgcctccggacctgtgggaaaggccctgagcgacgcatgtatgggcacaatcgcctccttcctgtctaagtaccaggacatcatcatcgaacaccagaaggtggtgaagggcaaccagaagagactggagagcctgcgggagctggccggcaaggaaaacctggaataccctagcgtgaccctgccacctcagcctcacaccaaggagggcgttgatgcctacaacgaagtgatcgcccgggtgcgaatgtgggtgaacctgaacctgtggcagaagctgaagctaagcagagatgatgccaagcctctgctgagactgaagggattcccttcctttcctctggtcgagagacaggccaacgaagtggactggtgggacatggtgtgtaacgtgaagaagctgatcaacgagaaaaaggaggatggcaaggtgttttggcagaatctggctggctacaagagacaggaagccctgagaccatacctgagcagcgaggaagatcggaagaagggaaagaaattcgctcggtaccagctgggcgacctgctgctgcacctggaaaagaagcacggcgaggactggggaaaggtgtacgacgaggcctgggagcggattgacaagaaagtggaaggcctgagcaagcacatcaagctggaagaggaacggagaagcgaggacgcccagagcaaggccgccctgaccgactggctgcgggctaaggccagcttcgtgatcgagggcctgaaggaggccgacaaggacgagttctgcagatgcgagctgaagctgcagaagtggtacggggacctgcggggaaagcccttcgccatcgaagccgagaacagcatcctggacatcagcggcttcagcaagcagtacaactgtgccttcatctggcagaaggacggcgtgaagaagctgaacctgtacctgatcatcaactacttcaagggcggcaagctgcggttcaagaagatcaaacctgaagccttcgaagccaacagattctacaccgtgatcaacaaaaagagcggcgagatcgtgcccatggaggtgaacttcaacttcgacgaccccaacctgatcatcctgcctctggcctttggcaagagacagggcagagaattcatctggaacgacctgctgtccctggaaaccggcagcctgaagctggccaacggaagagtgatcgagaagacactgtacaacagaagaacccggcaggatgagcctgccctgttcgtggccctgaccttcgagcggcgggaggtcctggactcctccaatatcaaaccaatgaacctgatcggcgtggcaagaggcgaaaacatccccgccgtgatcgccctgaccgaccccgagggctgcccactgagccggtttaaggatagcctgggaaacccaacccacatcctgagaatcggcgagagctataaggagaagcagcggaccatccaggccaagaaggaggtggagcagcggagagccggcggctacagccggaagtacgccagcaaagccaagaatctggcagacgatatggtgagaaacaccgctagagatctgctgtactacgccgtgacccaggatgccatgctgatcttcgccaacctgagccggggcttcggccggcagggcaagcggaccttcatggccgagagacagtacacacggatggaggactggctgaccgccaagctggcctacgagggcctgagcaagacctacctgtccaagacactggcccagtacacctccaagacatgcagcaactgtgggtttaccatcaccagcgccgactacgacagggtgctggagaagctgaagaagacagcaacaggctggatgaccacaattaacggcaaggagctgaaggtggagggccagattacctactacaacagatacaagagacagaacgtagtcaaggacctgtccgtcgagctggatagactgagcgaagaatctgtgaacaacgacatctcctcctggacaaagggcagaagcggagaagctctgagcctcctgaagaaaagattctcccatagacccgtgcaggagaagttcgtgtgcctgaactgcggcttcgagacacacgcagccgagcaagccgccctgaacatcgccagatcctggctgttcctgcggagccaggagtacaagaaataccagacaaacaagacaaccggcaacaccgataagagagccttcgtcgagacctggcagtccttttaccggaagaagcttaaggaggtgtggaaacctgccgtgcggtctggcggatctggcggaggctccacaagcttccaggccagcgtgagcttccaggacgtgaccgtggagttcagccaggaggagtggcagcacctgggccccgtggagaggaccctgtacagggacgtgatgctggagaactacagccacctggtgagcgtgggctactgcttcaccaagcccgagctgatcttcaccctggagcagggcgaggacccctggctgctggagaaggagaagggcttcctgagcaggaacagccccgaggacagcaccagccccaagaaaaagagaaaagtctaagctgccttctgcggggcttgccttctggccatgcccttcttctctcccttgcacctgtacctcttggtctttgaataaagcctgagtaggaaggctagcaaaaaaaaaaaaaaaaaaaaaaaaaaaaaaaaaaaaaaaaaaaaaaaaaaaaaaaaaaaaaaaaaaaaaaaaaaaaaaaa

SEQ ID NO: 3430 - RNA, 5419 nt, synthetic construct
  source 1..5419: mol_type = other RNA
aggaaataagagagaaaagaagagtaagaagaaatataagagccaccatggcccctaagaagaagcgtaaagtgagccgggtgaacggcagcggcagcggcggcggcatgaaccacgaccaggagttcgacccccctaaggtgtaccctcccgtccccgccgagaagagaaagcccatccgggtcctgagcctgttcgatggcatcgccaccggtctgctggtgctgaaggacctgggcatccaggtggataggtacattgcctccgaggtgtgcgaggactccatcaccgtgggaatggtgcgtcatcagggcaagatcatgtacgtgggcgacgtgcggagcgtgacacagaagcatatccaggagtggggccctttcgacctggtgatcggcggcagcccttgcaatgacctgagcatcgtgaacccagcccggaagggcctgtacgagggaaccggcagactgttcttcgagttttacagactgctgcacgacgcccggcctaaggaaggcgacgaccggcccttcttttggctgttcgagaatgtggtggccatgggagtcagcgacaagcgggatattagccggttcctggagagcaaccccgtgatgatcgatgccaaggaagtgagcgccgcccaccgggccagatacttctggggcaatctgcctggcatgaacagacccctggccagcaccgtgaacgacaagctggagctgcaggagtgcctggagcacggccggatcgccaagttcagcaaggtgagaaccatcaccacccgaagcaacagcatcaaacaaggcaaggaccagcactttcctgtgttcatgaacgagaaggaggacatcctgtggtgtaccgagatggagagagtgttcgggttcccagtccactacacagatgtcagcaacatgtctagactggccagacagagactgctgggaagaagctggtccgtccctgtgatcagacacctgttcgcccctctgaaggagtacttcgcctgcgtgagcagcggcaacagcaacgccaacagccggggccccagcttctctagcggcctggtgccactgtccctgagagggagccacatgggccccatggagatctacaaaaccgtgagcgcctggaagcggcagcctgtgcgcgtgctgagcctgtttcggaatatcgataaagtcctgaaaagcctgggattcctggagagcggctctggctccggcggtggcaccctgaagtacgtggaggatgtgacaaacgtggtcagacgggatgtggagaagtggggccccttcgatctggtgtacggcagcacccaacccctgggcagctcttgtgaccggtgccctggctggtacatgtttcagttccaccggatcctgcagtacgccctgccgagacaggagtcccagcggccattcttttggattttcatggacaacttgctgctgaccgaggatgaccaggaaactaccactcggttcctgcagaccgaagccgtgaccctgcaggacgtgagaggccgggactaccagaacgccatgcgggtgtggtccaacatccctggactgaaaagcaagcacgcacctctgacccctaaagaagaggagtacctgcaggcccaggtgcggagcagaagcaagctggacgcccctaaggtggatctgctggtgaagaattgcctcctgcccctgagagagtacttcaagtatttcagccagaatagtctgcccctgggcggcccaagcagcggcgcccctcctcccagcggcggcagcccagccggctccccaacctctaccgaggagggcacctctgagtccgccacccccgagagcggccctggcacctccaccgagcccagcgagggcagcgcacccggcagccctgccggcagccccacctccacagaggagggaaccagcaccgagcccagcgaaggcagcgccccaggcaccagcaccgagcctagtgagggcggctctggcggcggcagcgcccaggagattaaacggatcaacaagatcagaagaagacttgtgaaagacagcaacaccaagaaggccggcaagacaggccccatgaaaaccctgctggttagagtgatgacacccgatctgagagagcggctggaaaacctgagaaagaagcctgaaaatatcccccagcccatcagcaatacatctagagccaacctgaataagctgctgaccgattacaccgaaatgaagaaggcgatcctgcatgtgtactgggaagagttccagaaggaccctgtgggcctgatgagccgggtggcccagcctgccagcaagaagatcgatcagaacaagctgaaacctgagatggacgagaagggcaacctgaccaccgccggctttgcctgctctcagtgtggccagcccctgttcgtgtacaagctggagcaggtgtctgagaagggcaaggcttacaccaactacttcggacggtgcaatgtggccgagcacgaaaagctgatcctgctggcccagctgaagcccgagaaggatagcgacgaagccgtgacatatagcctgggaaagtttgggcagagggccctggatttctacagcattcatgtgaccaaggagtccacccaccccgtgaagcccctggcccagatcgccggaaacagatacgcctccggacctgtgggaaaggccctgagcgacgcatgtatgggcacaatcgcctccttcctgtctaagtaccaggacatcatcatcgaacaccagaaggtggtgaagggcaaccagaagagactggagagcctgcgggagctggccggcaaggaaaacctggaataccctagcgtgaccctgccacctcagcctcacaccaaggagggcgttgatgcctacaacgaagtgatcgcccgggtgcgaatgtgggtgaacctgaacctgtggcagaagctgaagctaagcagagatgatgccaagcctctgctgagactgaagggattcccttcctttcctctggtcgagagacaggccaacgaagtggactggtgggacatggtgtgtaacgtgaagaagctgatcaacgagaaaaaggaggatggcaaggtgttttggcagaatctggctggctacaagagacaggaagccctgagaccatacctgagcagcgaggaagatcggaagaagggaaagaaattcgctcggtaccagctgggcgacctgctgctgcacctggaaaagaagcacggcgaggactggggaaaggtgtacgacgaggcctgggagcggattgacaagaaagtggaaggcctgagcaagcacatcaagctggaagaggaacggagaagcgaggacgcccagagcaaggccgccctgaccgactggctgcgggctaaggccagcttcgtgatcgagggcctgaaggaggccgacaaggacgagttctgcagatgcgagctgaagctgcagaagtggtacggggacctgcggggaaagcccttcgccatcgaagccgagaacagcatcctggacatcagcggcttcagcaagcagtacaactgtgccttcatctggcagaaggacggcgtgaagaagctgaacctgtacctgatcatcaactacttcaagggcggcaagctgcggttcaagaagatcaaacctgaagccttcgaagccaacagattctacaccgtgatcaacaaaaagagcggcgagatcgtgcccatggaggtgaacttcaacttcgacgaccccaacctgatcatcctgcctctggcctttggcaagagacagggcagagaattcatctggaacgacctgctgtccctggaaaccggcagcctgaagctggccaacggaagagtgatcgagaagacactgtacaacagaagaacccggcaggatgagcctgccctgttcgtggccctgaccttcgagcggcgggaggtcctggactcctccaatatcaaaccaatgaacctgatcggcgtggcaagaggcgaaaacatccccgccgtgatcgccctgaccgaccccgagggctgcccactgagccggtttaaggatagcctgggaaacccaacccacatcctgagaatcggcgagagctataaggagaagcagcggaccatccaggccaagaaggaggtggagcagcggagagccggcggctacagccggaagtacgccagcaaagccaagaatctggcagacgatatggtgagaaacaccgctagagatctgctgtactacgccgtgacccaggatgccatgctgatcttcgccaacctgagccggggcttcggccggcagggcaagcggaccttcatggccgagagacagtacacacggatggaggactggctgaccgccaagctggcctacgagggcctgagcaagacctacctgtccaagacactggcccagtacacctccaagacatgcagcaactgtgggtttaccatcaccagcgccgactacgacagggtgctggagaagctgaagaagacagcaacaggctggatgaccacaattaacggcaaggagctgaaggtggagggccagattacctactacaacagatacaagagacagaacgtagtcaaggacctgtccgtcgagctggatagactgagcgaagaatctgtgaacaacgacatctcctcctggacaaagggcagaagcggagaagctctgagcctcctgaagaaaagattctcccatagacccgtgcaggagaagttcgtgtgcctgaactgcggcttcgagacacacgcagccgagcaagccgccctgaacatcgccagatcctggctgttcctgcggagccaggagtacaagaaataccagacaaacaagacaaccggcaacaccgataagagagccttcgtcgagacctggcagtccttttaccggaagaagcttaaggaggtgtggaaacctgccgtgcggtctggcggatctggcggaggctccacaagcccccaggtgagcctgaccttcgaggacgtggccgtgctgttcaccagggacgagtggaggaagctggcccccagccagaggaacctgtacagggacgtgatgctggagaactacaggaacctggtgagcctgggcctgcccttcaccaagcccaaggtgatcagcctgctgcagcagggcgaggacccctggaaggtggagaaggactgcttcggcggcagcttcctgggctgcaagagcaacaccagccccaagaaaaagagaaaagtctaagctgccttctgcggggcttgccttctggccatgcccttcttctctcccttgcacctgtacctcttggtctttgaataaagcctgagtaggaaggctagcaaaaaaaaaaaaaaaaaaaaaaaaaaaaaaaaaaaaaaaaaaaaaaaaaaaaaaaaaaaaaaaaaaaaaaaaaaaaaaaa

SEQ ID NO: 3431 - RNA, 5416 nt, synthetic construct
  source 1..5416: mol_type = other RNA
aggaaataagagagaaaagaagagtaagaagaaatataagagccaccatggcccctaagaagaagcgtaaagtgagccgggtgaacggcagcggcagcggcggcggcatgaaccacgaccaggagttcgacccccctaaggtgtaccctcccgtccccgccgagaagagaaagcccatccgggtcctgagcctgttcgatggcatcgccaccggtctgctggtgctgaaggacctgggcatccaggtggataggtacattgcctccgaggtgtgcgaggactccatcaccgtgggaatggtgcgtcatcagggcaagatcatgtacgtgggcgacgtgcggagcgtgacacagaagcatatccaggagtggggccctttcgacctggtgatcggcggcagcccttgcaatgacctgagcatcgtgaacccagcccggaagggcctgtacgagggaaccggcagactgttcttcgagttttacagactgctgcacgacgcccggcctaaggaaggcgacgaccggcccttcttttggctgttcgagaatgtggtggccatgggagtcagcgacaagcgggatattagccggttcctggagagcaaccccgtgatgatcgatgccaaggaagtgagcgccgcccaccgggccagatacttctggggcaatctgcctggcatgaacagacccctggccagcaccgtgaacgacaagctggagctgcaggagtgcctggagcacggccggatcgccaagttcagcaaggtgagaaccatcaccacccgaagcaacagcatcaaacaaggcaaggaccagcactttcctgtgttcatgaacgagaaggaggacatcctgtggtgtaccgagatggagagagtgttcgggttcccagtccactacacagatgtcagcaacatgtctagactggccagacagagactgctgggaagaagctggtccgtccctgtgatcagacacctgttcgcccctctgaaggagtacttcgcctgcgtgagcagcggcaacagcaacgccaacagccggggccccagcttctctagcggcctggtgccactgtccctgagagggagccacatgggccccatggagatctacaaaaccgtgagcgcctggaagcggcagcctgtgcgcgtgctgagcctgtttcggaatatcgataaagtcctgaaaagcctgggattcctggagagcggctctggctccggcggtggcaccctgaagtacgtggaggatgtgacaaacgtggtcagacgggatgtggagaagtggggccccttcgatctggtgtacggcagcacccaacccctgggcagctcttgtgaccggtgccctggctggtacatgtttcagttccaccggatcctgcagtacgccctgccgagacaggagtcccagcggccattcttttggattttcatggacaacttgctgctgaccgaggatgaccaggaaactaccactcggttcctgcagaccgaagccgtgaccctgcaggacgtgagaggccgggactaccagaacgccatgcgggtgtggtccaacatccctggactgaaaagcaagcacgcacctctgacccctaaagaagaggagtacctgcaggcccaggtgcggagcagaagcaagctggacgcccctaaggtggatctgctggtgaagaattgcctcctgcccctgagagagtacttcaagtatttcagccagaatagtctgcccctgggcggcccaagcagcggcgcccctcctcccagcggcggcagcccagccggctccccaacctctaccgaggagggcacctctgagtccgccacccccgagagcggccctggcacctccaccgagcccagcgagggcagcgcacccggcagccctgccggcagccccacctccacagaggagggaaccagcaccgagcccagcgaaggcagcgccccaggcaccagcaccgagcctagtgagggcggctctggcggcggcagcgcccaggagattaaacggatcaacaagatcagaagaagacttgtgaaagacagcaacaccaagaaggccggcaagacaggccccatgaaaaccctgctggttagagtgatgacacccgatctgagagagcggctggaaaacctgagaaagaagcctgaaaatatcccccagcccatcagcaatacatctagagccaacctgaataagctgctgaccgattacaccgaaatgaagaaggcgatcctgcatgtgtactgggaagagttccagaaggaccctgtgggcctgatgagccgggtggcccagcctgccagcaagaagatcgatcagaacaagctgaaacctgagatggacgagaagggcaacctgaccaccgccggctttgcctgctctcagtgtggccagcccctgttcgtgtacaagctggagcaggtgtctgagaagggcaaggcttacaccaactacttcggacggtgcaatgtggccgagcacgaaaagctgatcctgctggcccagctgaagcccgagaaggatagcgacgaagccgtgacatatagcctgggaaagtttgggcagagggccctggatttctacagcattcatgtgaccaaggagtccacccaccccgtgaagcccctggcccagatcgccggaaacagatacgcctccggacctgtgggaaaggccctgagcgacgcatgtatgggcacaatcgcctccttcctgtctaagtaccaggacatcatcatcgaacaccagaaggtggtgaagggcaaccagaagagactggagagcctgcgggagctggccggcaaggaaaacctggaataccctagcgtgaccctgccacctcagcctcacaccaaggagggcgttgatgcctacaacgaagtgatcgcccgggtgcgaatgtgggtgaacctgaacctgtggcagaagctgaagctaagcagagatgatgccaagcctctgctgagactgaagggattcccttcctttcctctggtcgagagacaggccaacgaagtggactggtgggacatggtgtgtaacgtgaagaagctgatcaacgagaaaaaggaggatggcaaggtgttttggcagaatctggctggctacaagagacaggaagccctgagaccatacctgagcagcgaggaagatcggaagaagggaaagaaattcgctcggtaccagctgggcgacctgctgctgcacctggaaaagaagcacggcgaggactggggaaaggtgtacgacgaggcctgggagcggattgacaagaaagtggaaggcctgagcaagcacatcaagctggaagaggaacggagaagcgaggacgcccagagcaaggccgccctgaccgactggctgcgggctaaggccagcttcgtgatcgagggcctgaaggaggccgacaaggacgagttctgcagatgcgagctgaagctgcagaagtggtacggggacctgcggggaaagcccttcgccatcgaagccgagaacagcatcctggacatcagcggcttcagcaagcagtacaactgtgccttcatctggcagaaggacggcgtgaagaagctgaacctgtacctgatcatcaactacttcaagggcggcaagctgcggttcaagaagatcaaacctgaagccttcgaagccaacagattctacaccgtgatcaacaaaaagagcggcgagatcgtgcccatggaggtgaacttcaacttcgacgaccccaacctgatcatcctgcctctggcctttggcaagagacagggcagagaattcatctggaacgacctgctgtccctggaaaccggcagcctgaagctggccaacggaagagtgatcgagaagacactgtacaacagaagaacccggcaggatgagcctgccctgttcgtggccctgaccttcgagcggcgggaggtcctggactcctccaatatcaaaccaatgaacctgatcggcgtggcaagaggcgaaaacatccccgccgtgatcgccctgaccgaccccgagggctgcccactgagccggtttaaggatagcctgggaaacccaacccacatcctgagaatcggcgagagctataaggagaagcagcggaccatccaggccaagaaggaggtggagcagcggagagccggcggctacagccggaagtacgccagcaaagccaagaatctggcagacgatatggtgagaaacaccgctagagatctgctgtactacgccgtgacccaggatgccatgctgatcttcgccaacctgagccggggcttcggccggcagggcaagcggaccttcatggccgagagacagtacacacggatggaggactggctgaccgccaagctggcctacgagggcctgagcaagacctacctgtccaagacactggcccagtacacctccaagacatgcagcaactgtgggtttaccatcaccagcgccgactacgacagggtgctggagaagctgaagaagacagcaacaggctggatgaccacaattaacggcaaggagctgaaggtggagggccagattacctactacaacagatacaagagacagaacgtagtcaaggacctgtccgtcgagctggatagactgagcgaagaatctgtgaacaacgacatctcctcctggacaaagggcagaagcggagaagctctgagcctcctgaagaaaagattctcccatagacccgtgcaggagaagttcgtgtgcctgaactgcggcttcgagacacacgcagccgagcaagccgccctgaacatcgccagatcctggctgttcctgcggagccaggagtacaagaaataccagacaaacaagacaaccggcaacaccgataagagagccttcgtcgagacctggcagtccttttaccggaagaagcttaaggaggtgtggaaacctgccgtgcggtctggcggatctggcggaggctccacaagcgacagcgtggccttcgaggacgtggccgtgaacttcacccaggaggagtgggccctgctgagccccagccagaagaacctgtacagagacgtgaccctggagaccttcagaaacctggccagcgtgggcatccagtggaaggaccaggacatcgagaacctgtaccagaacctgggcatcaagctgagaagcctggtggagagactgtgcggcagaaaggagggcaacgagcacagagagaccagccccaagaaaaagagaaaagtctaagctgccttctgcggggcttgccttctggccatgcccttcttctctcccttgcacctgtacctcttggtctttgaataaagcctgagtaggaaggctagcaaaaaaaaaaaaaaaaaaaaaaaaaaaaaaaaaaaaaaaaaaaaaaaaaaaaaaaaaaaaaaaaaaaaaaaaaaaaaaaa

SEQ ID NO: 3432 - RNA, 5419 nt, synthetic construct
  source 1..5419: mol_type = other RNA
aggaaataagagagaaaagaagagtaagaagaaatataagagccaccatggcccctaagaagaagcgtaaagtgagccgggtgaacggcagcggcagcggcggcggcatgaaccacgaccaggagttcgacccccctaaggtgtaccctcccgtccccgccgagaagagaaagcccatccgggtcctgagcctgttcgatggcatcgccaccggtctgctggtgctgaaggacctgggcatccaggtggataggtacattgcctccgaggtgtgcgaggactccatcaccgtgggaatggtgcgtcatcagggcaagatcatgtacgtgggcgacgtgcggagcgtgacacagaagcatatccaggagtggggccctttcgacctggtgatcggcggcagcccttgcaatgacctgagcatcgtgaacccagcccggaagggcctgtacgagggaaccggcagactgttcttcgagttttacagactgctgcacgacgcccggcctaaggaaggcgacgaccggcccttcttttggctgttcgagaatgtggtggccatgggagtcagcgacaagcgggatattagccggttcctggagagcaaccccgtgatgatcgatgccaaggaagtgagcgccgcccaccgggccagatacttctggggcaatctgcctggcatgaacagacccctggccagcaccgtgaacgacaagctggagctgcaggagtgcctggagcacggccggatcgccaagttcagcaaggtgagaaccatcaccacccgaagcaacagcatcaaacaaggcaaggaccagcactttcctgtgttcatgaacgagaaggaggacatcctgtggtgtaccgagatggagagagtgttcgggttcccagtccactacacagatgtcagcaacatgtctagactggccagacagagactgctgggaagaagctggtccgtccctgtgatcagacacctgttcgcccctctgaaggagtacttcgcctgcgtgagcagcggcaacagcaacgccaacagccggggccccagcttctctagcggcctggtgccactgtccctgagagggagccacatgggccccatggagatctacaaaaccgtgagcgcctggaagcggcagcctgtgcgcgtgctgagcctgtttcggaatatcgataaagtcctgaaaagcctgggattcctggagagcggctctggctccggcggtggcaccctgaagtacgtggaggatgtgacaaacgtggtcagacgggatgtggagaagtggggccccttcgatctggtgtacggcagcacccaacccctgggcagctcttgtgaccggtgccctggctggtacatgtttcagttccaccggatcctgcagtacgccctgccgagacaggagtcccagcggccattcttttggattttcatggacaacttgctgctgaccgaggatgaccaggaaactaccactcggttcctgcagaccgaagccgtgaccctgcaggacgtgagaggccgggactaccagaacgccatgcgggtgtggtccaacatccctggactgaaaagcaagcacgcacctctgacccctaaagaagaggagtacctgcaggcccaggtgcggagcagaagcaagctggacgcccctaaggtggatctgctggtgaagaattgcctcctgcccctgagagagtacttcaagtatttcagccagaatagtctgcccctgggcggcccaagcagcggcgcccctcctcccagcggcggcagcccagccggctccccaacctctaccgaggagggcacctctgagtccgccacccccgagagcggccctggcacctccaccgagcccagcgagggcagcgcacccggcagccctgccggcagccccacctccacagaggagggaaccagcaccgagcccagcgaaggcagcgccccaggcaccagcaccgagcctagtgagggcggctctggcggcggcagcgcccaggagattaaacggatcaacaagatcagaagaagacttgtgaaagacagcaacaccaagaaggccggcaagacaggccccatgaaaaccctgctggttagagtgatgacacccgatctgagagagcggctggaaaacctgagaaagaagcctgaaaatatcccccagcccatcagcaatacatctagagccaacctgaataagctgctgaccgattacaccgaaatgaagaaggcgatcctgcatgtgtactgggaagagttccagaaggaccctgtgggcctgatgagccgggtggcccagcctgccagcaagaagatcgatcagaacaagctgaaacctgagatggacgagaagggcaacctgaccaccgccggctttgcctgctctcagtgtggccagcccctgttcgtgtacaagctggagcaggtgtctgagaagggcaaggcttacaccaactacttcggacggtgcaatgtggccgagcacgaaaagctgatcctgctggcccagctgaagcccgagaaggatagcgacgaagccgtgacatatagcctgggaaagtttgggcagagggccctggatttctacagcattcatgtgaccaaggagtccacccaccccgtgaagcccctggcccagatcgccggaaacagatacgcctccggacctgtgggaaaggccctgagcgacgcatgtatgggcacaatcgcctccttcctgtctaagtaccaggacatcatcatcgaacaccagaaggtggtgaagggcaaccagaagagactggagagcctgcgggagctggccggcaaggaaaacctggaataccctagcgtgaccctgccacctcagcctcacaccaaggagggcgttgatgcctacaacgaagtgatcgcccgggtgcgaatgtgggtgaacctgaacctgtggcagaagctgaagctaagcagagatgatgccaagcctctgctgagactgaagggattcccttcctttcctctggtcgagagacaggccaacgaagtggactggtgggacatggtgtgtaacgtgaagaagctgatcaacgagaaaaaggaggatggcaaggtgttttggcagaatctggctggctacaagagacaggaagccctgagaccatacctgagcagcgaggaagatcggaagaagggaaagaaattcgctcggtaccagctgggcgacctgctgctgcacctggaaaagaagcacggcgaggactggggaaaggtgtacgacgaggcctgggagcggattgacaagaaagtggaaggcctgagcaagcacatcaagctggaagaggaacggagaagcgaggacgcccagagcaaggccgccctgaccgactggctgcgggctaaggccagcttcgtgatcgagggcctgaaggaggccgacaaggacgagttctgcagatgcgagctgaagctgcagaagtggtacggggacctgcggggaaagcccttcgccatcgaagccgagaacagcatcctggacatcagcggcttcagcaagcagtacaactgtgccttcatctggcagaaggacggcgtgaagaagctgaacctgtacctgatcatcaactacttcaagggcggcaagctgcggttcaagaagatcaaacctgaagccttcgaagccaacagattctacaccgtgatcaacaaaaagagcggcgagatcgtgcccatggaggtgaacttcaacttcgacgaccccaacctgatcatcctgcctctggcctttggcaagagacagggcagagaattcatctggaacgacctgctgtccctggaaaccggcagcctgaagctggccaacggaagagtgatcgagaagacactgtacaacagaagaacccggcaggatgagcctgccctgttcgtggccctgaccttcgagcggcgggaggtcctggactcctccaatatcaaaccaatgaacctgatcggcgtggcaagaggcgaaaacatccccgccgtgatcgccctgaccgaccccgagggctgcccactgagccggtttaaggatagcctgggaaacccaacccacatcctgagaatcggcgagagctataaggagaagcagcggaccatccaggccaagaaggaggtggagcagcggagagccggcggctacagccggaagtacgccagcaaagccaagaatctggcagacgatatggtgagaaacaccgctagagatctgctgtactacgccgtgacccaggatgccatgctgatcttcgccaacctgagccggggcttcggccggcagggcaagcggaccttcatggccgagagacagtacacacggatggaggactggctgaccgccaagctggcctacgagggcctgagcaagacctacctgtccaagacactggcccagtacacctccaagacatgcagcaactgtgggtttaccatcaccagcgccgactacgacagggtgctggagaagctgaagaagacagcaacaggctggatgaccacaattaacggcaaggagctgaaggtggagggccagattacctactacaacagatacaagagacagaacgtagtcaaggacctgtccgtcgagctggatagactgagcgaagaatctgtgaacaacgacatctcctcctggacaaagggcagaagcggagaagctctgagcctcctgaagaaaagattctcccatagacccgtgcaggagaagttcgtgtgcctgaactgcggcttcgagacacacgcagccgagcaagccgccctgaacatcgccagatcctggctgttcctgcggagccaggagtacaagaaataccagacaaacaagacaaccggcaacaccgataagagagccttcgtcgagacctggcagtccttttaccggaagaagcttaaggaggtgtggaaacctgccgtgcggtctggcggatctggcggaggctccacaagcatggccgccgccgccctgagggagcccgcccagggctacgtgaccttcgaggacgtggccgtgtacttcagccaggaggagtggaggctgctggacgaggcccagaggctgctgtacaggaacgtgatgctggagaacttcagcctgatggccagcctgggcctggccagcagcaagacccacgagatcacccagctggagagctgggaggagcccttcgtgcccgcctgggacgtgatgaccaccagccccaagaaaaagagaaaagtctaagctgccttctgcggggcttgccttctggccatgcccttcttctctcccttgcacctgtacctcttggtctttgaataaagcctgagtaggaaggctagcaaaaaaaaaaaaaaaaaaaaaaaaaaaaaaaaaaaaaaaaaaaaaaaaaaaaaaaaaaaaaaaaaaaaaaaaaaaaaaaa

SEQ ID NO: 3433 - RNA, 5419 nt, synthetic construct
  source 1..5419: mol_type = other RNA
aggaaataagagagaaaagaagagtaagaagaaatataagagccaccatggcccctaagaagaagcgtaaagtgagccgggtgaacggcagcggcagcggcggcggcatgaaccacgaccaggagttcgacccccctaaggtgtaccctcccgtccccgccgagaagagaaagcccatccgggtcctgagcctgttcgatggcatcgccaccggtctgctggtgctgaaggacctgggcatccaggtggataggtacattgcctccgaggtgtgcgaggactccatcaccgtgggaatggtgcgtcatcagggcaagatcatgtacgtgggcgacgtgcggagcgtgacacagaagcatatccaggagtggggccctttcgacctggtgatcggcggcagcccttgcaatgacctgagcatcgtgaacccagcccggaagggcctgtacgagggaaccggcagactgttcttcgagttttacagactgctgcacgacgcccggcctaaggaaggcgacgaccggcccttcttttggctgttcgagaatgtggtggccatgggagtcagcgacaagcgggatattagccggttcctggagagcaaccccgtgatgatcgatgccaaggaagtgagcgccgcccaccgggccagatacttctggggcaatctgcctggcatgaacagacccctggccagcaccgtgaacgacaagctggagctgcaggagtgcctggagcacggccggatcgccaagttcagcaaggtgagaaccatcaccacccgaagcaacagcatcaaacaaggcaaggaccagcactttcctgtgttcatgaacgagaaggaggacatcctgtggtgtaccgagatggagagagtgttcgggttcccagtccactacacagatgtcagcaacatgtctagactggccagacagagactgctgggaagaagctggtccgtccctgtgatcagacacctgttcgcccctctgaaggagtacttcgcctgcgtgagcagcggcaacagcaacgccaacagccggggccccagcttctctagcggcctggtgccactgtccctgagagggagccacatgggccccatggagatctacaaaaccgtgagcgcctggaagcggcagcctgtgcgcgtgctgagcctgtttcggaatatcgataaagtcctgaaaagcctgggattcctggagagcggctctggctccggcggtggcaccctgaagtacgtggaggatgtgacaaacgtggtcagacgggatgtggagaagtggggccccttcgatctggtgtacggcagcacccaacccctgggcagctcttgtgaccggtgccctggctggtacatgtttcagttccaccggatcctgcagtacgccctgccgagacaggagtcccagcggccattcttttggattttcatggacaacttgctgctgaccgaggatgaccaggaaactaccactcggttcctgcagaccgaagccgtgaccctgcaggacgtgagaggccgggactaccagaacgccatgcgggtgtggtccaacatccctggactgaaaagcaagcacgcacctctgacccctaaagaagaggagtacctgcaggcccaggtgcggagcagaagcaagctggacgcccctaaggtggatctgctggtgaagaattgcctcctgcccctgagagagtacttcaagtatttcagccagaatagtctgcccctgggcggcccaagcagcggcgcccctcctcccagcggcggcagcccagccggctccccaacctctaccgaggagggcacctctgagtccgccacccccgagagcggccctggcacctccaccgagcccagcgagggcagcgcacccggcagccctgccggcagccccacctccacagaggagggaaccagcaccgagcccagcgaaggcagcgccccaggcaccagcaccgagcctagtgagggcggctctggcggcggcagcgcccaggagattaaacggatcaacaagatcagaagaagacttgtgaaagacagcaacaccaagaaggccggcaagacaggccccatgaaaaccctgctggttagagtgatgacacccgatctgagagagcggctggaaaacctgagaaagaagcctgaaaatatcccccagcccatcagcaatacatctagagccaacctgaataagctgctgaccgattacaccgaaatgaagaaggcgatcctgcatgtgtactgggaagagttccagaaggaccctgtgggcctgatgagccgggtggcccagcctgccagcaagaagatcgatcagaacaagctgaaacctgagatggacgagaagggcaacctgaccaccgccggctttgcctgctctcagtgtggccagcccctgttcgtgtacaagctggagcaggtgtctgagaagggcaaggcttacaccaactacttcggacggtgcaatgtggccgagcacgaaaagctgatcctgctggcccagctgaagcccgagaaggatagcgacgaagccgtgacatatagcctgggaaagtttgggcagagggccctggatttctacagcattcatgtgaccaaggagtccacccaccccgtgaagcccctggcccagatcgccggaaacagatacgcctccggacctgtgggaaaggccctgagcgacgcatgtatgggcacaatcgcctccttcctgtctaagtaccaggacatcatcatcgaacaccagaaggtggtgaagggcaaccagaagagactggagagcctgcgggagctggccggcaaggaaaacctggaataccctagcgtgaccctgccacctcagcctcacaccaaggagggcgttgatgcctacaacgaagtgatcgcccgggtgcgaatgtgggtgaacctgaacctgtggcagaagctgaagctaagcagagatgatgccaagcctctgctgagactgaagggattcccttcctttcctctggtcgagagacaggccaacgaagtggactggtgggacatggtgtgtaacgtgaagaagctgatcaacgagaaaaaggaggatggcaaggtgttttggcagaatctggctggctacaagagacaggaagccctgagaccatacctgagcagcgaggaagatcggaagaagggaaagaaattcgctcggtaccagctgggcgacctgctgctgcacctggaaaagaagcacggcgaggactggggaaaggtgtacgacgaggcctgggagcggattgacaagaaagtggaaggcctgagcaagcacatcaagctggaagaggaacggagaagcgaggacgcccagagcaaggccgccctgaccgactggctgcgggctaaggccagcttcgtgatcgagggcctgaaggaggccgacaaggacgagttctgcagatgcgagctgaagctgcagaagtggtacggggacctgcggggaaagcccttcgccatcgaagccgagaacagcatcctggacatcagcggcttcagcaagcagtacaactgtgccttcatctggcagaaggacggcgtgaagaagctgaacctgtacctgatcatcaactacttcaagggcggcaagctgcggttcaagaagatcaaacctgaagccttcgaagccaacagattctacaccgtgatcaacaaaaagagcggcgagatcgtgcccatggaggtgaacttcaacttcgacgaccccaacctgatcatcctgcctctggcctttggcaagagacagggcagagaattcatctggaacgacctgctgtccctggaaaccggcagcctgaagctggccaacggaagagtgatcgagaagacactgtacaacagaagaacccggcaggatgagcctgccctgttcgtggccctgaccttcgagcggcgggaggtcctggactcctccaatatcaaaccaatgaacctgatcggcgtggcaagaggcgaaaacatccccgccgtgatcgccctgaccgaccccgagggctgcccactgagccggtttaaggatagcctgggaaacccaacccacatcctgagaatcggcgagagctataaggagaagcagcggaccatccaggccaagaaggaggtggagcagcggagagccggcggctacagccggaagtacgccagcaaagccaagaatctggcagacgatatggtgagaaacaccgctagagatctgctgtactacgccgtgacccaggatgccatgctgatcttcgccaacctgagccggggcttcggccggcagggcaagcggaccttcatggccgagagacagtacacacggatggaggactggctgaccgccaagctggcctacgagggcctgagcaagacctacctgtccaagacactggcccagtacacctccaagacatgcagcaactgtgggtttaccatcaccagcgccgactacgacagggtgctggagaagctgaagaagacagcaacaggctggatgaccacaattaacggcaaggagctgaaggtggagggccagattacctactacaacagatacaagagacagaacgtagtcaaggacctgtccgtcgagctggatagactgagcgaagaatctgtgaacaacgacatctcctcctggacaaagggcagaagcggagaagctctgagcctcctgaagaaaagattctcccatagacccgtgcaggagaagttcgtgtgcctgaactgcggcttcgagacacacgcagccgagcaagccgccctgaacatcgccagatcctggctgttcctgcggagccaggagtacaagaaataccagacaaacaagacaaccggcaacaccgataagagagccttcgtcgagacctggcagtccttttaccggaagaagcttaaggaggtgtggaaacctgccgtgcggtctggcggatctggcggaggctccacaagcctgcagggcggcgtgaccttcgaggacgtggccgtggacttcacccaggaggagtggcagaggctgagccccgagcagagggacctgtacagggacgtgaccctggagaactacaggaacctggtgagcatgggcgagcaggacagcaccaagcccgaggtgatcctgaggctggagaacggcgaggagccctggatggtgggcacccaggagctgaggagctgcagccccgccggcaaggacaccagccccaagaaaaagagaaaagtctaagctgccttctgcggggcttgccttctggccatgcccttcttctctcccttgcacctgtacctcttggtctttgaataaagcctgagtaggaaggctagcaaaaaaaaaaaaaaaaaaaaaaaaaaaaaaaaaaaaaaaaaaaaaaaaaaaaaaaaaaaaaaaaaaaaaaaaaaaaaaaa

SEQ ID NO: 3434 - RNA, 5419 nt, synthetic construct
  source 1..5419: mol_type = other RNA
aggaaataagagagaaaagaagagtaagaagaaatataagagccaccatggcccctaagaagaagcgtaaagtgagccgggtgaacggcagcggcagcggcggcggcatgaaccacgaccaggagttcgacccccctaaggtgtaccctcccgtccccgccgagaagagaaagcccatccgggtcctgagcctgttcgatggcatcgccaccggtctgctggtgctgaaggacctgggcatccaggtggataggtacattgcctccgaggtgtgcgaggactccatcaccgtgggaatggtgcgtcatcagggcaagatcatgtacgtgggcgacgtgcggagcgtgacacagaagcatatccaggagtggggccctttcgacctggtgatcggcggcagcccttgcaatgacctgagcatcgtgaacccagcccggaagggcctgtacgagggaaccggcagactgttcttcgagttttacagactgctgcacgacgcccggcctaaggaaggcgacgaccggcccttcttttggctgttcgagaatgtggtggccatgggagtcagcgacaagcgggatattagccggttcctggagagcaaccccgtgatgatcgatgccaaggaagtgagcgccgcccaccgggccagatacttctggggcaatctgcctggcatgaacagacccctggccagcaccgtgaacgacaagctggagctgcaggagtgcctggagcacggccggatcgccaagttcagcaaggtgagaaccatcaccacccgaagcaacagcatcaaacaaggcaaggaccagcactttcctgtgttcatgaacgagaaggaggacatcctgtggtgtaccgagatggagagagtgttcgggttcccagtccactacacagatgtcagcaacatgtctagactggccagacagagactgctgggaagaagctggtccgtccctgtgatcagacacctgttcgcccctctgaaggagtacttcgcctgcgtgagcagcggcaacagcaacgccaacagccggggccccagcttctctagcggcctggtgccactgtccctgagagggagccacatgggccccatggagatctacaaaaccgtgagcgcctggaagcggcagcctgtgcgcgtgctgagcctgtttcggaatatcgataaagtcctgaaaagcctgggattcctggagagcggctctggctccggcggtggcaccctgaagtacgtggaggatgtgacaaacgtggtcagacgggatgtggagaagtggggccccttcgatctggtgtacggcagcacccaacccctgggcagctcttgtgaccggtgccctggctggtacatgtttcagttccaccggatcctgcagtacgccctgccgagacaggagtcccagcggccattcttttggattttcatggacaacttgctgctgaccgaggatgaccaggaaactaccactcggttcctgcagaccgaagccgtgaccctgcaggacgtgagaggccgggactaccagaacgccatgcgggtgtggtccaacatccctggactgaaaagcaagcacgcacctctgacccctaaagaagaggagtacctgcaggcccaggtgcggagcagaagcaagctggacgcccctaaggtggatctgctggtgaagaattgcctcctgcccctgagagagtacttcaagtatttcagccagaatagtctgcccctgggcggcccaagcagcggcgcccctcctcccagcggcggcagcccagccggctccccaacctctaccgaggagggcacctctgagtccgccacccccgagagcggccctggcacctccaccgagcccagcgagggcagcgcacccggcagccctgccggcagccccacctccacagaggagggaaccagcaccgagcccagcgaaggcagcgccccaggcaccagcaccgagcctagtgagggcggctctggcggcggcagcgcccaggagattaaacggatcaacaagatcagaagaagacttgtgaaagacagcaacaccaagaaggccggcaagacaggccccatgaaaaccctgctggttagagtgatgacacccgatctgagagagcggctggaaaacctgagaaagaagcctgaaaatatcccccagcccatcagcaatacatctagagccaacctgaataagctgctgaccgattacaccgaaatgaagaaggcgatcctgcatgtgtactgggaagagttccagaaggaccctgtgggcctgatgagccgggtggcccagcctgccagcaagaagatcgatcagaacaagctgaaacctgagatggacgagaagggcaacctgaccaccgccggctttgcctgctctcagtgtggccagcccctgttcgtgtacaagctggagcaggtgtctgagaagggcaaggcttacaccaactacttcggacggtgcaatgtggccgagcacgaaaagctgatcctgctggcccagctgaagcccgagaaggatagcgacgaagccgtgacatatagcctgggaaagtttgggcagagggccctggatttctacagcattcatgtgaccaaggagtccacccaccccgtgaagcccctggcccagatcgccggaaacagatacgcctccggacctgtgggaaaggccctgagcgacgcatgtatgggcacaatcgcctccttcctgtctaagtaccaggacatcatcatcgaacaccagaaggtggtgaagggcaaccagaagagactggagagcctgcgggagctggccggcaaggaaaacctggaataccctagcgtgaccctgccacctcagcctcacaccaaggagggcgttgatgcctacaacgaagtgatcgcccgggtgcgaatgtgggtgaacctgaacctgtggcagaagctgaagctaagcagagatgatgccaagcctctgctgagactgaagggattcccttcctttcctctggtcgagagacaggccaacgaagtggactggtgggacatggtgtgtaacgtgaagaagctgatcaacgagaaaaaggaggatggcaaggtgttttggcagaatctggctggctacaagagacaggaagccctgagaccatacctgagcagcgaggaagatcggaagaagggaaagaaattcgctcggtaccagctgggcgacctgctgctgcacctggaaaagaagcacggcgaggactggggaaaggtgtacgacgaggcctgggagcggattgacaagaaagtggaaggcctgagcaagcacatcaagctggaagaggaacggagaagcgaggacgcccagagcaaggccgccctgaccgactggctgcgggctaaggccagcttcgtgatcgagggcctgaaggaggccgacaaggacgagttctgcagatgcgagctgaagctgcagaagtggtacggggacctgcggggaaagcccttcgccatcgaagccgagaacagcatcctggacatcagcggcttcagcaagcagtacaactgtgccttcatctggcagaaggacggcgtgaagaagctgaacctgtacctgatcatcaactacttcaagggcggcaagctgcggttcaagaagatcaaacctgaagccttcgaagccaacagattctacaccgtgatcaacaaaaagagcggcgagatcgtgcccatggaggtgaacttcaacttcgacgaccccaacctgatcatcctgcctctggcctttggcaagagacagggcagagaattcatctggaacgacctgctgtccctggaaaccggcagcctgaagctggccaacggaagagtgatcgagaagacactgtacaacagaagaacccggcaggatgagcctgccctgttcgtggccctgaccttcgagcggcgggaggtcctggactcctccaatatcaaaccaatgaacctgatcggcgtggcaagaggcgaaaacatccccgccgtgatcgccctgaccgaccccgagggctgcccactgagccggtttaaggatagcctgggaaacccaacccacatcctgagaatcggcgagagctataaggagaagcagcggaccatccaggccaagaaggaggtggagcagcggagagccggcggctacagccggaagtacgccagcaaagccaagaatctggcagacgatatggtgagaaacaccgctagagatctgctgtactacgccgtgacccaggatgccatgctgatcttcgccaacctgagccggggcttcggccggcagggcaagcggaccttcatggccgagagacagtacacacggatggaggactggctgaccgccaagctggcctacgagggcctgagcaagacctacctgtccaagacactggcccagtacacctccaagacatgcagcaactgtgggtttaccatcaccagcgccgactacgacagggtgctggagaagctgaagaagacagcaacaggctggatgaccacaattaacggcaaggagctgaaggtggagggccagattacctactacaacagatacaagagacagaacgtagtcaaggacctgtccgtcgagctggatagactgagcgaagaatctgtgaacaacgacatctcctcctggacaaagggcagaagcggagaagctctgagcctcctgaagaaaagattctcccatagacccgtgcaggagaagttcgtgtgcctgaactgcggcttcgagacacacgcagccgagcaagccgccctgaacatcgccagatcctggctgttcctgcggagccaggagtacaagaaataccagacaaacaagacaaccggcaacaccgataagagagccttcgtcgagacctggcagtccttttaccggaagaagcttaaggaggtgtggaaacctgccgtgcggtctggcggatctggcggaggctccacaagctaccagacccccgtgagcttcaaggacgtggtggtgggcttcacccaggaggagtggcactggctgagccccgcccagagggccctgtacagggacgtgatgctggagacctacagcaacctggtgagcgtgggctacgagggcaccaagcccgacgtgatcctgaggctggagcaggaggaggccccctggatcggcgaggccgcctgccccggctgccactgctggggcatcagcaagctgaccagccccaagaaaaagagaaaagtctaagctgccttctgcggggcttgccttctggccatgcccttcttctctcccttgcacctgtacctcttggtctttgaataaagcctgagtaggaaggctagcaaaaaaaaaaaaaaaaaaaaaaaaaaaaaaaaaaaaaaaaaaaaaaaaaaaaaaaaaaaaaaaaaaaaaaaaaaaaaaaa

SEQ ID NO: 3435 - RNA, 5419 nt, synthetic construct
  source 1..5419: mol_type = other RNA
aggaaataagagagaaaagaagagtaagaagaaatataagagccaccatggcccctaagaagaagcgtaaagtgagccgggtgaacggcagcggcagcggcggcggcatgaaccacgaccaggagttcgacccccctaaggtgtaccctcccgtccccgccgagaagagaaagcccatccgggtcctgagcctgttcgatggcatcgccaccggtctgctggtgctgaaggacctgggcatccaggtggataggtacattgcctccgaggtgtgcgaggactccatcaccgtgggaatggtgcgtcatcagggcaagatcatgtacgtgggcgacgtgcggagcgtgacacagaagcatatccaggagtggggccctttcgacctggtgatcggcggcagcccttgcaatgacctgagcatcgtgaacccagcccggaagggcctgtacgagggaaccggcagactgttcttcgagttttacagactgctgcacgacgcccggcctaaggaaggcgacgaccggcccttcttttggctgttcgagaatgtggtggccatgggagtcagcgacaagcgggatattagccggttcctggagagcaaccccgtgatgatcgatgccaaggaagtgagcgccgcccaccgggccagatacttctggggcaatctgcctggcatgaacagacccctggccagcaccgtgaacgacaagctggagctgcaggagtgcctggagcacggccggatcgccaagttcagcaaggtgagaaccatcaccacccgaagcaacagcatcaaacaaggcaaggaccagcactttcctgtgttcatgaacgagaaggaggacatcctgtggtgtaccgagatggagagagtgttcgggttcccagtccactacacagatgtcagcaacatgtctagactggccagacagagactgctgggaagaagctggtccgtccctgtgatcagacacctgttcgcccctctgaaggagtacttcgcctgcgtgagcagcggcaacagcaacgccaacagccggggccccagcttctctagcggcctggtgccactgtccctgagagggagccacatgggccccatggagatctacaaaaccgtgagcgcctggaagcggcagcctgtgcgcgtgctgagcctgtttcggaatatcgataaagtcctgaaaagcctgggattcctggagagcggctctggctccggcggtggcaccctgaagtacgtggaggatgtgacaaacgtggtcagacgggatgtggagaagtggggccccttcgatctggtgtacggcagcacccaacccctgggcagctcttgtgaccggtgccctggctggtacatgtttcagttccaccggatcctgcagtacgccctgccgagacaggagtcccagcggccattcttttggattttcatggacaacttgctgctgaccgaggatgaccaggaaactaccactcggttcctgcagaccgaagccgtgaccctgcaggacgtgagaggccgggactaccagaacgccatgcgggtgtggtccaacatccctggactgaaaagcaagcacgcacctctgacccctaaagaagaggagtacctgcaggcccaggtgcggagcagaagcaagctggacgcccctaaggtggatctgctggtgaagaattgcctcctgcccctgagagagtacttcaagtatttcagccagaatagtctgcccctgggcggcccaagcagcggcgcccctcctcccagcggcggcagcccagccggctccccaacctctaccgaggagggcacctctgagtccgccacccccgagagcggccctggcacctccaccgagcccagcgagggcagcgcacccggcagccctgccggcagccccacctccacagaggagggaaccagcaccgagcccagcgaaggcagcgccccaggcaccagcaccgagcctagtgagggcggctctggcggcggcagcgcccaggagattaaacggatcaacaagatcagaagaagacttgtgaaagacagcaacaccaagaaggccggcaagacaggccccatgaaaaccctgctggttagagtgatgacacccgatctgagagagcggctggaaaacctgagaaagaagcctgaaaatatcccccagcccatcagcaatacatctagagccaacctgaataagctgctgaccgattacaccgaaatgaagaaggcgatcctgcatgtgtactgggaagagttccagaaggaccctgtgggcctgatgagccgggtggcccagcctgccagcaagaagatcgatcagaacaagctgaaacctgagatggacgagaagggcaacctgaccaccgccggctttgcctgctctcagtgtggccagcccctgttcgtgtacaagctggagcaggtgtctgagaagggcaaggcttacaccaactacttcggacggtgcaatgtggccgagcacgaaaagctgatcctgctggcccagctgaagcccgagaaggatagcgacgaagccgtgacatatagcctgggaaagtttgggcagagggccctggatttctacagcattcatgtgaccaaggagtccacccaccccgtgaagcccctggcccagatcgccggaaacagatacgcctccggacctgtgggaaaggccctgagcgacgcatgtatgggcacaatcgcctccttcctgtctaagtaccaggacatcatcatcgaacaccagaaggtggtgaagggcaaccagaagagactggagagcctgcgggagctggccggcaaggaaaacctggaataccctagcgtgaccctgccacctcagcctcacaccaaggagggcgttgatgcctacaacgaagtgatcgcccgggtgcgaatgtgggtgaacctgaacctgtggcagaagctgaagctaagcagagatgatgccaagcctctgctgagactgaagggattcccttcctttcctctggtcgagagacaggccaacgaagtggactggtgggacatggtgtgtaacgtgaagaagctgatcaacgagaaaaaggaggatggcaaggtgttttggcagaatctggctggctacaagagacaggaagccctgagaccatacctgagcagcgaggaagatcggaagaagggaaagaaattcgctcggtaccagctgggcgacctgctgctgcacctggaaaagaagcacggcgaggactggggaaaggtgtacgacgaggcctgggagcggattgacaagaaagtggaaggcctgagcaagcacatcaagctggaagaggaacggagaagcgaggacgcccagagcaaggccgccctgaccgactggctgcgggctaaggccagcttcgtgatcgagggcctgaaggaggccgacaaggacgagttctgcagatgcgagctgaagctgcagaagtggtacggggacctgcggggaaagcccttcgccatcgaagccgagaacagcatcctggacatcagcggcttcagcaagcagtacaactgtgccttcatctggcagaaggacggcgtgaagaagctgaacctgtacctgatcatcaactacttcaagggcggcaagctgcggttcaagaagatcaaacctgaagccttcgaagccaacagattctacaccgtgatcaacaaaaagagcggcgagatcgtgcccatggaggtgaacttcaacttcgacgaccccaacctgatcatcctgcctctggcctttggcaagagacagggcagagaattcatctggaacgacctgctgtccctggaaaccggcagcctgaagctggccaacggaagagtgatcgagaagacactgtacaacagaagaacccggcaggatgagcctgccctgttcgtggccctgaccttcgagcggcgggaggtcctggactcctccaatatcaaaccaatgaacctgatcggcgtggcaagaggcgaaaacatccccgccgtgatcgccctgaccgaccccgagggctgcccactgagccggtttaaggatagcctgggaaacccaacccacatcctgagaatcggcgagagctataaggagaagcagcggaccatccaggccaagaaggaggtggagcagcggagagccggcggctacagccggaagtacgccagcaaagccaagaatctggcagacgatatggtgagaaacaccgctagagatctgctgtactacgccgtgacccaggatgccatgctgatcttcgccaacctgagccggggcttcggccggcagggcaagcggaccttcatggccgagagacagtacacacggatggaggactggctgaccgccaagctggcctacgagggcctgagcaagacctacctgtccaagacactggcccagtacacctccaagacatgcagcaactgtgggtttaccatcaccagcgccgactacgacagggtgctggagaagctgaagaagacagcaacaggctggatgaccacaattaacggcaaggagctgaaggtggagggccagattacctactacaacagatacaagagacagaacgtagtcaaggacctgtccgtcgagctggatagactgagcgaagaatctgtgaacaacgacatctcctcctggacaaagggcagaagcggagaagctctgagcctcctgaagaaaagattctcccatagacccgtgcaggagaagttcgtgtgcctgaactgcggcttcgagacacacgcagccgagcaagccgccctgaacatcgccagatcctggctgttcctgcggagccaggagtacaagaaataccagacaaacaagacaaccggcaacaccgataagagagccttcgtcgagacctggcagtccttttaccggaagaagcttaaggaggtgtggaaacctgccgtgcggtctggcggatctggcggaggctccacaagcgtgcacggcagcgtgaccttcagggacgtggccatcgacttcagccaggaggagtgggagtgcctgcagcccgagcagaggaccctgtacagggacgtgatgctggagaactacagccacctgatcagcctgggcagcagcgtgagcaagcccgacgtgatcaccctgctggagcaggagaaggagccctggatcgtggtgaggaaggagaccagcaggtggtaccccgacctggagagcaagaccagccccaagaaaaagagaaaagtctaagctgccttctgcggggcttgccttctggccatgcccttcttctctcccttgcacctgtacctcttggtctttgaataaagcctgagtaggaaggctagcaaaaaaaaaaaaaaaaaaaaaaaaaaaaaaaaaaaaaaaaaaaaaaaaaaaaaaaaaaaaaaaaaaaaaaaaaaaaaaaa

SEQ ID NO: 3436 - RNA, 5419 nt, synthetic construct
  source 1..5419: mol_type = other RNA
aggaaataagagagaaaagaagagtaagaagaaatataagagccaccatggcccctaagaagaagcgtaaagtgagccgggtgaacggcagcggcagcggcggcggcatgaaccacgaccaggagttcgacccccctaaggtgtaccctcccgtccccgccgagaagagaaagcccatccgggtcctgagcctgttcgatggcatcgccaccggtctgctggtgctgaaggacctgggcatccaggtggataggtacattgcctccgaggtgtgcgaggactccatcaccgtgggaatggtgcgtcatcagggcaagatcatgtacgtgggcgacgtgcggagcgtgacacagaagcatatccaggagtggggccctttcgacctggtgatcggcggcagcccttgcaatgacctgagcatcgtgaacccagcccggaagggcctgtacgagggaaccggcagactgttcttcgagttttacagactgctgcacgacgcccggcctaaggaaggcgacgaccggcccttcttttggctgttcgagaatgtggtggccatgggagtcagcgacaagcgggatattagccggttcctggagagcaaccccgtgatgatcgatgccaaggaagtgagcgccgcccaccgggccagatacttctggggcaatctgcctggcatgaacagacccctggccagcaccgtgaacgacaagctggagctgcaggagtgcctggagcacggccggatcgccaagttcagcaaggtgagaaccatcaccacccgaagcaacagcatcaaacaaggcaaggaccagcactttcctgtgttcatgaacgagaaggaggacatcctgtggtgtaccgagatggagagagtgttcgggttcccagtccactacacagatgtcagcaacatgtctagactggccagacagagactgctgggaagaagctggtccgtccctgtgatcagacacctgttcgcccctctgaaggagtacttcgcctgcgtgagcagcggcaacagcaacgccaacagccggggccccagcttctctagcggcctggtgccactgtccctgagagggagccacatgggccccatggagatctacaaaaccgtgagcgcctggaagcggcagcctgtgcgcgtgctgagcctgtttcggaatatcgataaagtcctgaaaagcctgggattcctggagagcggctctggctccggcggtggcaccctgaagtacgtggaggatgtgacaaacgtggtcagacgggatgtggagaagtggggccccttcgatctggtgtacggcagcacccaacccctgggcagctcttgtgaccggtgccctggctggtacatgtttcagttccaccggatcctgcagtacgccctgccgagacaggagtcccagcggccattcttttggattttcatggacaacttgctgctgaccgaggatgaccaggaaactaccactcggttcctgcagaccgaagccgtgaccctgcaggacgtgagaggccgggactaccagaacgccatgcgggtgtggtccaacatccctggactgaaaagcaagcacgcacctctgacccctaaagaagaggagtacctgcaggcccaggtgcggagcagaagcaagctggacgcccctaaggtggatctgctggtgaagaattgcctcctgcccctgagagagtacttcaagtatttcagccagaatagtctgcccctgggcggcccaagcagcggcgcccctcctcccagcggcggcagcccagccggctccccaacctctaccgaggagggcacctctgagtccgccacccccgagagcggccctggcacctccaccgagcccagcgagggcagcgcacccggcagccctgccggcagccccacctccacagaggagggaaccagcaccgagcccagcgaaggcagcgccccaggcaccagcaccgagcctagtgagggcggctctggcggcggcagcgcccaggagattaaacggatcaacaagatcagaagaagacttgtgaaagacagcaacaccaagaaggccggcaagacaggccccatgaaaaccctgctggttagagtgatgacacccgatctgagagagcggctggaaaacctgagaaagaagcctgaaaatatcccccagcccatcagcaatacatctagagccaacctgaataagctgctgaccgattacaccgaaatgaagaaggcgatcctgcatgtgtactgggaagagttccagaaggaccctgtgggcctgatgagccgggtggcccagcctgccagcaagaagatcgatcagaacaagctgaaacctgagatggacgagaagggcaacctgaccaccgccggctttgcctgctctcagtgtggccagcccctgttcgtgtacaagctggagcaggtgtctgagaagggcaaggcttacaccaactacttcggacggtgcaatgtggccgagcacgaaaagctgatcctgctggcccagctgaagcccgagaaggatagcgacgaagccgtgacatatagcctgggaaagtttgggcagagggccctggatttctacagcattcatgtgaccaaggagtccacccaccccgtgaagcccctggcccagatcgccggaaacagatacgcctccggacctgtgggaaaggccctgagcgacgcatgtatgggcacaatcgcctccttcctgtctaagtaccaggacatcatcatcgaacaccagaaggtggtgaagggcaaccagaagagactggagagcctgcgggagctggccggcaaggaaaacctggaataccctagcgtgaccctgccacctcagcctcacaccaaggagggcgttgatgcctacaacgaagtgatcgcccgggtgcgaatgtgggtgaacctgaacctgtggcagaagctgaagctaagcagagatgatgccaagcctctgctgagactgaagggattcccttcctttcctctggtcgagagacaggccaacgaagtggactggtgggacatggtgtgtaacgtgaagaagctgatcaacgagaaaaaggaggatggcaaggtgttttggcagaatctggctggctacaagagacaggaagccctgagaccatacctgagcagcgaggaagatcggaagaagggaaagaaattcgctcggtaccagctgggcgacctgctgctgcacctggaaaagaagcacggcgaggactggggaaaggtgtacgacgaggcctgggagcggattgacaagaaagtggaaggcctgagcaagcacatcaagctggaagaggaacggagaagcgaggacgcccagagcaaggccgccctgaccgactggctgcgggctaaggccagcttcgtgatcgagggcctgaaggaggccgacaaggacgagttctgcagatgcgagctgaagctgcagaagtggtacggggacctgcggggaaagcccttcgccatcgaagccgagaacagcatcctggacatcagcggcttcagcaagcagtacaactgtgccttcatctggcagaaggacggcgtgaagaagctgaacctgtacctgatcatcaactacttcaagggcggcaagctgcggttcaagaagatcaaacctgaagccttcgaagccaacagattctacaccgtgatcaacaaaaagagcggcgagatcgtgcccatggaggtgaacttcaacttcgacgaccccaacctgatcatcctgcctctggcctttggcaagagacagggcagagaattcatctggaacgacctgctgtccctggaaaccggcagcctgaagctggccaacggaagagtgatcgagaagacactgtacaacagaagaacccggcaggatgagcctgccctgttcgtggccctgaccttcgagcggcgggaggtcctggactcctccaatatcaaaccaatgaacctgatcggcgtggcaagaggcgaaaacatccccgccgtgatcgccctgaccgaccccgagggctgcccactgagccggtttaaggatagcctgggaaacccaacccacatcctgagaatcggcgagagctataaggagaagcagcggaccatccaggccaagaaggaggtggagcagcggagagccggcggctacagccggaagtacgccagcaaagccaagaatctggcagacgatatggtgagaaacaccgctagagatctgctgtactacgccgtgacccaggatgccatgctgatcttcgccaacctgagccggggcttcggccggcagggcaagcggaccttcatggccgagagacagtacacacggatggaggactggctgaccgccaagctggcctacgagggcctgagcaagacctacctgtccaagacactggcccagtacacctccaagacatgcagcaactgtgggtttaccatcaccagcgccgactacgacagggtgctggagaagctgaagaagacagcaacaggctggatgaccacaattaacggcaaggagctgaaggtggagggccagattacctactacaacagatacaagagacagaacgtagtcaaggacctgtccgtcgagctggatagactgagcgaagaatctgtgaacaacgacatctcctcctggacaaagggcagaagcggagaagctctgagcctcctgaagaaaagattctcccatagacccgtgcaggagaagttcgtgtgcctgaactgcggcttcgagacacacgcagccgagcaagccgccctgaacatcgccagatcctggctgttcctgcggagccaggagtacaagaaataccagacaaacaagacaaccggcaacaccgataagagagccttcgtcgagacctggcagtccttttaccggaagaagcttaaggaggtgtggaaacctgccgtgcggtctggcggatctggcggaggctccacaagcttccaggagctggtgagcttcaacgacgtgaccgtgggcttcacccaggaggagtggcagcacctggaccccagccagaggagcctgtacagggaggtgatgctggagaactacagccacctggtgagcgtgggctactgcgtgaccaagcccgaggtgatcttcaggctggagcagggcgaggagccctggatcagcgaggccgagttccccagccagagcttccccgagctgtggaaggccaccagccccaagaaaaagagaaaagtctaagctgccttctgcggggcttgccttctggccatgcccttcttctctcccttgcacctgtacctcttggtctttgaataaagcctgagtaggaaggctagcaaaaaaaaaaaaaaaaaaaaaaaaaaaaaaaaaaaaaaaaaaaaaaaaaaaaaaaaaaaaaaaaaaaaaaaaaaaaaaaa

SEQ ID NO: 3437 - RNA, 5419 nt, synthetic construct
  source 1..5419: mol_type = other RNA
aggaaataagagagaaaagaagagtaagaagaaatataagagccaccatggcccctaagaagaagcgtaaagtgagccgggtgaacggcagcggcagcggcggcggcatgaaccacgaccaggagttcgacccccctaaggtgtaccctcccgtccccgccgagaagagaaagcccatccgggtcctgagcctgttcgatggcatcgccaccggtctgctggtgctgaaggacctgggcatccaggtggataggtacattgcctccgaggtgtgcgaggactccatcaccgtgggaatggtgcgtcatcagggcaagatcatgtacgtgggcgacgtgcggagcgtgacacagaagcatatccaggagtggggccctttcgacctggtgatcggcggcagcccttgcaatgacctgagcatcgtgaacccagcccggaagggcctgtacgagggaaccggcagactgttcttcgagttttacagactgctgcacgacgcccggcctaaggaaggcgacgaccggcccttcttttggctgttcgagaatgtggtggccatgggagtcagcgacaagcgggatattagccggttcctggagagcaaccccgtgatgatcgatgccaaggaagtgagcgccgcccaccgggccagatacttctggggcaatctgcctggcatgaacagacccctggccagcaccgtgaacgacaagctggagctgcaggagtgcctggagcacggccggatcgccaagttcagcaaggtgagaaccatcaccacccgaagcaacagcatcaaacaaggcaaggaccagcactttcctgtgttcatgaacgagaaggaggacatcctgtggtgtaccgagatggagagagtgttcgggttcccagtccactacacagatgtcagcaacatgtctagactggccagacagagactgctgggaagaagctggtccgtccctgtgatcagacacctgttcgcccctctgaaggagtacttcgcctgcgtgagcagcggcaacagcaacgccaacagccggggccccagcttctctagcggcctggtgccactgtccctgagagggagccacatgggccccatggagatctacaaaaccgtgagcgcctggaagcggcagcctgtgcgcgtgctgagcctgtttcggaatatcgataaagtcctgaaaagcctgggattcctggagagcggctctggctccggcggtggcaccctgaagtacgtggaggatgtgacaaacgtggtcagacgggatgtggagaagtggggccccttcgatctggtgtacggcagcacccaacccctgggcagctcttgtgaccggtgccctggctggtacatgtttcagttccaccggatcctgcagtacgccctgccgagacaggagtcccagcggccattcttttggattttcatggacaacttgctgctgaccgaggatgaccaggaaactaccactcggttcctgcagaccgaagccgtgaccctgcaggacgtgagaggccgggactaccagaacgccatgcgggtgtggtccaacatccctggactgaaaagcaagcacgcacctctgacccctaaagaagaggagtacctgcaggcccaggtgcggagcagaagcaagctggacgcccctaaggtggatctgctggtgaagaattgcctcctgcccctgagagagtacttcaagtatttcagccagaatagtctgcccctgggcggcccaagcagcggcgcccctcctcccagcggcggcagcccagccggctccccaacctctaccgaggagggcacctctgagtccgccacccccgagagcggccctggcacctccaccgagcccagcgagggcagcgcacccggcagccctgccggcagccccacctccacagaggagggaaccagcaccgagcccagcgaaggcagcgccccaggcaccagcaccgagcctagtgagggcggctctggcggcggcagcgcccaggagattaaacggatcaacaagatcagaagaagacttgtgaaagacagcaacaccaagaaggccggcaagacaggccccatgaaaaccctgctggttagagtgatgacacccgatctgagagagcggctggaaaacctgagaaagaagcctgaaaatatcccccagcccatcagcaatacatctagagccaacctgaataagctgctgaccgattacaccgaaatgaagaaggcgatcctgcatgtgtactgggaagagttccagaaggaccctgtgggcctgatgagccgggtggcccagcctgccagcaagaagatcgatcagaacaagctgaaacctgagatggacgagaagggcaacctgaccaccgccggctttgcctgctctcagtgtggccagcccctgttcgtgtacaagctggagcaggtgtctgagaagggcaaggcttacaccaactacttcggacggtgcaatgtggccgagcacgaaaagctgatcctgctggcccagctgaagcccgagaaggatagcgacgaagccgtgacatatagcctgggaaagtttgggcagagggccctggatttctacagcattcatgtgaccaaggagtccacccaccccgtgaagcccctggcccagatcgccggaaacagatacgcctccggacctgtgggaaaggccctgagcgacgcatgtatgggcacaatcgcctccttcctgtctaagtaccaggacatcatcatcgaacaccagaaggtggtgaagggcaaccagaagagactggagagcctgcgggagctggccggcaaggaaaacctggaataccctagcgtgaccctgccacctcagcctcacaccaaggagggcgttgatgcctacaacgaagtgatcgcccgggtgcgaatgtgggtgaacctgaacctgtggcagaagctgaagctaagcagagatgatgccaagcctctgctgagactgaagggattcccttcctttcctctggtcgagagacaggccaacgaagtggactggtgggacatggtgtgtaacgtgaagaagctgatcaacgagaaaaaggaggatggcaaggtgttttggcagaatctggctggctacaagagacaggaagccctgagaccatacctgagcagcgaggaagatcggaagaagggaaagaaattcgctcggtaccagctgggcgacctgctgctgcacctggaaaagaagcacggcgaggactggggaaaggtgtacgacgaggcctgggagcggattgacaagaaagtggaaggcctgagcaagcacatcaagctggaagaggaacggagaagcgaggacgcccagagcaaggccgccctgaccgactggctgcgggctaaggccagcttcgtgatcgagggcctgaaggaggccgacaaggacgagttctgcagatgcgagctgaagctgcagaagtggtacggggacctgcggggaaagcccttcgccatcgaagccgagaacagcatcctggacatcagcggcttcagcaagcagtacaactgtgccttcatctggcagaaggacggcgtgaagaagctgaacctgtacctgatcatcaactacttcaagggcggcaagctgcggttcaagaagatcaaacctgaagccttcgaagccaacagattctacaccgtgatcaacaaaaagagcggcgagatcgtgcccatggaggtgaacttcaacttcgacgaccccaacctgatcatcctgcctctggcctttggcaagagacagggcagagaattcatctggaacgacctgctgtccctggaaaccggcagcctgaagctggccaacggaagagtgatcgagaagacactgtacaacagaagaacccggcaggatgagcctgccctgttcgtggccctgaccttcgagcggcgggaggtcctggactcctccaatatcaaaccaatgaacctgatcggcgtggcaagaggcgaaaacatccccgccgtgatcgccctgaccgaccccgagggctgcccactgagccggtttaaggatagcctgggaaacccaacccacatcctgagaatcggcgagagctataaggagaagcagcggaccatccaggccaagaaggaggtggagcagcggagagccggcggctacagccggaagtacgccagcaaagccaagaatctggcagacgatatggtgagaaacaccgctagagatctgctgtactacgccgtgacccaggatgccatgctgatcttcgccaacctgagccggggcttcggccggcagggcaagcggaccttcatggccgagagacagtacacacggatggaggactggctgaccgccaagctggcctacgagggcctgagcaagacctacctgtccaagacactggcccagtacacctccaagacatgcagcaactgtgggtttaccatcaccagcgccgactacgacagggtgctggagaagctgaagaagacagcaacaggctggatgaccacaattaacggcaaggagctgaaggtggagggccagattacctactacaacagatacaagagacagaacgtagtcaaggacctgtccgtcgagctggatagactgagcgaagaatctgtgaacaacgacatctcctcctggacaaagggcagaagcggagaagctctgagcctcctgaagaaaagattctcccatagacccgtgcaggagaagttcgtgtgcctgaactgcggcttcgagacacacgcagccgagcaagccgccctgaacatcgccagatcctggctgttcctgcggagccaggagtacaagaaataccagacaaacaagacaaccggcaacaccgataagagagccttcgtcgagacctggcagtccttttaccggaagaagcttaaggaggtgtggaaacctgccgtgcggtctggcggatctggcggaggctccacaagcagccaggagagcgtgagcttcaaggacgtgaccgtgggcttcacccaggaggagtggcagcacctggaccccagccagagggccctgtacagggacgtgatgctggagaactacagcaacctggtgagcgtgggctactgcgtgcacaagcccgaggtgatcttcaggctgcagcagggcgaggagccctggaagctggaggaggagttccccagccagagcttccccgaggtgtggaccgccaccagccccaagaaaaagagaaaagtctaagctgccttctgcggggcttgccttctggccatgcccttcttctctcccttgcacctgtacctcttggtctttgaataaagcctgagtaggaaggctagcaaaaaaaaaaaaaaaaaaaaaaaaaaaaaaaaaaaaaaaaaaaaaaaaaaaaaaaaaaaaaaaaaaaaaaaaaaaaaaaa

SEQ ID NO: 3438 - RNA, 5419 nt, synthetic construct
  source 1..5419: mol_type = other RNA
aggaaataagagagaaaagaagagtaagaagaaatataagagccaccatggcccctaagaagaagcgtaaagtgagccgggtgaacggcagcggcagcggcggcggcatgaaccacgaccaggagttcgacccccctaaggtgtaccctcccgtccccgccgagaagagaaagcccatccgggtcctgagcctgttcgatggcatcgccaccggtctgctggtgctgaaggacctgggcatccaggtggataggtacattgcctccgaggtgtgcgaggactccatcaccgtgggaatggtgcgtcatcagggcaagatcatgtacgtgggcgacgtgcggagcgtgacacagaagcatatccaggagtggggccctttcgacctggtgatcggcggcagcccttgcaatgacctgagcatcgtgaacccagcccggaagggcctgtacgagggaaccggcagactgttcttcgagttttacagactgctgcacgacgcccggcctaaggaaggcgacgaccggcccttcttttggctgttcgagaatgtggtggccatgggagtcagcgacaagcgggatattagccggttcctggagagcaaccccgtgatgatcgatgccaaggaagtgagcgccgcccaccgggccagatacttctggggcaatctgcctggcatgaacagacccctggccagcaccgtgaacgacaagctggagctgcaggagtgcctggagcacggccggatcgccaagttcagcaaggtgagaaccatcaccacccgaagcaacagcatcaaacaaggcaaggaccagcactttcctgtgttcatgaacgagaaggaggacatcctgtggtgtaccgagatggagagagtgttcgggttcccagtccactacacagatgtcagcaacatgtctagactggccagacagagactgctgggaagaagctggtccgtccctgtgatcagacacctgttcgcccctctgaaggagtacttcgcctgcgtgagcagcggcaacagcaacgccaacagccggggccccagcttctctagcggcctggtgccactgtccctgagagggagccacatgggccccatggagatctacaaaaccgtgagcgcctggaagcggcagcctgtgcgcgtgctgagcctgtttcggaatatcgataaagtcctgaaaagcctgggattcctggagagcggctctggctccggcggtggcaccctgaagtacgtggaggatgtgacaaacgtggtcagacgggatgtggagaagtggggccccttcgatctggtgtacggcagcacccaacccctgggcagctcttgtgaccggtgccctggctggtacatgtttcagttccaccggatcctgcagtacgccctgccgagacaggagtcccagcggccattcttttggattttcatggacaacttgctgctgaccgaggatgaccaggaaactaccactcggttcctgcagaccgaagccgtgaccctgcaggacgtgagaggccgggactaccagaacgccatgcgggtgtggtccaacatccctggactgaaaagcaagcacgcacctctgacccctaaagaagaggagtacctgcaggcccaggtgcggagcagaagcaagctggacgcccctaaggtggatctgctggtgaagaattgcctcctgcccctgagagagtacttcaagtatttcagccagaatagtctgcccctgggcggcccaagcagcggcgcccctcctcccagcggcggcagcccagccggctccccaacctctaccgaggagggcacctctgagtccgccacccccgagagcggccctggcacctccaccgagcccagcgagggcagcgcacccggcagccctgccggcagccccacctccacagaggagggaaccagcaccgagcccagcgaaggcagcgccccaggcaccagcaccgagcctagtgagggcggctctggcggcggcagcgcccaggagattaaacggatcaacaagatcagaagaagacttgtgaaagacagcaacaccaagaaggccggcaagacaggccccatgaaaaccctgctggttagagtgatgacacccgatctgagagagcggctggaaaacctgagaaagaagcctgaaaatatcccccagcccatcagcaatacatctagagccaacctgaataagctgctgaccgattacaccgaaatgaagaaggcgatcctgcatgtgtactgggaagagttccagaaggaccctgtgggcctgatgagccgggtggcccagcctgccagcaagaagatcgatcagaacaagctgaaacctgagatggacgagaagggcaacctgaccaccgccggctttgcctgctctcagtgtggccagcccctgttcgtgtacaagctggagcaggtgtctgagaagggcaaggcttacaccaactacttcggacggtgcaatgtggccgagcacgaaaagctgatcctgctggcccagctgaagcccgagaaggatagcgacgaagccgtgacatatagcctgggaaagtttgggcagagggccctggatttctacagcattcatgtgaccaaggagtccacccaccccgtgaagcccctggcccagatcgccggaaacagatacgcctccggacctgtgggaaaggccctgagcgacgcatgtatgggcacaatcgcctccttcctgtctaagtaccaggacatcatcatcgaacaccagaaggtggtgaagggcaaccagaagagactggagagcctgcgggagctggccggcaaggaaaacctggaataccctagcgtgaccctgccacctcagcctcacaccaaggagggcgttgatgcctacaacgaagtgatcgcccgggtgcgaatgtgggtgaacctgaacctgtggcagaagctgaagctaagcagagatgatgccaagcctctgctgagactgaagggattcccttcctttcctctggtcgagagacaggccaacgaagtggactggtgggacatggtgtgtaacgtgaagaagctgatcaacgagaaaaaggaggatggcaaggtgttttggcagaatctggctggctacaagagacaggaagccctgagaccatacctgagcagcgaggaagatcggaagaagggaaagaaattcgctcggtaccagctgggcgacctgctgctgcacctggaaaagaagcacggcgaggactggggaaaggtgtacgacgaggcctgggagcggattgacaagaaagtggaaggcctgagcaagcacatcaagctggaagaggaacggagaagcgaggacgcccagagcaaggccgccctgaccgactggctgcgggctaaggccagcttcgtgatcgagggcctgaaggaggccgacaaggacgagttctgcagatgcgagctgaagctgcagaagtggtacggggacctgcggggaaagcccttcgccatcgaagccgagaacagcatcctggacatcagcggcttcagcaagcagtacaactgtgccttcatctggcagaaggacggcgtgaagaagctgaacctgtacctgatcatcaactacttcaagggcggcaagctgcggttcaagaagatcaaacctgaagccttcgaagccaacagattctacaccgtgatcaacaaaaagagcggcgagatcgtgcccatggaggtgaacttcaacttcgacgaccccaacctgatcatcctgcctctggcctttggcaagagacagggcagagaattcatctggaacgacctgctgtccctggaaaccggcagcctgaagctggccaacggaagagtgatcgagaagacactgtacaacagaagaacccggcaggatgagcctgccctgttcgtggccctgaccttcgagcggcgggaggtcctggactcctccaatatcaaaccaatgaacctgatcggcgtggcaagaggcgaaaacatccccgccgtgatcgccctgaccgaccccgagggctgcccactgagccggtttaaggatagcctgggaaacccaacccacatcctgagaatcggcgagagctataaggagaagcagcggaccatccaggccaagaaggaggtggagcagcggagagccggcggctacagccggaagtacgccagcaaagccaagaatctggcagacgatatggtgagaaacaccgctagagatctgctgtactacgccgtgacccaggatgccatgctgatcttcgccaacctgagccggggcttcggccggcagggcaagcggaccttcatggccgagagacagtacacacggatggaggactggctgaccgccaagctggcctacgagggcctgagcaagacctacctgtccaagacactggcccagtacacctccaagacatgcagcaactgtgggtttaccatcaccagcgccgactacgacagggtgctggagaagctgaagaagacagcaacaggctggatgaccacaattaacggcaaggagctgaaggtggagggccagattacctactacaacagatacaagagacagaacgtagtcaaggacctgtccgtcgagctggatagactgagcgaagaatctgtgaacaacgacatctcctcctggacaaagggcagaagcggagaagctctgagcctcctgaagaaaagattctcccatagacccgtgcaggagaagttcgtgtgcctgaactgcggcttcgagacacacgcagccgagcaagccgccctgaacatcgccagatcctggctgttcctgcggagccaggagtacaagaaataccagacaaacaagacaaccggcaacaccgataagagagccttcgtcgagacctggcagtccttttaccggaagaagcttaaggaggtgtggaaacctgccgtgcggtctggcggatctggcggaggctccacaagcgagatggtgaccttcaaggacgtggccgtggtgttcaccgaggaggagctgggcctgctggacagcgcccagaggaagctgtacagggacgtgatgctggagaacttcaggaacctgctgctggtggcccaccagcccttcaagcccgacctgatcagccagctggagagggaggagaagctgctgatggtggagatggagacccccaaggacggctgcagcggcaggaagaaccagcagaagaccagccccaagaaaaagagaaaagtctaagctgccttctgcggggcttgccttctggccatgcccttcttctctcccttgcacctgtacctcttggtctttgaataaagcctgagtaggaaggctagcaaaaaaaaaaaaaaaaaaaaaaaaaaaaaaaaaaaaaaaaaaaaaaaaaaaaaaaaaaaaaaaaaaaaaaaaaaaaaaaa

SEQ ID NO: 3439 - RNA, 5419 nt, synthetic construct
  source 1..5419: mol_type = other RNA
aggaaataagagagaaaagaagagtaagaagaaatataagagccaccatggcccctaagaagaagcgtaaagtgagccgggtgaacggcagcggcagcggcggcggcatgaaccacgaccaggagttcgacccccctaaggtgtaccctcccgtccccgccgagaagagaaagcccatccgggtcctgagcctgttcgatggcatcgccaccggtctgctggtgctgaaggacctgggcatccaggtggataggtacattgcctccgaggtgtgcgaggactccatcaccgtgggaatggtgcgtcatcagggcaagatcatgtacgtgggcgacgtgcggagcgtgacacagaagcatatccaggagtggggccctttcgacctggtgatcggcggcagcccttgcaatgacctgagcatcgtgaacccagcccggaagggcctgtacgagggaaccggcagactgttcttcgagttttacagactgctgcacgacgcccggcctaaggaaggcgacgaccggcccttcttttggctgttcgagaatgtggtggccatgggagtcagcgacaagcgggatattagccggttcctggagagcaaccccgtgatgatcgatgccaaggaagtgagcgccgcccaccgggccagatacttctggggcaatctgcctggcatgaacagacccctggccagcaccgtgaacgacaagctggagctgcaggagtgcctggagcacggccggatcgccaagttcagcaaggtgagaaccatcaccacccgaagcaacagcatcaaacaaggcaaggaccagcactttcctgtgttcatgaacgagaaggaggacatcctgtggtgtaccgagatggagagagtgttcgggttcccagtccactacacagatgtcagcaacatgtctagactggccagacagagactgctgggaagaagctggtccgtccctgtgatcagacacctgttcgcccctctgaaggagtacttcgcctgcgtgagcagcggcaacagcaacgccaacagccggggccccagcttctctagcggcctggtgccactgtccctgagagggagccacatgggccccatggagatctacaaaaccgtgagcgcctggaagcggcagcctgtgcgcgtgctgagcctgtttcggaatatcgataaagtcctgaaaagcctgggattcctggagagcggctctggctccggcggtggcaccctgaagtacgtggaggatgtgacaaacgtggtcagacgggatgtggagaagtggggccccttcgatctggtgtacggcagcacccaacccctgggcagctcttgtgaccggtgccctggctggtacatgtttcagttccaccggatcctgcagtacgccctgccgagacaggagtcccagcggccattcttttggattttcatggacaacttgctgctgaccgaggatgaccaggaaactaccactcggttcctgcagaccgaagccgtgaccctgcaggacgtgagaggccgggactaccagaacgccatgcgggtgtggtccaacatccctggactgaaaagcaagcacgcacctctgacccctaaagaagaggagtacctgcaggcccaggtgcggagcagaagcaagctggacgcccctaaggtggatctgctggtgaagaattgcctcctgcccctgagagagtacttcaagtatttcagccagaatagtctgcccctgggcggcccaagcagcggcgcccctcctcccagcggcggcagcccagccggctccccaacctctaccgaggagggcacctctgagtccgccacccccgagagcggccctggcacctccaccgagcccagcgagggcagcgcacccggcagccctgccggcagccccacctccacagaggagggaaccagcaccgagcccagcgaaggcagcgccccaggcaccagcaccgagcctagtgagggcggctctggcggcggcagcgcccaggagattaaacggatcaacaagatcagaagaagacttgtgaaagacagcaacaccaagaaggccggcaagacaggccccatgaaaaccctgctggttagagtgatgacacccgatctgagagagcggctggaaaacctgagaaagaagcctgaaaatatcccccagcccatcagcaatacatctagagccaacctgaataagctgctgaccgattacaccgaaatgaagaaggcgatcctgcatgtgtactgggaagagttccagaaggaccctgtgggcctgatgagccgggtggcccagcctgccagcaagaagatcgatcagaacaagctgaaacctgagatggacgagaagggcaacctgaccaccgccggctttgcctgctctcagtgtggccagcccctgttcgtgtacaagctggagcaggtgtctgagaagggcaaggcttacaccaactacttcggacggtgcaatgtggccgagcacgaaaagctgatcctgctggcccagctgaagcccgagaaggatagcgacgaagccgtgacatatagcctgggaaagtttgggcagagggccctggatttctacagcattcatgtgaccaaggagtccacccaccccgtgaagcccctggcccagatcgccggaaacagatacgcctccggacctgtgggaaaggccctgagcgacgcatgtatgggcacaatcgcctccttcctgtctaagtaccaggacatcatcatcgaacaccagaaggtggtgaagggcaaccagaagagactggagagcctgcgggagctggccggcaaggaaaacctggaataccctagcgtgaccctgccacctcagcctcacaccaaggagggcgttgatgcctacaacgaagtgatcgcccgggtgcgaatgtgggtgaacctgaacctgtggcagaagctgaagctaagcagagatgatgccaagcctctgctgagactgaagggattcccttcctttcctctggtcgagagacaggccaacgaagtggactggtgggacatggtgtgtaacgtgaagaagctgatcaacgagaaaaaggaggatggcaaggtgttttggcagaatctggctggctacaagagacaggaagccctgagaccatacctgagcagcgaggaagatcggaagaagggaaagaaattcgctcggtaccagctgggcgacctgctgctgcacctggaaaagaagcacggcgaggactggggaaaggtgtacgacgaggcctgggagcggattgacaagaaagtggaaggcctgagcaagcacatcaagctggaagaggaacggagaagcgaggacgcccagagcaaggccgccctgaccgactggctgcgggctaaggccagcttcgtgatcgagggcctgaaggaggccgacaaggacgagttctgcagatgcgagctgaagctgcagaagtggtacggggacctgcggggaaagcccttcgccatcgaagccgagaacagcatcctggacatcagcggcttcagcaagcagtacaactgtgccttcatctggcagaaggacggcgtgaagaagctgaacctgtacctgatcatcaactacttcaagggcggcaagctgcggttcaagaagatcaaacctgaagccttcgaagccaacagattctacaccgtgatcaacaaaaagagcggcgagatcgtgcccatggaggtgaacttcaacttcgacgaccccaacctgatcatcctgcctctggcctttggcaagagacagggcagagaattcatctggaacgacctgctgtccctggaaaccggcagcctgaagctggccaacggaagagtgatcgagaagacactgtacaacagaagaacccggcaggatgagcctgccctgttcgtggccctgaccttcgagcggcgggaggtcctggactcctccaatatcaaaccaatgaacctgatcggcgtggcaagaggcgaaaacatccccgccgtgatcgccctgaccgaccccgagggctgcccactgagccggtttaaggatagcctgggaaacccaacccacatcctgagaatcggcgagagctataaggagaagcagcggaccatccaggccaagaaggaggtggagcagcggagagccggcggctacagccggaagtacgccagcaaagccaagaatctggcagacgatatggtgagaaacaccgctagagatctgctgtactacgccgtgacccaggatgccatgctgatcttcgccaacctgagccggggcttcggccggcagggcaagcggaccttcatggccgagagacagtacacacggatggaggactggctgaccgccaagctggcctacgagggcctgagcaagacctacctgtccaagacactggcccagtacacctccaagacatgcagcaactgtgggtttaccatcaccagcgccgactacgacagggtgctggagaagctgaagaagacagcaacaggctggatgaccacaattaacggcaaggagctgaaggtggagggccagattacctactacaacagatacaagagacagaacgtagtcaaggacctgtccgtcgagctggatagactgagcgaagaatctgtgaacaacgacatctcctcctggacaaagggcagaagcggagaagctctgagcctcctgaagaaaagattctcccatagacccgtgcaggagaagttcgtgtgcctgaactgcggcttcgagacacacgcagccgagcaagccgccctgaacatcgccagatcctggctgttcctgcggagccaggagtacaagaaataccagacaaacaagacaaccggcaacaccgataagagagccttcgtcgagacctggcagtccttttaccggaagaagcttaaggaggtgtggaaacctgccgtgcggtctggcggatctggcggaggctccacaagcatgcacctgaccgcctggccccagaagagcgtgaccttcgaggacgtggccgtgtacttcacccaggccgagtgggacggcctgagccccgcccagagggccctgtacagggacgtgatgctggagaactacggcaacgtggccagcctgggcttccccctgctgaagcccgccgtgatcagccagctggagggcggcggcgagctgggcggccccagccccctggccgccggcaccggcctgaccagccccaagaaaaagagaaaagtctaagctgccttctgcggggcttgccttctggccatgcccttcttctctcccttgcacctgtacctcttggtctttgaataaagcctgagtaggaaggctagcaaaaaaaaaaaaaaaaaaaaaaaaaaaaaaaaaaaaaaaaaaaaaaaaaaaaaaaaaaaaaaaaaaaaaaaaaaaaaaaa

SEQ ID NO: 3440 - RNA, 5419 nt, synthetic construct
  source 1..5419: mol_type = other RNA
aggaaataagagagaaaagaagagtaagaagaaatataagagccaccatggcccctaagaagaagcgtaaagtgagccgggtgaacggcagcggcagcggcggcggcatgaaccacgaccaggagttcgacccccctaaggtgtaccctcccgtccccgccgagaagagaaagcccatccgggtcctgagcctgttcgatggcatcgccaccggtctgctggtgctgaaggacctgggcatccaggtggataggtacattgcctccgaggtgtgcgaggactccatcaccgtgggaatggtgcgtcatcagggcaagatcatgtacgtgggcgacgtgcggagcgtgacacagaagcatatccaggagtggggccctttcgacctggtgatcggcggcagcccttgcaatgacctgagcatcgtgaacccagcccggaagggcctgtacgagggaaccggcagactgttcttcgagttttacagactgctgcacgacgcccggcctaaggaaggcgacgaccggcccttcttttggctgttcgagaatgtggtggccatgggagtcagcgacaagcgggatattagccggttcctggagagcaaccccgtgatgatcgatgccaaggaagtgagcgccgcccaccgggccagatacttctggggcaatctgcctggcatgaacagacccctggccagcaccgtgaacgacaagctggagctgcaggagtgcctggagcacggccggatcgccaagttcagcaaggtgagaaccatcaccacccgaagcaacagcatcaaacaaggcaaggaccagcactttcctgtgttcatgaacgagaaggaggacatcctgtggtgtaccgagatggagagagtgttcgggttcccagtccactacacagatgtcagcaacatgtctagactggccagacagagactgctgggaagaagctggtccgtccctgtgatcagacacctgttcgcccctctgaaggagtacttcgcctgcgtgagcagcggcaacagcaacgccaacagccggggccccagcttctctagcggcctggtgccactgtccctgagagggagccacatgggccccatggagatctacaaaaccgtgagcgcctggaagcggcagcctgtgcgcgtgctgagcctgtttcggaatatcgataaagtcctgaaaagcctgggattcctggagagcggctctggctccggcggtggcaccctgaagtacgtggaggatgtgacaaacgtggtcagacgggatgtggagaagtggggccccttcgatctggtgtacggcagcacccaacccctgggcagctcttgtgaccggtgccctggctggtacatgtttcagttccaccggatcctgcagtacgccctgccgagacaggagtcccagcggccattcttttggattttcatggacaacttgctgctgaccgaggatgaccaggaaactaccactcggttcctgcagaccgaagccgtgaccctgcaggacgtgagaggccgggactaccagaacgccatgcgggtgtggtccaacatccctggactgaaaagcaagcacgcacctctgacccctaaagaagaggagtacctgcaggcccaggtgcggagcagaagcaagctggacgcccctaaggtggatctgctggtgaagaattgcctcctgcccctgagagagtacttcaagtatttcagccagaatagtctgcccctgggcggcccaagcagcggcgcccctcctcccagcggcggcagcccagccggctccccaacctctaccgaggagggcacctctgagtccgccacccccgagagcggccctggcacctccaccgagcccagcgagggcagcgcacccggcagccctgccggcagccccacctccacagaggagggaaccagcaccgagcccagcgaaggcagcgccccaggcaccagcaccgagcctagtgagggcggctctggcggcggcagcgcccaggagattaaacggatcaacaagatcagaagaagacttgtgaaagacagcaacaccaagaaggccggcaagacaggccccatgaaaaccctgctggttagagtgatgacacccgatctgagagagcggctggaaaacctgagaaagaagcctgaaaatatcccccagcccatcagcaatacatctagagccaacctgaataagctgctgaccgattacaccgaaatgaagaaggcgatcctgcatgtgtactgggaagagttccagaaggaccctgtgggcctgatgagccgggtggcccagcctgccagcaagaagatcgatcagaacaagctgaaacctgagatggacgagaagggcaacctgaccaccgccggctttgcctgctctcagtgtggccagcccctgttcgtgtacaagctggagcaggtgtctgagaagggcaaggcttacaccaactacttcggacggtgcaatgtggccgagcacgaaaagctgatcctgctggcccagctgaagcccgagaaggatagcgacgaagccgtgacatatagcctgggaaagtttgggcagagggccctggatttctacagcattcatgtgaccaaggagtccacccaccccgtgaagcccctggcccagatcgccggaaacagatacgcctccggacctgtgggaaaggccctgagcgacgcatgtatgggcacaatcgcctccttcctgtctaagtaccaggacatcatcatcgaacaccagaaggtggtgaagggcaaccagaagagactggagagcctgcgggagctggccggcaaggaaaacctggaataccctagcgtgaccctgccacctcagcctcacaccaaggagggcgttgatgcctacaacgaagtgatcgcccgggtgcgaatgtgggtgaacctgaacctgtggcagaagctgaagctaagcagagatgatgccaagcctctgctgagactgaagggattcccttcctttcctctggtcgagagacaggccaacgaagtggactggtgggacatggtgtgtaacgtgaagaagctgatcaacgagaaaaaggaggatggcaaggtgttttggcagaatctggctggctacaagagacaggaagccctgagaccatacctgagcagcgaggaagatcggaagaagggaaagaaattcgctcggtaccagctgggcgacctgctgctgcacctggaaaagaagcacggcgaggactggggaaaggtgtacgacgaggcctgggagcggattgacaagaaagtggaaggcctgagcaagcacatcaagctggaagaggaacggagaagcgaggacgcccagagcaaggccgccctgaccgactggctgcgggctaaggccagcttcgtgatcgagggcctgaaggaggccgacaaggacgagttctgcagatgcgagctgaagctgcagaagtggtacggggacctgcggggaaagcccttcgccatcgaagccgagaacagcatcctggacatcagcggcttcagcaagcagtacaactgtgccttcatctggcagaaggacggcgtgaagaagctgaacctgtacctgatcatcaactacttcaagggcggcaagctgcggttcaagaagatcaaacctgaagccttcgaagccaacagattctacaccgtgatcaacaaaaagagcggcgagatcgtgcccatggaggtgaacttcaacttcgacgaccccaacctgatcatcctgcctctggcctttggcaagagacagggcagagaattcatctggaacgacctgctgtccctggaaaccggcagcctgaagctggccaacggaagagtgatcgagaagacactgtacaacagaagaacccggcaggatgagcctgccctgttcgtggccctgaccttcgagcggcgggaggtcctggactcctccaatatcaaaccaatgaacctgatcggcgtggcaagaggcgaaaacatccccgccgtgatcgccctgaccgaccccgagggctgcccactgagccggtttaaggatagcctgggaaacccaacccacatcctgagaatcggcgagagctataaggagaagcagcggaccatccaggccaagaaggaggtggagcagcggagagccggcggctacagccggaagtacgccagcaaagccaagaatctggcagacgatatggtgagaaacaccgctagagatctgctgtactacgccgtgacccaggatgccatgctgatcttcgccaacctgagccggggcttcggccggcagggcaagcggaccttcatggccgagagacagtacacacggatggaggactggctgaccgccaagctggcctacgagggcctgagcaagacctacctgtccaagacactggcccagtacacctccaagacatgcagcaactgtgggtttaccatcaccagcgccgactacgacagggtgctggagaagctgaagaagacagcaacaggctggatgaccacaattaacggcaaggagctgaaggtggagggccagattacctactacaacagatacaagagacagaacgtagtcaaggacctgtccgtcgagctggatagactgagcgaagaatctgtgaacaacgacatctcctcctggacaaagggcagaagcggagaagctctgagcctcctgaagaaaagattctcccatagacccgtgcaggagaagttcgtgtgcctgaactgcggcttcgagacacacgcagccgagcaagccgccctgaacatcgccagatcctggctgttcctgcggagccaggagtacaagaaataccagacaaacaagacaaccggcaacaccgataagagagccttcgtcgagacctggcagtccttttaccggaagaagcttaaggaggtgtggaaacctgccgtgcggtctggcggatctggcggaggctccacaagccccctggagagcgtgaccttcaaggacgtggccatcgacttcaccctggaggagtggaggctgatggaccccacccagaggaacctgcacaaggacgtgatgctggagaactacaggaacctggtgagcctgggcctggccgtgagcaagcccgacatgatcagccacctggagaacggcaagggcccctgggtgaccatgaggggcatcagcaggatcccctaccccgacatcgagcccaagaccagccccaagaaaaagagaaaagtctaagctgccttctgcggggcttgccttctggccatgcccttcttctctcccttgcacctgtacctcttggtctttgaataaagcctgagtaggaaggctagcaaaaaaaaaaaaaaaaaaaaaaaaaaaaaaaaaaaaaaaaaaaaaaaaaaaaaaaaaaaaaaaaaaaaaaaaaaaaaaaa

SEQ ID NO: 3441 - RNA, 5419 nt, synthetic construct
  source 1..5419: mol_type = other RNA
aggaaataagagagaaaagaagagtaagaagaaatataagagccaccatggcccctaagaagaagcgtaaagtgagccgggtgaacggcagcggcagcggcggcggcatgaaccacgaccaggagttcgacccccctaaggtgtaccctcccgtccccgccgagaagagaaagcccatccgggtcctgagcctgttcgatggcatcgccaccggtctgctggtgctgaaggacctgggcatccaggtggataggtacattgcctccgaggtgtgcgaggactccatcaccgtgggaatggtgcgtcatcagggcaagatcatgtacgtgggcgacgtgcggagcgtgacacagaagcatatccaggagtggggccctttcgacctggtgatcggcggcagcccttgcaatgacctgagcatcgtgaacccagcccggaagggcctgtacgagggaaccggcagactgttcttcgagttttacagactgctgcacgacgcccggcctaaggaaggcgacgaccggcccttcttttggctgttcgagaatgtggtggccatgggagtcagcgacaagcgggatattagccggttcctggagagcaaccccgtgatgatcgatgccaaggaagtgagcgccgcccaccgggccagatacttctggggcaatctgcctggcatgaacagacccctggccagcaccgtgaacgacaagctggagctgcaggagtgcctggagcacggccggatcgccaagttcagcaaggtgagaaccatcaccacccgaagcaacagcatcaaacaaggcaaggaccagcactttcctgtgttcatgaacgagaaggaggacatcctgtggtgtaccgagatggagagagtgttcgggttcccagtccactacacagatgtcagcaacatgtctagactggccagacagagactgctgggaagaagctggtccgtccctgtgatcagacacctgttcgcccctctgaaggagtacttcgcctgcgtgagcagcggcaacagcaacgccaacagccggggccccagcttctctagcggcctggtgccactgtccctgagagggagccacatgggccccatggagatctacaaaaccgtgagcgcctggaagcggcagcctgtgcgcgtgctgagcctgtttcggaatatcgataaagtcctgaaaagcctgggattcctggagagcggctctggctccggcggtggcaccctgaagtacgtggaggatgtgacaaacgtggtcagacgggatgtggagaagtggggccccttcgatctggtgtacggcagcacccaacccctgggcagctcttgtgaccggtgccctggctggtacatgtttcagttccaccggatcctgcagtacgccctgccgagacaggagtcccagcggccattcttttggattttcatggacaacttgctgctgaccgaggatgaccaggaaactaccactcggttcctgcagaccgaagccgtgaccctgcaggacgtgagaggccgggactaccagaacgccatgcgggtgtggtccaacatccctggactgaaaagcaagcacgcacctctgacccctaaagaagaggagtacctgcaggcccaggtgcggagcagaagcaagctggacgcccctaaggtggatctgctggtgaagaattgcctcctgcccctgagagagtacttcaagtatttcagccagaatagtctgcccctgggcggcccaagcagcggcgcccctcctcccagcggcggcagcccagccggctccccaacctctaccgaggagggcacctctgagtccgccacccccgagagcggccctggcacctccaccgagcccagcgagggcagcgcacccggcagccctgccggcagccccacctccacagaggagggaaccagcaccgagcccagcgaaggcagcgccccaggcaccagcaccgagcctagtgagggcggctctggcggcggcagcgcccaggagattaaacggatcaacaagatcagaagaagacttgtgaaagacagcaacaccaagaaggccggcaagacaggccccatgaaaaccctgctggttagagtgatgacacccgatctgagagagcggctggaaaacctgagaaagaagcctgaaaatatcccccagcccatcagcaatacatctagagccaacctgaataagctgctgaccgattacaccgaaatgaagaaggcgatcctgcatgtgtactgggaagagttccagaaggaccctgtgggcctgatgagccgggtggcccagcctgccagcaagaagatcgatcagaacaagctgaaacctgagatggacgagaagggcaacctgaccaccgccggctttgcctgctctcagtgtggccagcccctgttcgtgtacaagctggagcaggtgtctgagaagggcaaggcttacaccaactacttcggacggtgcaatgtggccgagcacgaaaagctgatcctgctggcccagctgaagcccgagaaggatagcgacgaagccgtgacatatagcctgggaaagtttgggcagagggccctggatttctacagcattcatgtgaccaaggagtccacccaccccgtgaagcccctggcccagatcgccggaaacagatacgcctccggacctgtgggaaaggccctgagcgacgcatgtatgggcacaatcgcctccttcctgtctaagtaccaggacatcatcatcgaacaccagaaggtggtgaagggcaaccagaagagactggagagcctgcgggagctggccggcaaggaaaacctggaataccctagcgtgaccctgccacctcagcctcacaccaaggagggcgttgatgcctacaacgaagtgatcgcccgggtgcgaatgtgggtgaacctgaacctgtggcagaagctgaagctaagcagagatgatgccaagcctctgctgagactgaagggattcccttcctttcctctggtcgagagacaggccaacgaagtggactggtgggacatggtgtgtaacgtgaagaagctgatcaacgagaaaaaggaggatggcaaggtgttttggcagaatctggctggctacaagagacaggaagccctgagaccatacctgagcagcgaggaagatcggaagaagggaaagaaattcgctcggtaccagctgggcgacctgctgctgcacctggaaaagaagcacggcgaggactggggaaaggtgtacgacgaggcctgggagcggattgacaagaaagtggaaggcctgagcaagcacatcaagctggaagaggaacggagaagcgaggacgcccagagcaaggccgccctgaccgactggctgcgggctaaggccagcttcgtgatcgagggcctgaaggaggccgacaaggacgagttctgcagatgcgagctgaagctgcagaagtggtacggggacctgcggggaaagcccttcgccatcgaagccgagaacagcatcctggacatcagcggcttcagcaagcagtacaactgtgccttcatctggcagaaggacggcgtgaagaagctgaacctgtacctgatcatcaactacttcaagggcggcaagctgcggttcaagaagatcaaacctgaagccttcgaagccaacagattctacaccgtgatcaacaaaaagagcggcgagatcgtgcccatggaggtgaacttcaacttcgacgaccccaacctgatcatcctgcctctggcctttggcaagagacagggcagagaattcatctggaacgacctgctgtccctggaaaccggcagcctgaagctggccaacggaagagtgatcgagaagacactgtacaacagaagaacccggcaggatgagcctgccctgttcgtggccctgaccttcgagcggcgggaggtcctggactcctccaatatcaaaccaatgaacctgatcggcgtggcaagaggcgaaaacatccccgccgtgatcgccctgaccgaccccgagggctgcccactgagccggtttaaggatagcctgggaaacccaacccacatcctgagaatcggcgagagctataaggagaagcagcggaccatccaggccaagaaggaggtggagcagcggagagccggcggctacagccggaagtacgccagcaaagccaagaatctggcagacgatatggtgagaaacaccgctagagatctgctgtactacgccgtgacccaggatgccatgctgatcttcgccaacctgagccggggcttcggccggcagggcaagcggaccttcatggccgagagacagtacacacggatggaggactggctgaccgccaagctggcctacgagggcctgagcaagacctacctgtccaagacactggcccagtacacctccaagacatgcagcaactgtgggtttaccatcaccagcgccgactacgacagggtgctggagaagctgaagaagacagcaacaggctggatgaccacaattaacggcaaggagctgaaggtggagggccagattacctactacaacagatacaagagacagaacgtagtcaaggacctgtccgtcgagctggatagactgagcgaagaatctgtgaacaacgacatctcctcctggacaaagggcagaagcggagaagctctgagcctcctgaagaaaagattctcccatagacccgtgcaggagaagttcgtgtgcctgaactgcggcttcgagacacacgcagccgagcaagccgccctgaacatcgccagatcctggctgttcctgcggagccaggagtacaagaaataccagacaaacaagacaaccggcaacaccgataagagagccttcgtcgagacctggcagtccttttaccggaagaagcttaaggaggtgtggaaacctgccgtgcggtctggcggatctggcggaggctccacaagcagggccctgacccccgtgagcatgaccgccgaggccaagtgcaccggcttcacccagggcagcgtgaccttcgaggacgtggccatctacttcagccaggaggagtggggcctgctggacgaggcccagaggctgctgtacagggacgtgatgctggagaacttcgccctgctgaccagcctggtgtgctggcacggcatggaggacgaggagacccccgagcagagcgtgagcgtgaacggcaccagccccaagaaaaagagaaaagtctaagctgccttctgcggggcttgccttctggccatgcccttcttctctcccttgcacctgtacctcttggtctttgaataaagcctgagtaggaaggctagcaaaaaaaaaaaaaaaaaaaaaaaaaaaaaaaaaaaaaaaaaaaaaaaaaaaaaaaaaaaaaaaaaaaaaaaaaaaaaaaa

SEQ ID NO: 3442 - RNA, 5419 nt, synthetic construct
  source 1..5419: mol_type = other RNA
aggaaataagagagaaaagaagagtaagaagaaatataagagccaccatggcccctaagaagaagcgtaaagtgagccgggtgaacggcagcggcagcggcggcggcatgaaccacgaccaggagttcgacccccctaaggtgtaccctcccgtccccgccgagaagagaaagcccatccgggtcctgagcctgttcgatggcatcgccaccggtctgctggtgctgaaggacctgggcatccaggtggataggtacattgcctccgaggtgtgcgaggactccatcaccgtgggaatggtgcgtcatcagggcaagatcatgtacgtgggcgacgtgcggagcgtgacacagaagcatatccaggagtggggccctttcgacctggtgatcggcggcagcccttgcaatgacctgagcatcgtgaacccagcccggaagggcctgtacgagggaaccggcagactgttcttcgagttttacagactgctgcacgacgcccggcctaaggaaggcgacgaccggcccttcttttggctgttcgagaatgtggtggccatgggagtcagcgacaagcgggatattagccggttcctggagagcaaccccgtgatgatcgatgccaaggaagtgagcgccgcccaccgggccagatacttctggggcaatctgcctggcatgaacagacccctggccagcaccgtgaacgacaagctggagctgcaggagtgcctggagcacggccggatcgccaagttcagcaaggtgagaaccatcaccacccgaagcaacagcatcaaacaaggcaaggaccagcactttcctgtgttcatgaacgagaaggaggacatcctgtggtgtaccgagatggagagagtgttcgggttcccagtccactacacagatgtcagcaacatgtctagactggccagacagagactgctgggaagaagctggtccgtccctgtgatcagacacctgttcgcccctctgaaggagtacttcgcctgcgtgagcagcggcaacagcaacgccaacagccggggccccagcttctctagcggcctggtgccactgtccctgagagggagccacatgggccccatggagatctacaaaaccgtgagcgcctggaagcggcagcctgtgcgcgtgctgagcctgtttcggaatatcgataaagtcctgaaaagcctgggattcctggagagcggctctggctccggcggtggcaccctgaagtacgtggaggatgtgacaaacgtggtcagacgggatgtggagaagtggggccccttcgatctggtgtacggcagcacccaacccctgggcagctcttgtgaccggtgccctggctggtacatgtttcagttccaccggatcctgcagtacgccctgccgagacaggagtcccagcggccattcttttggattttcatggacaacttgctgctgaccgaggatgaccaggaaactaccactcggttcctgcagaccgaagccgtgaccctgcaggacgtgagaggccgggactaccagaacgccatgcgggtgtggtccaacatccctggactgaaaagcaagcacgcacctctgacccctaaagaagaggagtacctgcaggcccaggtgcggagcagaagcaagctggacgcccctaaggtggatctgctggtgaagaattgcctcctgcccctgagagagtacttcaagtatttcagccagaatagtctgcccctgggcggcccaagcagcggcgcccctcctcccagcggcggcagcccagccggctccccaacctctaccgaggagggcacctctgagtccgccacccccgagagcggccctggcacctccaccgagcccagcgagggcagcgcacccggcagccctgccggcagccccacctccacagaggagggaaccagcaccgagcccagcgaaggcagcgccccaggcaccagcaccgagcctagtgagggcggctctggcggcggcagcgcccaggagattaaacggatcaacaagatcagaagaagacttgtgaaagacagcaacaccaagaaggccggcaagacaggccccatgaaaaccctgctggttagagtgatgacacccgatctgagagagcggctggaaaacctgagaaagaagcctgaaaatatcccccagcccatcagcaatacatctagagccaacctgaataagctgctgaccgattacaccgaaatgaagaaggcgatcctgcatgtgtactgggaagagttccagaaggaccctgtgggcctgatgagccgggtggcccagcctgccagcaagaagatcgatcagaacaagctgaaacctgagatggacgagaagggcaacctgaccaccgccggctttgcctgctctcagtgtggccagcccctgttcgtgtacaagctggagcaggtgtctgagaagggcaaggcttacaccaactacttcggacggtgcaatgtggccgagcacgaaaagctgatcctgctggcccagctgaagcccgagaaggatagcgacgaagccgtgacatatagcctgggaaagtttgggcagagggccctggatttctacagcattcatgtgaccaaggagtccacccaccccgtgaagcccctggcccagatcgccggaaacagatacgcctccggacctgtgggaaaggccctgagcgacgcatgtatgggcacaatcgcctccttcctgtctaagtaccaggacatcatcatcgaacaccagaaggtggtgaagggcaaccagaagagactggagagcctgcgggagctggccggcaaggaaaacctggaataccctagcgtgaccctgccacctcagcctcacaccaaggagggcgttgatgcctacaacgaagtgatcgcccgggtgcgaatgtgggtgaacctgaacctgtggcagaagctgaagctaagcagagatgatgccaagcctctgctgagactgaagggattcccttcctttcctctggtcgagagacaggccaacgaagtggactggtgggacatggtgtgtaacgtgaagaagctgatcaacgagaaaaaggaggatggcaaggtgttttggcagaatctggctggctacaagagacaggaagccctgagaccatacctgagcagcgaggaagatcggaagaagggaaagaaattcgctcggtaccagctgggcgacctgctgctgcacctggaaaagaagcacggcgaggactggggaaaggtgtacgacgaggcctgggagcggattgacaagaaagtggaaggcctgagcaagcacatcaagctggaagaggaacggagaagcgaggacgcccagagcaaggccgccctgaccgactggctgcgggctaaggccagcttcgtgatcgagggcctgaaggaggccgacaaggacgagttctgcagatgcgagctgaagctgcagaagtggtacggggacctgcggggaaagcccttcgccatcgaagccgagaacagcatcctggacatcagcggcttcagcaagcagtacaactgtgccttcatctggcagaaggacggcgtgaagaagctgaacctgtacctgatcatcaactacttcaagggcggcaagctgcggttcaagaagatcaaacctgaagccttcgaagccaacagattctacaccgtgatcaacaaaaagagcggcgagatcgtgcccatggaggtgaacttcaacttcgacgaccccaacctgatcatcctgcctctggcctttggcaagagacagggcagagaattcatctggaacgacctgctgtccctggaaaccggcagcctgaagctggccaacggaagagtgatcgagaagacactgtacaacagaagaacccggcaggatgagcctgccctgttcgtggccctgaccttcgagcggcgggaggtcctggactcctccaatatcaaaccaatgaacctgatcggcgtggcaagaggcgaaaacatccccgccgtgatcgccctgaccgaccccgagggctgcccactgagccggtttaaggatagcctgggaaacccaacccacatcctgagaatcggcgagagctataaggagaagcagcggaccatccaggccaagaaggaggtggagcagcggagagccggcggctacagccggaagtacgccagcaaagccaagaatctggcagacgatatggtgagaaacaccgctagagatctgctgtactacgccgtgacccaggatgccatgctgatcttcgccaacctgagccggggcttcggccggcagggcaagcggaccttcatggccgagagacagtacacacggatggaggactggctgaccgccaagctggcctacgagggcctgagcaagacctacctgtccaagacactggcccagtacacctccaagacatgcagcaactgtgggtttaccatcaccagcgccgactacgacagggtgctggagaagctgaagaagacagcaacaggctggatgaccacaattaacggcaaggagctgaaggtggagggccagattacctactacaacagatacaagagacagaacgtagtcaaggacctgtccgtcgagctggatagactgagcgaagaatctgtgaacaacgacatctcctcctggacaaagggcagaagcggagaagctctgagcctcctgaagaaaagattctcccatagacccgtgcaggagaagttcgtgtgcctgaactgcggcttcgagacacacgcagccgagcaagccgccctgaacatcgccagatcctggctgttcctgcggagccaggagtacaagaaataccagacaaacaagacaaccggcaacaccgataagagagccttcgtcgagacctggcagtccttttaccggaagaagcttaaggaggtgtggaaacctgccgtgcggtctggcggatctggcggaggctccacaagcgcctgcggcagcatcaccttcagggacgtggccatcgacttcagccaccaggagtgggagtacctgaacctggtgcagaagaccctgtaccaggaggtgatgatggagaactacgacaacctggtgctgctgggccacagcaagagcaagcccgacctgatcaccctgctggagcagggcaaggagccctggatgatcgtgagggaggagaccaggggcgagtgcaccgccgagctgcagagcaccagccccaagaaaaagagaaaagtctaagctgccttctgcggggcttgccttctggccatgcccttcttctctcccttgcacctgtacctcttggtctttgaataaagcctgagtaggaaggctagcaaaaaaaaaaaaaaaaaaaaaaaaaaaaaaaaaaaaaaaaaaaaaaaaaaaaaaaaaaaaaaaaaaaaaaaaaaaaaaaa

SEQ ID NO: 3443 - RNA, 5419 nt, synthetic construct
  source 1..5419: mol_type = other RNA
aggaaataagagagaaaagaagagtaagaagaaatataagagccaccatggcccctaagaagaagcgtaaagtgagccgggtgaacggcagcggcagcggcggcggcatgaaccacgaccaggagttcgacccccctaaggtgtaccctcccgtccccgccgagaagagaaagcccatccgggtcctgagcctgttcgatggcatcgccaccggtctgctggtgctgaaggacctgggcatccaggtggataggtacattgcctccgaggtgtgcgaggactccatcaccgtgggaatggtgcgtcatcagggcaagatcatgtacgtgggcgacgtgcggagcgtgacacagaagcatatccaggagtggggccctttcgacctggtgatcggcggcagcccttgcaatgacctgagcatcgtgaacccagcccggaagggcctgtacgagggaaccggcagactgttcttcgagttttacagactgctgcacgacgcccggcctaaggaaggcgacgaccggcccttcttttggctgttcgagaatgtggtggccatgggagtcagcgacaagcgggatattagccggttcctggagagcaaccccgtgatgatcgatgccaaggaagtgagcgccgcccaccgggccagatacttctggggcaatctgcctggcatgaacagacccctggccagcaccgtgaacgacaagctggagctgcaggagtgcctggagcacggccggatcgccaagttcagcaaggtgagaaccatcaccacccgaagcaacagcatcaaacaaggcaaggaccagcactttcctgtgttcatgaacgagaaggaggacatcctgtggtgtaccgagatggagagagtgttcgggttcccagtccactacacagatgtcagcaacatgtctagactggccagacagagactgctgggaagaagctggtccgtccctgtgatcagacacctgttcgcccctctgaaggagtacttcgcctgcgtgagcagcggcaacagcaacgccaacagccggggccccagcttctctagcggcctggtgccactgtccctgagagggagccacatgggccccatggagatctacaaaaccgtgagcgcctggaagcggcagcctgtgcgcgtgctgagcctgtttcggaatatcgataaagtcctgaaaagcctgggattcctggagagcggctctggctccggcggtggcaccctgaagtacgtggaggatgtgacaaacgtggtcagacgggatgtggagaagtggggccccttcgatctggtgtacggcagcacccaacccctgggcagctcttgtgaccggtgccctggctggtacatgtttcagttccaccggatcctgcagtacgccctgccgagacaggagtcccagcggccattcttttggattttcatggacaacttgctgctgaccgaggatgaccaggaaactaccactcggttcctgcagaccgaagccgtgaccctgcaggacgtgagaggccgggactaccagaacgccatgcgggtgtggtccaacatccctggactgaaaagcaagcacgcacctctgacccctaaagaagaggagtacctgcaggcccaggtgcggagcagaagcaagctggacgcccctaaggtggatctgctggtgaagaattgcctcctgcccctgagagagtacttcaagtatttcagccagaatagtctgcccctgggcggcccaagcagcggcgcccctcctcccagcggcggcagcccagccggctccccaacctctaccgaggagggcacctctgagtccgccacccccgagagcggccctggcacctccaccgagcccagcgagggcagcgcacccggcagccctgccggcagccccacctccacagaggagggaaccagcaccgagcccagcgaaggcagcgccccaggcaccagcaccgagcctagtgagggcggctctggcggcggcagcgcccaggagattaaacggatcaacaagatcagaagaagacttgtgaaagacagcaacaccaagaaggccggcaagacaggccccatgaaaaccctgctggttagagtgatgacacccgatctgagagagcggctggaaaacctgagaaagaagcctgaaaatatcccccagcccatcagcaatacatctagagccaacctgaataagctgctgaccgattacaccgaaatgaagaaggcgatcctgcatgtgtactgggaagagttccagaaggaccctgtgggcctgatgagccgggtggcccagcctgccagcaagaagatcgatcagaacaagctgaaacctgagatggacgagaagggcaacctgaccaccgccggctttgcctgctctcagtgtggccagcccctgttcgtgtacaagctggagcaggtgtctgagaagggcaaggcttacaccaactacttcggacggtgcaatgtggccgagcacgaaaagctgatcctgctggcccagctgaagcccgagaaggatagcgacgaagccgtgacatatagcctgggaaagtttgggcagagggccctggatttctacagcattcatgtgaccaaggagtccacccaccccgtgaagcccctggcccagatcgccggaaacagatacgcctccggacctgtgggaaaggccctgagcgacgcatgtatgggcacaatcgcctccttcctgtctaagtaccaggacatcatcatcgaacaccagaaggtggtgaagggcaaccagaagagactggagagcctgcgggagctggccggcaaggaaaacctggaataccctagcgtgaccctgccacctcagcctcacaccaaggagggcgttgatgcctacaacgaagtgatcgcccgggtgcgaatgtgggtgaacctgaacctgtggcagaagctgaagctaagcagagatgatgccaagcctctgctgagactgaagggattcccttcctttcctctggtcgagagacaggccaacgaagtggactggtgggacatggtgtgtaacgtgaagaagctgatcaacgagaaaaaggaggatggcaaggtgttttggcagaatctggctggctacaagagacaggaagccctgagaccatacctgagcagcgaggaagatcggaagaagggaaagaaattcgctcggtaccagctgggcgacctgctgctgcacctggaaaagaagcacggcgaggactggggaaaggtgtacgacgaggcctgggagcggattgacaagaaagtggaaggcctgagcaagcacatcaagctggaagaggaacggagaagcgaggacgcccagagcaaggccgccctgaccgactggctgcgggctaaggccagcttcgtgatcgagggcctgaaggaggccgacaaggacgagttctgcagatgcgagctgaagctgcagaagtggtacggggacctgcggggaaagcccttcgccatcgaagccgagaacagcatcctggacatcagcggcttcagcaagcagtacaactgtgccttcatctggcagaaggacggcgtgaagaagctgaacctgtacctgatcatcaactacttcaagggcggcaagctgcggttcaagaagatcaaacctgaagccttcgaagccaacagattctacaccgtgatcaacaaaaagagcggcgagatcgtgcccatggaggtgaacttcaacttcgacgaccccaacctgatcatcctgcctctggcctttggcaagagacagggcagagaattcatctggaacgacctgctgtccctggaaaccggcagcctgaagctggccaacggaagagtgatcgagaagacactgtacaacagaagaacccggcaggatgagcctgccctgttcgtggccctgaccttcgagcggcgggaggtcctggactcctccaatatcaaaccaatgaacctgatcggcgtggcaagaggcgaaaacatccccgccgtgatcgccctgaccgaccccgagggctgcccactgagccggtttaaggatagcctgggaaacccaacccacatcctgagaatcggcgagagctataaggagaagcagcggaccatccaggccaagaaggaggtggagcagcggagagccggcggctacagccggaagtacgccagcaaagccaagaatctggcagacgatatggtgagaaacaccgctagagatctgctgtactacgccgtgacccaggatgccatgctgatcttcgccaacctgagccggggcttcggccggcagggcaagcggaccttcatggccgagagacagtacacacggatggaggactggctgaccgccaagctggcctacgagggcctgagcaagacctacctgtccaagacactggcccagtacacctccaagacatgcagcaactgtgggtttaccatcaccagcgccgactacgacagggtgctggagaagctgaagaagacagcaacaggctggatgaccacaattaacggcaaggagctgaaggtggagggccagattacctactacaacagatacaagagacagaacgtagtcaaggacctgtccgtcgagctggatagactgagcgaagaatctgtgaacaacgacatctcctcctggacaaagggcagaagcggagaagctctgagcctcctgaagaaaagattctcccatagacccgtgcaggagaagttcgtgtgcctgaactgcggcttcgagacacacgcagccgagcaagccgccctgaacatcgccagatcctggctgttcctgcggagccaggagtacaagaaataccagacaaacaagacaaccggcaacaccgataagagagccttcgtcgagacctggcagtccttttaccggaagaagcttaaggaggtgtggaaacctgccgtgcggtctggcggatctggcggaggctccacaagcgacaaggccctgatggccttccacgacgtggccgtggccttcagccagatggagtgggagctgctgagccccgcccagaggatcctgtacagggaggtgatgctggagaactacagccacctggtgagcctgggcatcgccttcagcaagcccaagctgatcacccagctggagcagggcgccgagccctggagggacggcagcggctgcttcctggacctgtgccccgccgagcccaggaccaccagccccaagaaaaagagaaaagtctaagctgccttctgcggggcttgccttctggccatgcccttcttctctcccttgcacctgtacctcttggtctttgaataaagcctgagtaggaaggctagcaaaaaaaaaaaaaaaaaaaaaaaaaaaaaaaaaaaaaaaaaaaaaaaaaaaaaaaaaaaaaaaaaaaaaaaaaaaaaaaa

SEQ ID NO: 3444 - RNA, 5455 nt, synthetic construct
  source 1..5455: mol_type = other RNA
aggaaataagagagaaaagaagagtaagaagaaatataagagccaccatggcccctaagaagaagcgtaaagtgagccgggtgaacggcagcggcagcggcggcggcatgaaccacgaccaggagttcgacccccctaaggtgtaccctcccgtccccgccgagaagagaaagcccatccgggtcctgagcctgttcgatggcatcgccaccggtctgctggtgctgaaggacctgggcatccaggtggataggtacattgcctccgaggtgtgcgaggactccatcaccgtgggaatggtgcgtcatcagggcaagatcatgtacgtgggcgacgtgcggagcgtgacacagaagcatatccaggagtggggccctttcgacctggtgatcggcggcagcccttgcaatgacctgagcatcgtgaacccagcccggaagggcctgtacgagggaaccggcagactgttcttcgagttttacagactgctgcacgacgcccggcctaaggaaggcgacgaccggcccttcttttggctgttcgagaatgtggtggccatgggagtcagcgacaagcgggatattagccggttcctggagagcaaccccgtgatgatcgatgccaaggaagtgagcgccgcccaccgggccagatacttctggggcaatctgcctggcatgaacagacccctggccagcaccgtgaacgacaagctggagctgcaggagtgcctggagcacggccggatcgccaagttcagcaaggtgagaaccatcaccacccgaagcaacagcatcaaacaaggcaaggaccagcactttcctgtgttcatgaacgagaaggaggacatcctgtggtgtaccgagatggagagagtgttcgggttcccagtccactacacagatgtcagcaacatgtctagactggccagacagagactgctgggaagaagctggtccgtccctgtgatcagacacctgttcgcccctctgaaggagtacttcgcctgcgtgagcagcggcaacagcaacgccaacagccggggccccagcttctctagcggcctggtgccactgtccctgagagggagccacatgggccccatggagatctacaaaaccgtgagcgcctggaagcggcagcctgtgcgcgtgctgagcctgtttcggaatatcgataaagtcctgaaaagcctgggattcctggagagcggctctggctccggcggtggcaccctgaagtacgtggaggatgtgacaaacgtggtcagacgggatgtggagaagtggggccccttcgatctggtgtacggcagcacccaacccctgggcagctcttgtgaccggtgccctggctggtacatgtttcagttccaccggatcctgcagtacgccctgccgagacaggagtcccagcggccattcttttggattttcatggacaacttgctgctgaccgaggatgaccaggaaactaccactcggttcctgcagaccgaagccgtgaccctgcaggacgtgagaggccgggactaccagaacgccatgcgggtgtggtccaacatccctggactgaaaagcaagcacgcacctctgacccctaaagaagaggagtacctgcaggcccaggtgcggagcagaagcaagctggacgcccctaaggtggatctgctggtgaagaattgcctcctgcccctgagagagtacttcaagtatttcagccagaatagtctgcccctgggcggcccaagcagcggcgcccctcctcccagcggcggcagcccagccggctccccaacctctaccgaggagggcacctctgagtccgccacccccgagagcggccctggcacctccaccgagcccagcgagggcagcgcacccggcagccctgccggcagccccacctccacagaggagggaaccagcaccgagcccagcgaaggcagcgccccaggcaccagcaccgagcctagtgagggcggctctggcggcggcagcgcccaggagattaaacggatcaacaagatcagaagaagacttgtgaaagacagcaacaccaagaaggccggcaagacaggccccatgaaaaccctgctggttagagtgatgacacccgatctgagagagcggctggaaaacctgagaaagaagcctgaaaatatcccccagcccatcagcaatacatctagagccaacctgaataagctgctgaccgattacaccgaaatgaagaaggcgatcctgcatgtgtactgggaagagttccagaaggaccctgtgggcctgatgagccgggtggcccagcctgccagcaagaagatcgatcagaacaagctgaaacctgagatggacgagaagggcaacctgaccaccgccggctttgcctgctctcagtgtggccagcccctgttcgtgtacaagctggagcaggtgtctgagaagggcaaggcttacaccaactacttcggacggtgcaatgtggccgagcacgaaaagctgatcctgctggcccagctgaagcccgagaaggatagcgacgaagccgtgacatatagcctgggaaagtttgggcagagggccctggatttctacagcattcatgtgaccaaggagtccacccaccccgtgaagcccctggcccagatcgccggaaacagatacgcctccggacctgtgggaaaggccctgagcgacgcatgtatgggcacaatcgcctccttcctgtctaagtaccaggacatcatcatcgaacaccagaaggtggtgaagggcaaccagaagagactggagagcctgcgggagctggccggcaaggaaaacctggaataccctagcgtgaccctgccacctcagcctcacaccaaggagggcgttgatgcctacaacgaagtgatcgcccgggtgcgaatgtgggtgaacctgaacctgtggcagaagctgaagctaagcagagatgatgccaagcctctgctgagactgaagggattcccttcctttcctctggtcgagagacaggccaacgaagtggactggtgggacatggtgtgtaacgtgaagaagctgatcaacgagaaaaaggaggatggcaaggtgttttggcagaatctggctggctacaagagacaggaagccctgagaccatacctgagcagcgaggaagatcggaagaagggaaagaaattcgctcggtaccagctgggcgacctgctgctgcacctggaaaagaagcacggcgaggactggggaaaggtgtacgacgaggcctgggagcggattgacaagaaagtggaaggcctgagcaagcacatcaagctggaagaggaacggagaagcgaggacgcccagagcaaggccgccctgaccgactggctgcgggctaaggccagcttcgtgatcgagggcctgaaggaggccgacaaggacgagttctgcagatgcgagctgaagctgcagaagtggtacggggacctgcggggaaagcccttcgccatcgaagccgagaacagcatcctggacatcagcggcttcagcaagcagtacaactgtgccttcatctggcagaaggacggcgtgaagaagctgaacctgtacctgatcatcaactacttcaagggcggcaagctgcggttcaagaagatcaaacctgaagccttcgaagccaacagattctacaccgtgatcaacaaaaagagcggcgagatcgtgcccatggaggtgaacttcaacttcgacgaccccaacctgatcatcctgcctctggcctttggcaagagacagggcagagaattcatctggaacgacctgctgtccctggaaaccggcagcctgaagctggccaacggaagagtgatcgagaagacactgtacaacagaagaacccggcaggatgagcctgccctgttcgtggccctgaccttcgagcggcgggaggtcctggactcctccaatatcaaaccaatgaacctgatcggcgtggcaagaggcgaaaacatccccgccgtgatcgccctgaccgaccccgagggctgcccactgagccggtttaaggatagcctgggaaacccaacccacatcctgagaatcggcgagagctataaggagaagcagcggaccatccaggccaagaaggaggtggagcagcggagagccggcggctacagccggaagtacgccagcaaagccaagaatctggcagacgatatggtgagaaacaccgctagagatctgctgtactacgccgtgacccaggatgccatgctgatcttcgccaacctgagccggggcttcggccggcagggcaagcggaccttcatggccgagagacagtacacacggatggaggactggctgaccgccaagctggcctacgagggcctgagcaagacctacctgtccaagacactggcccagtacacctccaagacatgcagcaactgtgggtttaccatcaccagcgccgactacgacagggtgctggagaagctgaagaagacagcaacaggctggatgaccacaattaacggcaaggagctgaaggtggagggccagattacctactacaacagatacaagagacagaacgtagtcaaggacctgtccgtcgagctggatagactgagcgaagaatctgtgaacaacgacatctcctcctggacaaagggcagaagcggagaagctctgagcctcctgaagaaaagattctcccatagacccgtgcaggagaagttcgtgtgcctgaactgcggcttcgagacacacgcagccgagcaagccgccctgaacatcgccagatcctggctgttcctgcggagccaggagtacaagaaataccagacaaacaagacaaccggcaacaccgataagagagccttcgtcgagacctggcagtccttttaccggaagaagcttaaggaggtgtggaaacctgccgtgcggtctggcggatctggcggaggctccacaagcgtgagcttcgaggaggtggccgtgcacttcagcgaggaggagtggagccagctggaccccgcccagaaggccctgcacggcgaggtgatgctggagaacagcaggaacctggccagcctgggctacaacgagcacggcaacaagaactgcaaggagcagtgccagcccgtggaccccaacgagcagaacaggaacttcgccgaccagatgcagaccaagatcgacgagaccaaccagagccagagcgaggtggagaagaccttccacagcacccaccacaccagccccaagaaaaagagaaaagtctaagctgccttctgcggggcttgccttctggccatgcccttcttctctcccttgcacctgtacctcttggtctttgaataaagcctgagtaggaaggctagcaaaaaaaaaaaaaaaaaaaaaaaaaaaaaaaaaaaaaaaaaaaaaaaaaaaaaaaaaaaaaaaaaaaaaaaaaaaaaaaa

SEQ ID NO: 3445 - RNA, 5419 nt, synthetic construct
  source 1..5419: mol_type = other RNA
aggaaataagagagaaaagaagagtaagaagaaatataagagccaccatggcccctaagaagaagcgtaaagtgagccgggtgaacggcagcggcagcggcggcggcatgaaccacgaccaggagttcgacccccctaaggtgtaccctcccgtccccgccgagaagagaaagcccatccgggtcctgagcctgttcgatggcatcgccaccggtctgctggtgctgaaggacctgggcatccaggtggataggtacattgcctccgaggtgtgcgaggactccatcaccgtgggaatggtgcgtcatcagggcaagatcatgtacgtgggcgacgtgcggagcgtgacacagaagcatatccaggagtggggccctttcgacctggtgatcggcggcagcccttgcaatgacctgagcatcgtgaacccagcccggaagggcctgtacgagggaaccggcagactgttcttcgagttttacagactgctgcacgacgcccggcctaaggaaggcgacgaccggcccttcttttggctgttcgagaatgtggtggccatgggagtcagcgacaagcgggatattagccggttcctggagagcaaccccgtgatgatcgatgccaaggaagtgagcgccgcccaccgggccagatacttctggggcaatctgcctggcatgaacagacccctggccagcaccgtgaacgacaagctggagctgcaggagtgcctggagcacggccggatcgccaagttcagcaaggtgagaaccatcaccacccgaagcaacagcatcaaacaaggcaaggaccagcactttcctgtgttcatgaacgagaaggaggacatcctgtggtgtaccgagatggagagagtgttcgggttcccagtccactacacagatgtcagcaacatgtctagactggccagacagagactgctgggaagaagctggtccgtccctgtgatcagacacctgttcgcccctctgaaggagtacttcgcctgcgtgagcagcggcaacagcaacgccaacagccggggccccagcttctctagcggcctggtgccactgtccctgagagggagccacatgggccccatggagatctacaaaaccgtgagcgcctggaagcggcagcctgtgcgcgtgctgagcctgtttcggaatatcgataaagtcctgaaaagcctgggattcctggagagcggctctggctccggcggtggcaccctgaagtacgtggaggatgtgacaaacgtggtcagacgggatgtggagaagtggggccccttcgatctggtgtacggcagcacccaacccctgggcagctcttgtgaccggtgccctggctggtacatgtttcagttccaccggatcctgcagtacgccctgccgagacaggagtcccagcggccattcttttggattttcatggacaacttgctgctgaccgaggatgaccaggaaactaccactcggttcctgcagaccgaagccgtgaccctgcaggacgtgagaggccgggactaccagaacgccatgcgggtgtggtccaacatccctggactgaaaagcaagcacgcacctctgacccctaaagaagaggagtacctgcaggcccaggtgcggagcagaagcaagctggacgcccctaaggtggatctgctggtgaagaattgcctcctgcccctgagagagtacttcaagtatttcagccagaatagtctgcccctgggcggcccaagcagcggcgcccctcctcccagcggcggcagcccagccggctccccaacctctaccgaggagggcacctctgagtccgccacccccgagagcggccctggcacctccaccgagcccagcgagggcagcgcacccggcagccctgccggcagccccacctccacagaggagggaaccagcaccgagcccagcgaaggcagcgccccaggcaccagcaccgagcctagtgagggcggctctggcggcggcagcgcccaggagattaaacggatcaacaagatcagaagaagacttgtgaaagacagcaacaccaagaaggccggcaagacaggccccatgaaaaccctgctggttagagtgatgacacccgatctgagagagcggctggaaaacctgagaaagaagcctgaaaatatcccccagcccatcagcaatacatctagagccaacctgaataagctgctgaccgattacaccgaaatgaagaaggcgatcctgcatgtgtactgggaagagttccagaaggaccctgtgggcctgatgagccgggtggcccagcctgccagcaagaagatcgatcagaacaagctgaaacctgagatggacgagaagggcaacctgaccaccgccggctttgcctgctctcagtgtggccagcccctgttcgtgtacaagctggagcaggtgtctgagaagggcaaggcttacaccaactacttcggacggtgcaatgtggccgagcacgaaaagctgatcctgctggcccagctgaagcccgagaaggatagcgacgaagccgtgacatatagcctgggaaagtttgggcagagggccctggatttctacagcattcatgtgaccaaggagtccacccaccccgtgaagcccctggcccagatcgccggaaacagatacgcctccggacctgtgggaaaggccctgagcgacgcatgtatgggcacaatcgcctccttcctgtctaagtaccaggacatcatcatcgaacaccagaaggtggtgaagggcaaccagaagagactggagagcctgcgggagctggccggcaaggaaaacctggaataccctagcgtgaccctgccacctcagcctcacaccaaggagggcgttgatgcctacaacgaagtgatcgcccgggtgcgaatgtgggtgaacctgaacctgtggcagaagctgaagctaagcagagatgatgccaagcctctgctgagactgaagggattcccttcctttcctctggtcgagagacaggccaacgaagtggactggtgggacatggtgtgtaacgtgaagaagctgatcaacgagaaaaaggaggatggcaaggtgttttggcagaatctggctggctacaagagacaggaagccctgagaccatacctgagcagcgaggaagatcggaagaagggaaagaaattcgctcggtaccagctgggcgacctgctgctgcacctggaaaagaagcacggcgaggactggggaaaggtgtacgacgaggcctgggagcggattgacaagaaagtggaaggcctgagcaagcacatcaagctggaagaggaacggagaagcgaggacgcccagagcaaggccgccctgaccgactggctgcgggctaaggccagcttcgtgatcgagggcctgaaggaggccgacaaggacgagttctgcagatgcgagctgaagctgcagaagtggtacggggacctgcggggaaagcccttcgccatcgaagccgagaacagcatcctggacatcagcggcttcagcaagcagtacaactgtgccttcatctggcagaaggacggcgtgaagaagctgaacctgtacctgatcatcaactacttcaagggcggcaagctgcggttcaagaagatcaaacctgaagccttcgaagccaacagattctacaccgtgatcaacaaaaagagcggcgagatcgtgcccatggaggtgaacttcaacttcgacgaccccaacctgatcatcctgcctctggcctttggcaagagacagggcagagaattcatctggaacgacctgctgtccctggaaaccggcagcctgaagctggccaacggaagagtgatcgagaagacactgtacaacagaagaacccggcaggatgagcctgccctgttcgtggccctgaccttcgagcggcgggaggtcctggactcctccaatatcaaaccaatgaacctgatcggcgtggcaagaggcgaaaacatccccgccgtgatcgccctgaccgaccccgagggctgcccactgagccggtttaaggatagcctgggaaacccaacccacatcctgagaatcggcgagagctataaggagaagcagcggaccatccaggccaagaaggaggtggagcagcggagagccggcggctacagccggaagtacgccagcaaagccaagaatctggcagacgatatggtgagaaacaccgctagagatctgctgtactacgccgtgacccaggatgccatgctgatcttcgccaacctgagccggggcttcggccggcagggcaagcggaccttcatggccgagagacagtacacacggatggaggactggctgaccgccaagctggcctacgagggcctgagcaagacctacctgtccaagacactggcccagtacacctccaagacatgcagcaactgtgggtttaccatcaccagcgccgactacgacagggtgctggagaagctgaagaagacagcaacaggctggatgaccacaattaacggcaaggagctgaaggtggagggccagattacctactacaacagatacaagagacagaacgtagtcaaggacctgtccgtcgagctggatagactgagcgaagaatctgtgaacaacgacatctcctcctggacaaagggcagaagcggagaagctctgagcctcctgaagaaaagattctcccatagacccgtgcaggagaagttcgtgtgcctgaactgcggcttcgagacacacgcagccgagcaagccgccctgaacatcgccagatcctggctgttcctgcggagccaggagtacaagaaataccagacaaacaagacaaccggcaacaccgataagagagccttcgtcgagacctggcagtccttttaccggaagaagcttaaggaggtgtggaaacctgccgtgcggtctggcggatctggcggaggctccacaagcatgatgcaggcccaggagagcctgaccctggaggacgtggccgtggacttcacctgggaggagtggcagttcctgagccccgcccagaaggacctgtacagggacgtgatgctggagaactacagcaacctggtggccgtgggctaccaggccaggaagcccgacgccctgagcaagctggagaggggcgaggagccctgcaccaccgaggacgagatctacgccaggatctgcagcgacagcaccagccccaagaaaaagagaaaagtctaagctgccttctgcggggcttgccttctggccatgcccttcttctctcccttgcacctgtacctcttggtctttgaataaagcctgagtaggaaggctagcaaaaaaaaaaaaaaaaaaaaaaaaaaaaaaaaaaaaaaaaaaaaaaaaaaaaaaaaaaaaaaaaaaaaaaaaaaaaaaaa

SEQ ID NO: 3446 - RNA, 5419 nt, synthetic construct
  source 1..5419: mol_type = other RNA
aggaaataagagagaaaagaagagtaagaagaaatataagagccaccatggcccctaagaagaagcgtaaagtgagccgggtgaacggcagcggcagcggcggcggcatgaaccacgaccaggagttcgacccccctaaggtgtaccctcccgtccccgccgagaagagaaagcccatccgggtcctgagcctgttcgatggcatcgccaccggtctgctggtgctgaaggacctgggcatccaggtggataggtacattgcctccgaggtgtgcgaggactccatcaccgtgggaatggtgcgtcatcagggcaagatcatgtacgtgggcgacgtgcggagcgtgacacagaagcatatccaggagtggggccctttcgacctggtgatcggcggcagcccttgcaatgacctgagcatcgtgaacccagcccggaagggcctgtacgagggaaccggcagactgttcttcgagttttacagactgctgcacgacgcccggcctaaggaaggcgacgaccggcccttcttttggctgttcgagaatgtggtggccatgggagtcagcgacaagcgggatattagccggttcctggagagcaaccccgtgatgatcgatgccaaggaagtgagcgccgcccaccgggccagatacttctggggcaatctgcctggcatgaacagacccctggccagcaccgtgaacgacaagctggagctgcaggagtgcctggagcacggccggatcgccaagttcagcaaggtgagaaccatcaccacccgaagcaacagcatcaaacaaggcaaggaccagcactttcctgtgttcatgaacgagaaggaggacatcctgtggtgtaccgagatggagagagtgttcgggttcccagtccactacacagatgtcagcaacatgtctagactggccagacagagactgctgggaagaagctggtccgtccctgtgatcagacacctgttcgcccctctgaaggagtacttcgcctgcgtgagcagcggcaacagcaacgccaacagccggggccccagcttctctagcggcctggtgccactgtccctgagagggagccacatgggccccatggagatctacaaaaccgtgagcgcctggaagcggcagcctgtgcgcgtgctgagcctgtttcggaatatcgataaagtcctgaaaagcctgggattcctggagagcggctctggctccggcggtggcaccctgaagtacgtggaggatgtgacaaacgtggtcagacgggatgtggagaagtggggccccttcgatctggtgtacggcagcacccaacccctgggcagctcttgtgaccggtgccctggctggtacatgtttcagttccaccggatcctgcagtacgccctgccgagacaggagtcccagcggccattcttttggattttcatggacaacttgctgctgaccgaggatgaccaggaaactaccactcggttcctgcagaccgaagccgtgaccctgcaggacgtgagaggccgggactaccagaacgccatgcgggtgtggtccaacatccctggactgaaaagcaagcacgcacctctgacccctaaagaagaggagtacctgcaggcccaggtgcggagcagaagcaagctggacgcccctaaggtggatctgctggtgaagaattgcctcctgcccctgagagagtacttcaagtatttcagccagaatagtctgcccctgggcggcccaagcagcggcgcccctcctcccagcggcggcagcccagccggctccccaacctctaccgaggagggcacctctgagtccgccacccccgagagcggccctggcacctccaccgagcccagcgagggcagcgcacccggcagccctgccggcagccccacctccacagaggagggaaccagcaccgagcccagcgaaggcagcgccccaggcaccagcaccgagcctagtgagggcggctctggcggcggcagcgcccaggagattaaacggatcaacaagatcagaagaagacttgtgaaagacagcaacaccaagaaggccggcaagacaggccccatgaaaaccctgctggttagagtgatgacacccgatctgagagagcggctggaaaacctgagaaagaagcctgaaaatatcccccagcccatcagcaatacatctagagccaacctgaataagctgctgaccgattacaccgaaatgaagaaggcgatcctgcatgtgtactgggaagagttccagaaggaccctgtgggcctgatgagccgggtggcccagcctgccagcaagaagatcgatcagaacaagctgaaacctgagatggacgagaagggcaacctgaccaccgccggctttgcctgctctcagtgtggccagcccctgttcgtgtacaagctggagcaggtgtctgagaagggcaaggcttacaccaactacttcggacggtgcaatgtggccgagcacgaaaagctgatcctgctggcccagctgaagcccgagaaggatagcgacgaagccgtgacatatagcctgggaaagtttgggcagagggccctggatttctacagcattcatgtgaccaaggagtccacccaccccgtgaagcccctggcccagatcgccggaaacagatacgcctccggacctgtgggaaaggccctgagcgacgcatgtatgggcacaatcgcctccttcctgtctaagtaccaggacatcatcatcgaacaccagaaggtggtgaagggcaaccagaagagactggagagcctgcgggagctggccggcaaggaaaacctggaataccctagcgtgaccctgccacctcagcctcacaccaaggagggcgttgatgcctacaacgaagtgatcgcccgggtgcgaatgtgggtgaacctgaacctgtggcagaagctgaagctaagcagagatgatgccaagcctctgctgagactgaagggattcccttcctttcctctggtcgagagacaggccaacgaagtggactggtgggacatggtgtgtaacgtgaagaagctgatcaacgagaaaaaggaggatggcaaggtgttttggcagaatctggctggctacaagagacaggaagccctgagaccatacctgagcagcgaggaagatcggaagaagggaaagaaattcgctcggtaccagctgggcgacctgctgctgcacctggaaaagaagcacggcgaggactggggaaaggtgtacgacgaggcctgggagcggattgacaagaaagtggaaggcctgagcaagcacatcaagctggaagaggaacggagaagcgaggacgcccagagcaaggccgccctgaccgactggctgcgggctaaggccagcttcgtgatcgagggcctgaaggaggccgacaaggacgagttctgcagatgcgagctgaagctgcagaagtggtacggggacctgcggggaaagcccttcgccatcgaagccgagaacagcatcctggacatcagcggcttcagcaagcagtacaactgtgccttcatctggcagaaggacggcgtgaagaagctgaacctgtacctgatcatcaactacttcaagggcggcaagctgcggttcaagaagatcaaacctgaagccttcgaagccaacagattctacaccgtgatcaacaaaaagagcggcgagatcgtgcccatggaggtgaacttcaacttcgacgaccccaacctgatcatcctgcctctggcctttggcaagagacagggcagagaattcatctggaacgacctgctgtccctggaaaccggcagcctgaagctggccaacggaagagtgatcgagaagacactgtacaacagaagaacccggcaggatgagcctgccctgttcgtggccctgaccttcgagcggcgggaggtcctggactcctccaatatcaaaccaatgaacctgatcggcgtggcaagaggcgaaaacatccccgccgtgatcgccctgaccgaccccgagggctgcccactgagccggtttaaggatagcctgggaaacccaacccacatcctgagaatcggcgagagctataaggagaagcagcggaccatccaggccaagaaggaggtggagcagcggagagccggcggctacagccggaagtacgccagcaaagccaagaatctggcagacgatatggtgagaaacaccgctagagatctgctgtactacgccgtgacccaggatgccatgctgatcttcgccaacctgagccggggcttcggccggcagggcaagcggaccttcatggccgagagacagtacacacggatggaggactggctgaccgccaagctggcctacgagggcctgagcaagacctacctgtccaagacactggcccagtacacctccaagacatgcagcaactgtgggtttaccatcaccagcgccgactacgacagggtgctggagaagctgaagaagacagcaacaggctggatgaccacaattaacggcaaggagctgaaggtggagggccagattacctactacaacagatacaagagacagaacgtagtcaaggacctgtccgtcgagctggatagactgagcgaagaatctgtgaacaacgacatctcctcctggacaaagggcagaagcggagaagctctgagcctcctgaagaaaagattctcccatagacccgtgcaggagaagttcgtgtgcctgaactgcggcttcgagacacacgcagccgagcaagccgccctgaacatcgccagatcctggctgttcctgcggagccaggagtacaagaaataccagacaaacaagacaaccggcaacaccgataagagagccttcgtcgagacctggcagtccttttaccggaagaagcttaaggaggtgtggaaacctgccgtgcggtctggcggatctggcggaggctccacaagccaggagcccgtgaccttcgaggacgtggccgtgtacttcacccagaaccagtgggccaagctggaccccacccagagggccctgtacagggaggtgatgctggagaactacgccaacgtggccagcctggtggccttccccttccccaagcccgacctggtgagccagctggagaggggcgaggtgccctggggccccgacccctgggaggccgaggtgctgaggggcatctgccccggcggcaccagccccaagaaaaagagaaaagtctaagctgccttctgcggggcttgccttctggccatgcccttcttctctcccttgcacctgtacctcttggtctttgaataaagcctgagtaggaaggctagcaaaaaaaaaaaaaaaaaaaaaaaaaaaaaaaaaaaaaaaaaaaaaaaaaaaaaaaaaaaaaaaaaaaaaaaaaaaaaaaa

SEQ ID NO: 3447 - RNA, 5419 nt, synthetic construct
  source 1..5419: mol_type = other RNA
aggaaataagagagaaaagaagagtaagaagaaatataagagccaccatggcccctaagaagaagcgtaaagtgagccgggtgaacggcagcggcagcggcggcggcatgaaccacgaccaggagttcgacccccctaaggtgtaccctcccgtccccgccgagaagagaaagcccatccgggtcctgagcctgttcgatggcatcgccaccggtctgctggtgctgaaggacctgggcatccaggtggataggtacattgcctccgaggtgtgcgaggactccatcaccgtgggaatggtgcgtcatcagggcaagatcatgtacgtgggcgacgtgcggagcgtgacacagaagcatatccaggagtggggccctttcgacctggtgatcggcggcagcccttgcaatgacctgagcatcgtgaacccagcccggaagggcctgtacgagggaaccggcagactgttcttcgagttttacagactgctgcacgacgcccggcctaaggaaggcgacgaccggcccttcttttggctgttcgagaatgtggtggccatgggagtcagcgacaagcgggatattagccggttcctggagagcaaccccgtgatgatcgatgccaaggaagtgagcgccgcccaccgggccagatacttctggggcaatctgcctggcatgaacagacccctggccagcaccgtgaacgacaagctggagctgcaggagtgcctggagcacggccggatcgccaagttcagcaaggtgagaaccatcaccacccgaagcaacagcatcaaacaaggcaaggaccagcactttcctgtgttcatgaacgagaaggaggacatcctgtggtgtaccgagatggagagagtgttcgggttcccagtccactacacagatgtcagcaacatgtctagactggccagacagagactgctgggaagaagctggtccgtccctgtgatcagacacctgttcgcccctctgaaggagtacttcgcctgcgtgagcagcggcaacagcaacgccaacagccggggccccagcttctctagcggcctggtgccactgtccctgagagggagccacatgggccccatggagatctacaaaaccgtgagcgcctggaagcggcagcctgtgcgcgtgctgagcctgtttcggaatatcgataaagtcctgaaaagcctgggattcctggagagcggctctggctccggcggtggcaccctgaagtacgtggaggatgtgacaaacgtggtcagacgggatgtggagaagtggggccccttcgatctggtgtacggcagcacccaacccctgggcagctcttgtgaccggtgccctggctggtacatgtttcagttccaccggatcctgcagtacgccctgccgagacaggagtcccagcggccattcttttggattttcatggacaacttgctgctgaccgaggatgaccaggaaactaccactcggttcctgcagaccgaagccgtgaccctgcaggacgtgagaggccgggactaccagaacgccatgcgggtgtggtccaacatccctggactgaaaagcaagcacgcacctctgacccctaaagaagaggagtacctgcaggcccaggtgcggagcagaagcaagctggacgcccctaaggtggatctgctggtgaagaattgcctcctgcccctgagagagtacttcaagtatttcagccagaatagtctgcccctgggcggcccaagcagcggcgcccctcctcccagcggcggcagcccagccggctccccaacctctaccgaggagggcacctctgagtccgccacccccgagagcggccctggcacctccaccgagcccagcgagggcagcgcacccggcagccctgccggcagccccacctccacagaggagggaaccagcaccgagcccagcgaaggcagcgccccaggcaccagcaccgagcctagtgagggcggctctggcggcggcagcgcccaggagattaaacggatcaacaagatcagaagaagacttgtgaaagacagcaacaccaagaaggccggcaagacaggccccatgaaaaccctgctggttagagtgatgacacccgatctgagagagcggctggaaaacctgagaaagaagcctgaaaatatcccccagcccatcagcaatacatctagagccaacctgaataagctgctgaccgattacaccgaaatgaagaaggcgatcctgcatgtgtactgggaagagttccagaaggaccctgtgggcctgatgagccgggtggcccagcctgccagcaagaagatcgatcagaacaagctgaaacctgagatggacgagaagggcaacctgaccaccgccggctttgcctgctctcagtgtggccagcccctgttcgtgtacaagctggagcaggtgtctgagaagggcaaggcttacaccaactacttcggacggtgcaatgtggccgagcacgaaaagctgatcctgctggcccagctgaagcccgagaaggatagcgacgaagccgtgacatatagcctgggaaagtttgggcagagggccctggatttctacagcattcatgtgaccaaggagtccacccaccccgtgaagcccctggcccagatcgccggaaacagatacgcctccggacctgtgggaaaggccctgagcgacgcatgtatgggcacaatcgcctccttcctgtctaagtaccaggacatcatcatcgaacaccagaaggtggtgaagggcaaccagaagagactggagagcctgcgggagctggccggcaaggaaaacctggaataccctagcgtgaccctgccacctcagcctcacaccaaggagggcgttgatgcctacaacgaagtgatcgcccgggtgcgaatgtgggtgaacctgaacctgtggcagaagctgaagctaagcagagatgatgccaagcctctgctgagactgaagggattcccttcctttcctctggtcgagagacaggccaacgaagtggactggtgggacatggtgtgtaacgtgaagaagctgatcaacgagaaaaaggaggatggcaaggtgttttggcagaatctggctggctacaagagacaggaagccctgagaccatacctgagcagcgaggaagatcggaagaagggaaagaaattcgctcggtaccagctgggcgacctgctgctgcacctggaaaagaagcacggcgaggactggggaaaggtgtacgacgaggcctgggagcggattgacaagaaagtggaaggcctgagcaagcacatcaagctggaagaggaacggagaagcgaggacgcccagagcaaggccgccctgaccgactggctgcgggctaaggccagcttcgtgatcgagggcctgaaggaggccgacaaggacgagttctgcagatgcgagctgaagctgcagaagtggtacggggacctgcggggaaagcccttcgccatcgaagccgagaacagcatcctggacatcagcggcttcagcaagcagtacaactgtgccttcatctggcagaaggacggcgtgaagaagctgaacctgtacctgatcatcaactacttcaagggcggcaagctgcggttcaagaagatcaaacctgaagccttcgaagccaacagattctacaccgtgatcaacaaaaagagcggcgagatcgtgcccatggaggtgaacttcaacttcgacgaccccaacctgatcatcctgcctctggcctttggcaagagacagggcagagaattcatctggaacgacctgctgtccctggaaaccggcagcctgaagctggccaacggaagagtgatcgagaagacactgtacaacagaagaacccggcaggatgagcctgccctgttcgtggccctgaccttcgagcggcgggaggtcctggactcctccaatatcaaaccaatgaacctgatcggcgtggcaagaggcgaaaacatccccgccgtgatcgccctgaccgaccccgagggctgcccactgagccggtttaaggatagcctgggaaacccaacccacatcctgagaatcggcgagagctataaggagaagcagcggaccatccaggccaagaaggaggtggagcagcggagagccggcggctacagccggaagtacgccagcaaagccaagaatctggcagacgatatggtgagaaacaccgctagagatctgctgtactacgccgtgacccaggatgccatgctgatcttcgccaacctgagccggggcttcggccggcagggcaagcggaccttcatggccgagagacagtacacacggatggaggactggctgaccgccaagctggcctacgagggcctgagcaagacctacctgtccaagacactggcccagtacacctccaagacatgcagcaactgtgggtttaccatcaccagcgccgactacgacagggtgctggagaagctgaagaagacagcaacaggctggatgaccacaattaacggcaaggagctgaaggtggagggccagattacctactacaacagatacaagagacagaacgtagtcaaggacctgtccgtcgagctggatagactgagcgaagaatctgtgaacaacgacatctcctcctggacaaagggcagaagcggagaagctctgagcctcctgaagaaaagattctcccatagacccgtgcaggagaagttcgtgtgcctgaactgcggcttcgagacacacgcagccgagcaagccgccctgaacatcgccagatcctggctgttcctgcggagccaggagtacaagaaataccagacaaacaagacaaccggcaacaccgataagagagccttcgtcgagacctggcagtccttttaccggaagaagcttaaggaggtgtggaaacctgccgtgcggtctggcggatctggcggaggctccacaagcgagcccggcaccgtgagcttcggcgacgtggccgtgtacttcagcagggaggagtggggctgcctgaggcccgcccagagggccctgtacagggacgtgatgagggagacctacagccacctgggcgccctgggcgtgggcggcagcaagcccgccctgatcagctgggtggaggaggaggccgagctgtggggccccgccgcccaggaccccgaggtggccaagaggcccaccgaggccgacaccagccccaagaaaaagagaaaagtctaagctgccttctgcggggcttgccttctggccatgcccttcttctctcccttgcacctgtacctcttggtctttgaataaagcctgagtaggaaggctagcaaaaaaaaaaaaaaaaaaaaaaaaaaaaaaaaaaaaaaaaaaaaaaaaaaaaaaaaaaaaaaaaaaaaaaaaaaaaaaaa

SEQ ID NO: 3448 - RNA, 5419 nt, synthetic construct
  source 1..5419: mol_type = other RNA
aggaaataagagagaaaagaagagtaagaagaaatataagagccaccatggcccctaagaagaagcgtaaagtgagccgggtgaacggcagcggcagcggcggcggcatgaaccacgaccaggagttcgacccccctaaggtgtaccctcccgtccccgccgagaagagaaagcccatccgggtcctgagcctgttcgatggcatcgccaccggtctgctggtgctgaaggacctgggcatccaggtggataggtacattgcctccgaggtgtgcgaggactccatcaccgtgggaatggtgcgtcatcagggcaagatcatgtacgtgggcgacgtgcggagcgtgacacagaagcatatccaggagtggggccctttcgacctggtgatcggcggcagcccttgcaatgacctgagcatcgtgaacccagcccggaagggcctgtacgagggaaccggcagactgttcttcgagttttacagactgctgcacgacgcccggcctaaggaaggcgacgaccggcccttcttttggctgttcgagaatgtggtggccatgggagtcagcgacaagcgggatattagccggttcctggagagcaaccccgtgatgatcgatgccaaggaagtgagcgccgcccaccgggccagatacttctggggcaatctgcctggcatgaacagacccctggccagcaccgtgaacgacaagctggagctgcaggagtgcctggagcacggccggatcgccaagttcagcaaggtgagaaccatcaccacccgaagcaacagcatcaaacaaggcaaggaccagcactttcctgtgttcatgaacgagaaggaggacatcctgtggtgtaccgagatggagagagtgttcgggttcccagtccactacacagatgtcagcaacatgtctagactggccagacagagactgctgggaagaagctggtccgtccctgtgatcagacacctgttcgcccctctgaaggagtacttcgcctgcgtgagcagcggcaacagcaacgccaacagccggggccccagcttctctagcggcctggtgccactgtccctgagagggagccacatgggccccatggagatctacaaaaccgtgagcgcctggaagcggcagcctgtgcgcgtgctgagcctgtttcggaatatcgataaagtcctgaaaagcctgggattcctggagagcggctctggctccggcggtggcaccctgaagtacgtggaggatgtgacaaacgtggtcagacgggatgtggagaagtggggccccttcgatctggtgtacggcagcacccaacccctgggcagctcttgtgaccggtgccctggctggtacatgtttcagttccaccggatcctgcagtacgccctgccgagacaggagtcccagcggccattcttttggattttcatggacaacttgctgctgaccgaggatgaccaggaaactaccactcggttcctgcagaccgaagccgtgaccctgcaggacgtgagaggccgggactaccagaacgccatgcgggtgtggtccaacatccctggactgaaaagcaagcacgcacctctgacccctaaagaagaggagtacctgcaggcccaggtgcggagcagaagcaagctggacgcccctaaggtggatctgctggtgaagaattgcctcctgcccctgagagagtacttcaagtatttcagccagaatagtctgcccctgggcggcccaagcagcggcgcccctcctcccagcggcggcagcccagccggctccccaacctctaccgaggagggcacctctgagtccgccacccccgagagcggccctggcacctccaccgagcccagcgagggcagcgcacccggcagccctgccggcagccccacctccacagaggagggaaccagcaccgagcccagcgaaggcagcgccccaggcaccagcaccgagcctagtgagggcggctctggcggcggcagcgcccaggagattaaacggatcaacaagatcagaagaagacttgtgaaagacagcaacaccaagaaggccggcaagacaggccccatgaaaaccctgctggttagagtgatgacacccgatctgagagagcggctggaaaacctgagaaagaagcctgaaaatatcccccagcccatcagcaatacatctagagccaacctgaataagctgctgaccgattacaccgaaatgaagaaggcgatcctgcatgtgtactgggaagagttccagaaggaccctgtgggcctgatgagccgggtggcccagcctgccagcaagaagatcgatcagaacaagctgaaacctgagatggacgagaagggcaacctgaccaccgccggctttgcctgctctcagtgtggccagcccctgttcgtgtacaagctggagcaggtgtctgagaagggcaaggcttacaccaactacttcggacggtgcaatgtggccgagcacgaaaagctgatcctgctggcccagctgaagcccgagaaggatagcgacgaagccgtgacatatagcctgggaaagtttgggcagagggccctggatttctacagcattcatgtgaccaaggagtccacccaccccgtgaagcccctggcccagatcgccggaaacagatacgcctccggacctgtgggaaaggccctgagcgacgcatgtatgggcacaatcgcctccttcctgtctaagtaccaggacatcatcatcgaacaccagaaggtggtgaagggcaaccagaagagactggagagcctgcgggagctggccggcaaggaaaacctggaataccctagcgtgaccctgccacctcagcctcacaccaaggagggcgttgatgcctacaacgaagtgatcgcccgggtgcgaatgtgggtgaacctgaacctgtggcagaagctgaagctaagcagagatgatgccaagcctctgctgagactgaagggattcccttcctttcctctggtcgagagacaggccaacgaagtggactggtgggacatggtgtgtaacgtgaagaagctgatcaacgagaaaaaggaggatggcaaggtgttttggcagaatctggctggctacaagagacaggaagccctgagaccatacctgagcagcgaggaagatcggaagaagggaaagaaattcgctcggtaccagctgggcgacctgctgctgcacctggaaaagaagcacggcgaggactggggaaaggtgtacgacgaggcctgggagcggattgacaagaaagtggaaggcctgagcaagcacatcaagctggaagaggaacggagaagcgaggacgcccagagcaaggccgccctgaccgactggctgcgggctaaggccagcttcgtgatcgagggcctgaaggaggccgacaaggacgagttctgcagatgcgagctgaagctgcagaagtggtacggggacctgcggggaaagcccttcgccatcgaagccgagaacagcatcctggacatcagcggcttcagcaagcagtacaactgtgccttcatctggcagaaggacggcgtgaagaagctgaacctgtacctgatcatcaactacttcaagggcggcaagctgcggttcaagaagatcaaacctgaagccttcgaagccaacagattctacaccgtgatcaacaaaaagagcggcgagatcgtgcccatggaggtgaacttcaacttcgacgaccccaacctgatcatcctgcctctggcctttggcaagagacagggcagagaattcatctggaacgacctgctgtccctggaaaccggcagcctgaagctggccaacggaagagtgatcgagaagacactgtacaacagaagaacccggcaggatgagcctgccctgttcgtggccctgaccttcgagcggcgggaggtcctggactcctccaatatcaaaccaatgaacctgatcggcgtggcaagaggcgaaaacatccccgccgtgatcgccctgaccgaccccgagggctgcccactgagccggtttaaggatagcctgggaaacccaacccacatcctgagaatcggcgagagctataaggagaagcagcggaccatccaggccaagaaggaggtggagcagcggagagccggcggctacagccggaagtacgccagcaaagccaagaatctggcagacgatatggtgagaaacaccgctagagatctgctgtactacgccgtgacccaggatgccatgctgatcttcgccaacctgagccggggcttcggccggcagggcaagcggaccttcatggccgagagacagtacacacggatggaggactggctgaccgccaagctggcctacgagggcctgagcaagacctacctgtccaagacactggcccagtacacctccaagacatgcagcaactgtgggtttaccatcaccagcgccgactacgacagggtgctggagaagctgaagaagacagcaacaggctggatgaccacaattaacggcaaggagctgaaggtggagggccagattacctactacaacagatacaagagacagaacgtagtcaaggacctgtccgtcgagctggatagactgagcgaagaatctgtgaacaacgacatctcctcctggacaaagggcagaagcggagaagctctgagcctcctgaagaaaagattctcccatagacccgtgcaggagaagttcgtgtgcctgaactgcggcttcgagacacacgcagccgagcaagccgccctgaacatcgccagatcctggctgttcctgcggagccaggagtacaagaaataccagacaaacaagacaaccggcaacaccgataagagagccttcgtcgagacctggcagtccttttaccggaagaagcttaaggaggtgtggaaacctgccgtgcggtctggcggatctggcggaggctccacaagcaagcccggcgccgtgagcttcgccgacgtggccgtgtacttcagccccgaggagtggggctgcctgaggcccgcccagagggccctgtacagggaggtgatgagggagacctacggcctgctgggcgccctgggcgtgggcggcgccaagcccgccctgatcagctgggtggaggaggaggccgagctgtggggccccggcgcccaggaccccgaggtggccatgtgccagacccaggccgacaccagccccaagaaaaagagaaaagtctaagctgccttctgcggggcttgccttctggccatgcccttcttctctcccttgcacctgtacctcttggtctttgaataaagcctgagtaggaaggctagcaaaaaaaaaaaaaaaaaaaaaaaaaaaaaaaaaaaaaaaaaaaaaaaaaaaaaaaaaaaaaaaaaaaaaaaaaaaaaaaa

SEQ ID NO: 3449 - RNA, 5419 nt, synthetic construct
  source 1..5419: mol_type = other RNA
aggaaataagagagaaaagaagagtaagaagaaatataagagccaccatggcccctaagaagaagcgtaaagtgagccgggtgaacggcagcggcagcggcggcggcatgaaccacgaccaggagttcgacccccctaaggtgtaccctcccgtccccgccgagaagagaaagcccatccgggtcctgagcctgttcgatggcatcgccaccggtctgctggtgctgaaggacctgggcatccaggtggataggtacattgcctccgaggtgtgcgaggactccatcaccgtgggaatggtgcgtcatcagggcaagatcatgtacgtgggcgacgtgcggagcgtgacacagaagcatatccaggagtggggccctttcgacctggtgatcggcggcagcccttgcaatgacctgagcatcgtgaacccagcccggaagggcctgtacgagggaaccggcagactgttcttcgagttttacagactgctgcacgacgcccggcctaaggaaggcgacgaccggcccttcttttggctgttcgagaatgtggtggccatgggagtcagcgacaagcgggatattagccggttcctggagagcaaccccgtgatgatcgatgccaaggaagtgagcgccgcccaccgggccagatacttctggggcaatctgcctggcatgaacagacccctggccagcaccgtgaacgacaagctggagctgcaggagtgcctggagcacggccggatcgccaagttcagcaaggtgagaaccatcaccacccgaagcaacagcatcaaacaaggcaaggaccagcactttcctgtgttcatgaacgagaaggaggacatcctgtggtgtaccgagatggagagagtgttcgggttcccagtccactacacagatgtcagcaacatgtctagactggccagacagagactgctgggaagaagctggtccgtccctgtgatcagacacctgttcgcccctctgaaggagtacttcgcctgcgtgagcagcggcaacagcaacgccaacagccggggccccagcttctctagcggcctggtgccactgtccctgagagggagccacatgggccccatggagatctacaaaaccgtgagcgcctggaagcggcagcctgtgcgcgtgctgagcctgtttcggaatatcgataaagtcctgaaaagcctgggattcctggagagcggctctggctccggcggtggcaccctgaagtacgtggaggatgtgacaaacgtggtcagacgggatgtggagaagtggggccccttcgatctggtgtacggcagcacccaacccctgggcagctcttgtgaccggtgccctggctggtacatgtttcagttccaccggatcctgcagtacgccctgccgagacaggagtcccagcggccattcttttggattttcatggacaacttgctgctgaccgaggatgaccaggaaactaccactcggttcctgcagaccgaagccgtgaccctgcaggacgtgagaggccgggactaccagaacgccatgcgggtgtggtccaacatccctggactgaaaagcaagcacgcacctctgacccctaaagaagaggagtacctgcaggcccaggtgcggagcagaagcaagctggacgcccctaaggtggatctgctggtgaagaattgcctcctgcccctgagagagtacttcaagtatttcagccagaatagtctgcccctgggcggcccaagcagcggcgcccctcctcccagcggcggcagcccagccggctccccaacctctaccgaggagggcacctctgagtccgccacccccgagagcggccctggcacctccaccgagcccagcgagggcagcgcacccggcagccctgccggcagccccacctccacagaggagggaaccagcaccgagcccagcgaaggcagcgccccaggcaccagcaccgagcctagtgagggcggctctggcggcggcagcgcccaggagattaaacggatcaacaagatcagaagaagacttgtgaaagacagcaacaccaagaaggccggcaagacaggccccatgaaaaccctgctggttagagtgatgacacccgatctgagagagcggctggaaaacctgagaaagaagcctgaaaatatcccccagcccatcagcaatacatctagagccaacctgaataagctgctgaccgattacaccgaaatgaagaaggcgatcctgcatgtgtactgggaagagttccagaaggaccctgtgggcctgatgagccgggtggcccagcctgccagcaagaagatcgatcagaacaagctgaaacctgagatggacgagaagggcaacctgaccaccgccggctttgcctgctctcagtgtggccagcccctgttcgtgtacaagctggagcaggtgtctgagaagggcaaggcttacaccaactacttcggacggtgcaatgtggccgagcacgaaaagctgatcctgctggcccagctgaagcccgagaaggatagcgacgaagccgtgacatatagcctgggaaagtttgggcagagggccctggatttctacagcattcatgtgaccaaggagtccacccaccccgtgaagcccctggcccagatcgccggaaacagatacgcctccggacctgtgggaaaggccctgagcgacgcatgtatgggcacaatcgcctccttcctgtctaagtaccaggacatcatcatcgaacaccagaaggtggtgaagggcaaccagaagagactggagagcctgcgggagctggccggcaaggaaaacctggaataccctagcgtgaccctgccacctcagcctcacaccaaggagggcgttgatgcctacaacgaagtgatcgcccgggtgcgaatgtgggtgaacctgaacctgtggcagaagctgaagctaagcagagatgatgccaagcctctgctgagactgaagggattcccttcctttcctctggtcgagagacaggccaacgaagtggactggtgggacatggtgtgtaacgtgaagaagctgatcaacgagaaaaaggaggatggcaaggtgttttggcagaatctggctggctacaagagacaggaagccctgagaccatacctgagcagcgaggaagatcggaagaagggaaagaaattcgctcggtaccagctgggcgacctgctgctgcacctggaaaagaagcacggcgaggactggggaaaggtgtacgacgaggcctgggagcggattgacaagaaagtggaaggcctgagcaagcacatcaagctggaagaggaacggagaagcgaggacgcccagagcaaggccgccctgaccgactggctgcgggctaaggccagcttcgtgatcgagggcctgaaggaggccgacaaggacgagttctgcagatgcgagctgaagctgcagaagtggtacggggacctgcggggaaagcccttcgccatcgaagccgagaacagcatcctggacatcagcggcttcagcaagcagtacaactgtgccttcatctggcagaaggacggcgtgaagaagctgaacctgtacctgatcatcaactacttcaagggcggcaagctgcggttcaagaagatcaaacctgaagccttcgaagccaacagattctacaccgtgatcaacaaaaagagcggcgagatcgtgcccatggaggtgaacttcaacttcgacgaccccaacctgatcatcctgcctctggcctttggcaagagacagggcagagaattcatctggaacgacctgctgtccctggaaaccggcagcctgaagctggccaacggaagagtgatcgagaagacactgtacaacagaagaacccggcaggatgagcctgccctgttcgtggccctgaccttcgagcggcgggaggtcctggactcctccaatatcaaaccaatgaacctgatcggcgtggcaagaggcgaaaacatccccgccgtgatcgccctgaccgaccccgagggctgcccactgagccggtttaaggatagcctgggaaacccaacccacatcctgagaatcggcgagagctataaggagaagcagcggaccatccaggccaagaaggaggtggagcagcggagagccggcggctacagccggaagtacgccagcaaagccaagaatctggcagacgatatggtgagaaacaccgctagagatctgctgtactacgccgtgacccaggatgccatgctgatcttcgccaacctgagccggggcttcggccggcagggcaagcggaccttcatggccgagagacagtacacacggatggaggactggctgaccgccaagctggcctacgagggcctgagcaagacctacctgtccaagacactggcccagtacacctccaagacatgcagcaactgtgggtttaccatcaccagcgccgactacgacagggtgctggagaagctgaagaagacagcaacaggctggatgaccacaattaacggcaaggagctgaaggtggagggccagattacctactacaacagatacaagagacagaacgtagtcaaggacctgtccgtcgagctggatagactgagcgaagaatctgtgaacaacgacatctcctcctggacaaagggcagaagcggagaagctctgagcctcctgaagaaaagattctcccatagacccgtgcaggagaagttcgtgtgcctgaactgcggcttcgagacacacgcagccgagcaagccgccctgaacatcgccagatcctggctgttcctgcggagccaggagtacaagaaataccagacaaacaagacaaccggcaacaccgataagagagccttcgtcgagacctggcagtccttttaccggaagaagcttaaggaggtgtggaaacctgccgtgcggtctggcggatctggcggaggctccacaagcgcccaggaggtggtgaccttcaaggacgtggccgtggacttcaccagggaggagtggtgcctgctgagccccccccagaaggagctgtacaaggaggtgatgctggagaacgcccagaacctgctgagcgtgggcctgcccggcccccccgaggacgtgatcagctacctgaagcagaggaaggacccctggatgctggagcaggagggcctgaggagctgctgccccgagggcgagatcaggaccagccccaagaaaaagagaaaagtctaagctgccttctgcggggcttgccttctggccatgcccttcttctctcccttgcacctgtacctcttggtctttgaataaagcctgagtaggaaggctagcaaaaaaaaaaaaaaaaaaaaaaaaaaaaaaaaaaaaaaaaaaaaaaaaaaaaaaaaaaaaaaaaaaaaaaaaaaaaaaaa

SEQ ID NO: 3450 - RNA, 5419 nt, synthetic construct
  source 1..5419: mol_type = other RNA
aggaaataagagagaaaagaagagtaagaagaaatataagagccaccatggcccctaagaagaagcgtaaagtgagccgggtgaacggcagcggcagcggcggcggcatgaaccacgaccaggagttcgacccccctaaggtgtaccctcccgtccccgccgagaagagaaagcccatccgggtcctgagcctgttcgatggcatcgccaccggtctgctggtgctgaaggacctgggcatccaggtggataggtacattgcctccgaggtgtgcgaggactccatcaccgtgggaatggtgcgtcatcagggcaagatcatgtacgtgggcgacgtgcggagcgtgacacagaagcatatccaggagtggggccctttcgacctggtgatcggcggcagcccttgcaatgacctgagcatcgtgaacccagcccggaagggcctgtacgagggaaccggcagactgttcttcgagttttacagactgctgcacgacgcccggcctaaggaaggcgacgaccggcccttcttttggctgttcgagaatgtggtggccatgggagtcagcgacaagcgggatattagccggttcctggagagcaaccccgtgatgatcgatgccaaggaagtgagcgccgcccaccgggccagatacttctggggcaatctgcctggcatgaacagacccctggccagcaccgtgaacgacaagctggagctgcaggagtgcctggagcacggccggatcgccaagttcagcaaggtgagaaccatcaccacccgaagcaacagcatcaaacaaggcaaggaccagcactttcctgtgttcatgaacgagaaggaggacatcctgtggtgtaccgagatggagagagtgttcgggttcccagtccactacacagatgtcagcaacatgtctagactggccagacagagactgctgggaagaagctggtccgtccctgtgatcagacacctgttcgcccctctgaaggagtacttcgcctgcgtgagcagcggcaacagcaacgccaacagccggggccccagcttctctagcggcctggtgccactgtccctgagagggagccacatgggccccatggagatctacaaaaccgtgagcgcctggaagcggcagcctgtgcgcgtgctgagcctgtttcggaatatcgataaagtcctgaaaagcctgggattcctggagagcggctctggctccggcggtggcaccctgaagtacgtggaggatgtgacaaacgtggtcagacgggatgtggagaagtggggccccttcgatctggtgtacggcagcacccaacccctgggcagctcttgtgaccggtgccctggctggtacatgtttcagttccaccggatcctgcagtacgccctgccgagacaggagtcccagcggccattcttttggattttcatggacaacttgctgctgaccgaggatgaccaggaaactaccactcggttcctgcagaccgaagccgtgaccctgcaggacgtgagaggccgggactaccagaacgccatgcgggtgtggtccaacatccctggactgaaaagcaagcacgcacctctgacccctaaagaagaggagtacctgcaggcccaggtgcggagcagaagcaagctggacgcccctaaggtggatctgctggtgaagaattgcctcctgcccctgagagagtacttcaagtatttcagccagaatagtctgcccctgggcggcccaagcagcggcgcccctcctcccagcggcggcagcccagccggctccccaacctctaccgaggagggcacctctgagtccgccacccccgagagcggccctggcacctccaccgagcccagcgagggcagcgcacccggcagccctgccggcagccccacctccacagaggagggaaccagcaccgagcccagcgaaggcagcgccccaggcaccagcaccgagcctagtgagggcggctctggcggcggcagcgcccaggagattaaacggatcaacaagatcagaagaagacttgtgaaagacagcaacaccaagaaggccggcaagacaggccccatgaaaaccctgctggttagagtgatgacacccgatctgagagagcggctggaaaacctgagaaagaagcctgaaaatatcccccagcccatcagcaatacatctagagccaacctgaataagctgctgaccgattacaccgaaatgaagaaggcgatcctgcatgtgtactgggaagagttccagaaggaccctgtgggcctgatgagccgggtggcccagcctgccagcaagaagatcgatcagaacaagctgaaacctgagatggacgagaagggcaacctgaccaccgccggctttgcctgctctcagtgtggccagcccctgttcgtgtacaagctggagcaggtgtctgagaagggcaaggcttacaccaactacttcggacggtgcaatgtggccgagcacgaaaagctgatcctgctggcccagctgaagcccgagaaggatagcgacgaagccgtgacatatagcctgggaaagtttgggcagagggccctggatttctacagcattcatgtgaccaaggagtccacccaccccgtgaagcccctggcccagatcgccggaaacagatacgcctccggacctgtgggaaaggccctgagcgacgcatgtatgggcacaatcgcctccttcctgtctaagtaccaggacatcatcatcgaacaccagaaggtggtgaagggcaaccagaagagactggagagcctgcgggagctggccggcaaggaaaacctggaataccctagcgtgaccctgccacctcagcctcacaccaaggagggcgttgatgcctacaacgaagtgatcgcccgggtgcgaatgtgggtgaacctgaacctgtggcagaagctgaagctaagcagagatgatgccaagcctctgctgagactgaagggattcccttcctttcctctggtcgagagacaggccaacgaagtggactggtgggacatggtgtgtaacgtgaagaagctgatcaacgagaaaaaggaggatggcaaggtgttttggcagaatctggctggctacaagagacaggaagccctgagaccatacctgagcagcgaggaagatcggaagaagggaaagaaattcgctcggtaccagctgggcgacctgctgctgcacctggaaaagaagcacggcgaggactggggaaaggtgtacgacgaggcctgggagcggattgacaagaaagtggaaggcctgagcaagcacatcaagctggaagaggaacggagaagcgaggacgcccagagcaaggccgccctgaccgactggctgcgggctaaggccagcttcgtgatcgagggcctgaaggaggccgacaaggacgagttctgcagatgcgagctgaagctgcagaagtggtacggggacctgcggggaaagcccttcgccatcgaagccgagaacagcatcctggacatcagcggcttcagcaagcagtacaactgtgccttcatctggcagaaggacggcgtgaagaagctgaacctgtacctgatcatcaactacttcaagggcggcaagctgcggttcaagaagatcaaacctgaagccttcgaagccaacagattctacaccgtgatcaacaaaaagagcggcgagatcgtgcccatggaggtgaacttcaacttcgacgaccccaacctgatcatcctgcctctggcctttggcaagagacagggcagagaattcatctggaacgacctgctgtccctggaaaccggcagcctgaagctggccaacggaagagtgatcgagaagacactgtacaacagaagaacccggcaggatgagcctgccctgttcgtggccctgaccttcgagcggcgggaggtcctggactcctccaatatcaaaccaatgaacctgatcggcgtggcaagaggcgaaaacatccccgccgtgatcgccctgaccgaccccgagggctgcccactgagccggtttaaggatagcctgggaaacccaacccacatcctgagaatcggcgagagctataaggagaagcagcggaccatccaggccaagaaggaggtggagcagcggagagccggcggctacagccggaagtacgccagcaaagccaagaatctggcagacgatatggtgagaaacaccgctagagatctgctgtactacgccgtgacccaggatgccatgctgatcttcgccaacctgagccggggcttcggccggcagggcaagcggaccttcatggccgagagacagtacacacggatggaggactggctgaccgccaagctggcctacgagggcctgagcaagacctacctgtccaagacactggcccagtacacctccaagacatgcagcaactgtgggtttaccatcaccagcgccgactacgacagggtgctggagaagctgaagaagacagcaacaggctggatgaccacaattaacggcaaggagctgaaggtggagggccagattacctactacaacagatacaagagacagaacgtagtcaaggacctgtccgtcgagctggatagactgagcgaagaatctgtgaacaacgacatctcctcctggacaaagggcagaagcggagaagctctgagcctcctgaagaaaagattctcccatagacccgtgcaggagaagttcgtgtgcctgaactgcggcttcgagacacacgcagccgagcaagccgccctgaacatcgccagatcctggctgttcctgcggagccaggagtacaagaaataccagacaaacaagacaaccggcaacaccgataagagagccttcgtcgagacctggcagtccttttaccggaagaagcttaaggaggtgtggaaacctgccgtgcggtctggcggatctggcggaggctccacaagcgccaaggcccccgtgaccttcggcgacctggccatctacttcagccaggaggagtgggagtggctgagccccatccagaaggacctgtacgaggacgtgatgctggagaactaccagaacctggtgagcctgggcctgagcttcaggaggcccaacgtgatcagcctgctggagaagggcaaggccccctggatggtggaccccgtgaagaggaggaggggcctggacctgggcagcaagtgcaccagccccaagaaaaagagaaaagtctaagctgccttctgcggggcttgccttctggccatgcccttcttctctcccttgcacctgtacctcttggtctttgaataaagcctgagtaggaaggctagcaaaaaaaaaaaaaaaaaaaaaaaaaaaaaaaaaaaaaaaaaaaaaaaaaaaaaaaaaaaaaaaaaaaaaaaaaaaaaaaa

SEQ ID NO: 3451 - RNA, 5419 nt, synthetic construct
  source 1..5419: mol_type = other RNA
aggaaataagagagaaaagaagagtaagaagaaatataagagccaccatggcccctaagaagaagcgtaaagtgagccgggtgaacggcagcggcagcggcggcggcatgaaccacgaccaggagttcgacccccctaaggtgtaccctcccgtccccgccgagaagagaaagcccatccgggtcctgagcctgttcgatggcatcgccaccggtctgctggtgctgaaggacctgggcatccaggtggataggtacattgcctccgaggtgtgcgaggactccatcaccgtgggaatggtgcgtcatcagggcaagatcatgtacgtgggcgacgtgcggagcgtgacacagaagcatatccaggagtggggccctttcgacctggtgatcggcggcagcccttgcaatgacctgagcatcgtgaacccagcccggaagggcctgtacgagggaaccggcagactgttcttcgagttttacagactgctgcacgacgcccggcctaaggaaggcgacgaccggcccttcttttggctgttcgagaatgtggtggccatgggagtcagcgacaagcgggatattagccggttcctggagagcaaccccgtgatgatcgatgccaaggaagtgagcgccgcccaccgggccagatacttctggggcaatctgcctggcatgaacagacccctggccagcaccgtgaacgacaagctggagctgcaggagtgcctggagcacggccggatcgccaagttcagcaaggtgagaaccatcaccacccgaagcaacagcatcaaacaaggcaaggaccagcactttcctgtgttcatgaacgagaaggaggacatcctgtggtgtaccgagatggagagagtgttcgggttcccagtccactacacagatgtcagcaacatgtctagactggccagacagagactgctgggaagaagctggtccgtccctgtgatcagacacctgttcgcccctctgaaggagtacttcgcctgcgtgagcagcggcaacagcaacgccaacagccggggccccagcttctctagcggcctggtgccactgtccctgagagggagccacatgggccccatggagatctacaaaaccgtgagcgcctggaagcggcagcctgtgcgcgtgctgagcctgtttcggaatatcgataaagtcctgaaaagcctgggattcctggagagcggctctggctccggcggtggcaccctgaagtacgtggaggatgtgacaaacgtggtcagacgggatgtggagaagtggggccccttcgatctggtgtacggcagcacccaacccctgggcagctcttgtgaccggtgccctggctggtacatgtttcagttccaccggatcctgcagtacgccctgccgagacaggagtcccagcggccattcttttggattttcatggacaacttgctgctgaccgaggatgaccaggaaactaccactcggttcctgcagaccgaagccgtgaccctgcaggacgtgagaggccgggactaccagaacgccatgcgggtgtggtccaacatccctggactgaaaagcaagcacgcacctctgacccctaaagaagaggagtacctgcaggcccaggtgcggagcagaagcaagctggacgcccctaaggtggatctgctggtgaagaattgcctcctgcccctgagagagtacttcaagtatttcagccagaatagtctgcccctgggcggcccaagcagcggcgcccctcctcccagcggcggcagcccagccggctccccaacctctaccgaggagggcacctctgagtccgccacccccgagagcggccctggcacctccaccgagcccagcgagggcagcgcacccggcagccctgccggcagccccacctccacagaggagggaaccagcaccgagcccagcgaaggcagcgccccaggcaccagcaccgagcctagtgagggcggctctggcggcggcagcgcccaggagattaaacggatcaacaagatcagaagaagacttgtgaaagacagcaacaccaagaaggccggcaagacaggccccatgaaaaccctgctggttagagtgatgacacccgatctgagagagcggctggaaaacctgagaaagaagcctgaaaatatcccccagcccatcagcaatacatctagagccaacctgaataagctgctgaccgattacaccgaaatgaagaaggcgatcctgcatgtgtactgggaagagttccagaaggaccctgtgggcctgatgagccgggtggcccagcctgccagcaagaagatcgatcagaacaagctgaaacctgagatggacgagaagggcaacctgaccaccgccggctttgcctgctctcagtgtggccagcccctgttcgtgtacaagctggagcaggtgtctgagaagggcaaggcttacaccaactacttcggacggtgcaatgtggccgagcacgaaaagctgatcctgctggcccagctgaagcccgagaaggatagcgacgaagccgtgacatatagcctgggaaagtttgggcagagggccctggatttctacagcattcatgtgaccaaggagtccacccaccccgtgaagcccctggcccagatcgccggaaacagatacgcctccggacctgtgggaaaggccctgagcgacgcatgtatgggcacaatcgcctccttcctgtctaagtaccaggacatcatcatcgaacaccagaaggtggtgaagggcaaccagaagagactggagagcctgcgggagctggccggcaaggaaaacctggaataccctagcgtgaccctgccacctcagcctcacaccaaggagggcgttgatgcctacaacgaagtgatcgcccgggtgcgaatgtgggtgaacctgaacctgtggcagaagctgaagctaagcagagatgatgccaagcctctgctgagactgaagggattcccttcctttcctctggtcgagagacaggccaacgaagtggactggtgggacatggtgtgtaacgtgaagaagctgatcaacgagaaaaaggaggatggcaaggtgttttggcagaatctggctggctacaagagacaggaagccctgagaccatacctgagcagcgaggaagatcggaagaagggaaagaaattcgctcggtaccagctgggcgacctgctgctgcacctggaaaagaagcacggcgaggactggggaaaggtgtacgacgaggcctgggagcggattgacaagaaagtggaaggcctgagcaagcacatcaagctggaagaggaacggagaagcgaggacgcccagagcaaggccgccctgaccgactggctgcgggctaaggccagcttcgtgatcgagggcctgaaggaggccgacaaggacgagttctgcagatgcgagctgaagctgcagaagtggtacggggacctgcggggaaagcccttcgccatcgaagccgagaacagcatcctggacatcagcggcttcagcaagcagtacaactgtgccttcatctggcagaaggacggcgtgaagaagctgaacctgtacctgatcatcaactacttcaagggcggcaagctgcggttcaagaagatcaaacctgaagccttcgaagccaacagattctacaccgtgatcaacaaaaagagcggcgagatcgtgcccatggaggtgaacttcaacttcgacgaccccaacctgatcatcctgcctctggcctttggcaagagacagggcagagaattcatctggaacgacctgctgtccctggaaaccggcagcctgaagctggccaacggaagagtgatcgagaagacactgtacaacagaagaacccggcaggatgagcctgccctgttcgtggccctgaccttcgagcggcgggaggtcctggactcctccaatatcaaaccaatgaacctgatcggcgtggcaagaggcgaaaacatccccgccgtgatcgccctgaccgaccccgagggctgcccactgagccggtttaaggatagcctgggaaacccaacccacatcctgagaatcggcgagagctataaggagaagcagcggaccatccaggccaagaaggaggtggagcagcggagagccggcggctacagccggaagtacgccagcaaagccaagaatctggcagacgatatggtgagaaacaccgctagagatctgctgtactacgccgtgacccaggatgccatgctgatcttcgccaacctgagccggggcttcggccggcagggcaagcggaccttcatggccgagagacagtacacacggatggaggactggctgaccgccaagctggcctacgagggcctgagcaagacctacctgtccaagacactggcccagtacacctccaagacatgcagcaactgtgggtttaccatcaccagcgccgactacgacagggtgctggagaagctgaagaagacagcaacaggctggatgaccacaattaacggcaaggagctgaaggtggagggccagattacctactacaacagatacaagagacagaacgtagtcaaggacctgtccgtcgagctggatagactgagcgaagaatctgtgaacaacgacatctcctcctggacaaagggcagaagcggagaagctctgagcctcctgaagaaaagattctcccatagacccgtgcaggagaagttcgtgtgcctgaactgcggcttcgagacacacgcagccgagcaagccgccctgaacatcgccagatcctggctgttcctgcggagccaggagtacaagaaataccagacaaacaagacaaccggcaacaccgataagagagccttcgtcgagacctggcagtccttttaccggaagaagcttaaggaggtgtggaaacctgccgtgcggtctggcggatctggcggaggctccacaagcatggccttcagggacgtggccgtggacttcacccaggacgagtggaggctgctgagccccgcccagaggaccctgtacagggaggtgatgctggagaactacagcaacctggtgagcctgggcatcagcttcagcaagcccgagatcatcacccagctggagcagggcaaggagacctggagggaggagaagaagtgcccccccgccacctgccccgccgaccccgagcccgagctgtgcctgaccagccccaagaaaaagagaaaagtctaagctgccttctgcggggcttgccttctggccatgcccttcttctctcccttgcacctgtacctcttggtctttgaataaagcctgagtaggaaggctagcaaaaaaaaaaaaaaaaaaaaaaaaaaaaaaaaaaaaaaaaaaaaaaaaaaaaaaaaaaaaaaaaaaaaaaaaaaaaaaaa

SEQ ID NO: 3452 - RNA, 5419 nt, synthetic construct
  source 1..5419: mol_type = other RNA
aggaaataagagagaaaagaagagtaagaagaaatataagagccaccatggcccctaagaagaagcgtaaagtgagccgggtgaacggcagcggcagcggcggcggcatgaaccacgaccaggagttcgacccccctaaggtgtaccctcccgtccccgccgagaagagaaagcccatccgggtcctgagcctgttcgatggcatcgccaccggtctgctggtgctgaaggacctgggcatccaggtggataggtacattgcctccgaggtgtgcgaggactccatcaccgtgggaatggtgcgtcatcagggcaagatcatgtacgtgggcgacgtgcggagcgtgacacagaagcatatccaggagtggggccctttcgacctggtgatcggcggcagcccttgcaatgacctgagcatcgtgaacccagcccggaagggcctgtacgagggaaccggcagactgttcttcgagttttacagactgctgcacgacgcccggcctaaggaaggcgacgaccggcccttcttttggctgttcgagaatgtggtggccatgggagtcagcgacaagcgggatattagccggttcctggagagcaaccccgtgatgatcgatgccaaggaagtgagcgccgcccaccgggccagatacttctggggcaatctgcctggcatgaacagacccctggccagcaccgtgaacgacaagctggagctgcaggagtgcctggagcacggccggatcgccaagttcagcaaggtgagaaccatcaccacccgaagcaacagcatcaaacaaggcaaggaccagcactttcctgtgttcatgaacgagaaggaggacatcctgtggtgtaccgagatggagagagtgttcgggttcccagtccactacacagatgtcagcaacatgtctagactggccagacagagactgctgggaagaagctggtccgtccctgtgatcagacacctgttcgcccctctgaaggagtacttcgcctgcgtgagcagcggcaacagcaacgccaacagccggggccccagcttctctagcggcctggtgccactgtccctgagagggagccacatgggccccatggagatctacaaaaccgtgagcgcctggaagcggcagcctgtgcgcgtgctgagcctgtttcggaatatcgataaagtcctgaaaagcctgggattcctggagagcggctctggctccggcggtggcaccctgaagtacgtggaggatgtgacaaacgtggtcagacgggatgtggagaagtggggccccttcgatctggtgtacggcagcacccaacccctgggcagctcttgtgaccggtgccctggctggtacatgtttcagttccaccggatcctgcagtacgccctgccgagacaggagtcccagcggccattcttttggattttcatggacaacttgctgctgaccgaggatgaccaggaaactaccactcggttcctgcagaccgaagccgtgaccctgcaggacgtgagaggccgggactaccagaacgccatgcgggtgtggtccaacatccctggactgaaaagcaagcacgcacctctgacccctaaagaagaggagtacctgcaggcccaggtgcggagcagaagcaagctggacgcccctaaggtggatctgctggtgaagaattgcctcctgcccctgagagagtacttcaagtatttcagccagaatagtctgcccctgggcggcccaagcagcggcgcccctcctcccagcggcggcagcccagccggctccccaacctctaccgaggagggcacctctgagtccgccacccccgagagcggccctggcacctccaccgagcccagcgagggcagcgcacccggcagccctgccggcagccccacctccacagaggagggaaccagcaccgagcccagcgaaggcagcgccccaggcaccagcaccgagcctagtgagggcggctctggcggcggcagcgcccaggagattaaacggatcaacaagatcagaagaagacttgtgaaagacagcaacaccaagaaggccggcaagacaggccccatgaaaaccctgctggttagagtgatgacacccgatctgagagagcggctggaaaacctgagaaagaagcctgaaaatatcccccagcccatcagcaatacatctagagccaacctgaataagctgctgaccgattacaccgaaatgaagaaggcgatcctgcatgtgtactgggaagagttccagaaggaccctgtgggcctgatgagccgggtggcccagcctgccagcaagaagatcgatcagaacaagctgaaacctgagatggacgagaagggcaacctgaccaccgccggctttgcctgctctcagtgtggccagcccctgttcgtgtacaagctggagcaggtgtctgagaagggcaaggcttacaccaactacttcggacggtgcaatgtggccgagcacgaaaagctgatcctgctggcccagctgaagcccgagaaggatagcgacgaagccgtgacatatagcctgggaaagtttgggcagagggccctggatttctacagcattcatgtgaccaaggagtccacccaccccgtgaagcccctggcccagatcgccggaaacagatacgcctccggacctgtgggaaaggccctgagcgacgcatgtatgggcacaatcgcctccttcctgtctaagtaccaggacatcatcatcgaacaccagaaggtggtgaagggcaaccagaagagactggagagcctgcgggagctggccggcaaggaaaacctggaataccctagcgtgaccctgccacctcagcctcacaccaaggagggcgttgatgcctacaacgaagtgatcgcccgggtgcgaatgtgggtgaacctgaacctgtggcagaagctgaagctaagcagagatgatgccaagcctctgctgagactgaagggattcccttcctttcctctggtcgagagacaggccaacgaagtggactggtgggacatggtgtgtaacgtgaagaagctgatcaacgagaaaaaggaggatggcaaggtgttttggcagaatctggctggctacaagagacaggaagccctgagaccatacctgagcagcgaggaagatcggaagaagggaaagaaattcgctcggtaccagctgggcgacctgctgctgcacctggaaaagaagcacggcgaggactggggaaaggtgtacgacgaggcctgggagcggattgacaagaaagtggaaggcctgagcaagcacatcaagctggaagaggaacggagaagcgaggacgcccagagcaaggccgccctgaccgactggctgcgggctaaggccagcttcgtgatcgagggcctgaaggaggccgacaaggacgagttctgcagatgcgagctgaagctgcagaagtggtacggggacctgcggggaaagcccttcgccatcgaagccgagaacagcatcctggacatcagcggcttcagcaagcagtacaactgtgccttcatctggcagaaggacggcgtgaagaagctgaacctgtacctgatcatcaactacttcaagggcggcaagctgcggttcaagaagatcaaacctgaagccttcgaagccaacagattctacaccgtgatcaacaaaaagagcggcgagatcgtgcccatggaggtgaacttcaacttcgacgaccccaacctgatcatcctgcctctggcctttggcaagagacagggcagagaattcatctggaacgacctgctgtccctggaaaccggcagcctgaagctggccaacggaagagtgatcgagaagacactgtacaacagaagaacccggcaggatgagcctgccctgttcgtggccctgaccttcgagcggcgggaggtcctggactcctccaatatcaaaccaatgaacctgatcggcgtggcaagaggcgaaaacatccccgccgtgatcgccctgaccgaccccgagggctgcccactgagccggtttaaggatagcctgggaaacccaacccacatcctgagaatcggcgagagctataaggagaagcagcggaccatccaggccaagaaggaggtggagcagcggagagccggcggctacagccggaagtacgccagcaaagccaagaatctggcagacgatatggtgagaaacaccgctagagatctgctgtactacgccgtgacccaggatgccatgctgatcttcgccaacctgagccggggcttcggccggcagggcaagcggaccttcatggccgagagacagtacacacggatggaggactggctgaccgccaagctggcctacgagggcctgagcaagacctacctgtccaagacactggcccagtacacctccaagacatgcagcaactgtgggtttaccatcaccagcgccgactacgacagggtgctggagaagctgaagaagacagcaacaggctggatgaccacaattaacggcaaggagctgaaggtggagggccagattacctactacaacagatacaagagacagaacgtagtcaaggacctgtccgtcgagctggatagactgagcgaagaatctgtgaacaacgacatctcctcctggacaaagggcagaagcggagaagctctgagcctcctgaagaaaagattctcccatagacccgtgcaggagaagttcgtgtgcctgaactgcggcttcgagacacacgcagccgagcaagccgccctgaacatcgccagatcctggctgttcctgcggagccaggagtacaagaaataccagacaaacaagacaaccggcaacaccgataagagagccttcgtcgagacctggcagtccttttaccggaagaagcttaaggaggtgtggaaacctgccgtgcggtctggcggatctggcggaggctccacaagcttctgggagagcgtgaccttccaggacgtggccgtggacttcacctgggaggagtggggccacctgggccccgcccagaaggagctgtacagggaggtgatgctggagaactacaggaacctggtgtgcctgggcctggccgtgagcaagcccgacgtgatctgccagctggagcagggcggcgccccctggtggcccgagggcggcgtgcccggcagcagctgcgccgtgtgggacaccaggaccagccccaagaaaaagagaaaagtctaagctgccttctgcggggcttgccttctggccatgcccttcttctctcccttgcacctgtacctcttggtctttgaataaagcctgagtaggaaggctagcaaaaaaaaaaaaaaaaaaaaaaaaaaaaaaaaaaaaaaaaaaaaaaaaaaaaaaaaaaaaaaaaaaaaaaaaaaaaaaaa

SEQ ID NO: 3453 - RNA, 5419 nt, synthetic construct
  source 1..5419: mol_type = other RNA
aggaaataagagagaaaagaagagtaagaagaaatataagagccaccatggcccctaagaagaagcgtaaagtgagccgggtgaacggcagcggcagcggcggcggcatgaaccacgaccaggagttcgacccccctaaggtgtaccctcccgtccccgccgagaagagaaagcccatccgggtcctgagcctgttcgatggcatcgccaccggtctgctggtgctgaaggacctgggcatccaggtggataggtacattgcctccgaggtgtgcgaggactccatcaccgtgggaatggtgcgtcatcagggcaagatcatgtacgtgggcgacgtgcggagcgtgacacagaagcatatccaggagtggggccctttcgacctggtgatcggcggcagcccttgcaatgacctgagcatcgtgaacccagcccggaagggcctgtacgagggaaccggcagactgttcttcgagttttacagactgctgcacgacgcccggcctaaggaaggcgacgaccggcccttcttttggctgttcgagaatgtggtggccatgggagtcagcgacaagcgggatattagccggttcctggagagcaaccccgtgatgatcgatgccaaggaagtgagcgccgcccaccgggccagatacttctggggcaatctgcctggcatgaacagacccctggccagcaccgtgaacgacaagctggagctgcaggagtgcctggagcacggccggatcgccaagttcagcaaggtgagaaccatcaccacccgaagcaacagcatcaaacaaggcaaggaccagcactttcctgtgttcatgaacgagaaggaggacatcctgtggtgtaccgagatggagagagtgttcgggttcccagtccactacacagatgtcagcaacatgtctagactggccagacagagactgctgggaagaagctggtccgtccctgtgatcagacacctgttcgcccctctgaaggagtacttcgcctgcgtgagcagcggcaacagcaacgccaacagccggggccccagcttctctagcggcctggtgccactgtccctgagagggagccacatgggccccatggagatctacaaaaccgtgagcgcctggaagcggcagcctgtgcgcgtgctgagcctgtttcggaatatcgataaagtcctgaaaagcctgggattcctggagagcggctctggctccggcggtggcaccctgaagtacgtggaggatgtgacaaacgtggtcagacgggatgtggagaagtggggccccttcgatctggtgtacggcagcacccaacccctgggcagctcttgtgaccggtgccctggctggtacatgtttcagttccaccggatcctgcagtacgccctgccgagacaggagtcccagcggccattcttttggattttcatggacaacttgctgctgaccgaggatgaccaggaaactaccactcggttcctgcagaccgaagccgtgaccctgcaggacgtgagaggccgggactaccagaacgccatgcgggtgtggtccaacatccctggactgaaaagcaagcacgcacctctgacccctaaagaagaggagtacctgcaggcccaggtgcggagcagaagcaagctggacgcccctaaggtggatctgctggtgaagaattgcctcctgcccctgagagagtacttcaagtatttcagccagaatagtctgcccctgggcggcccaagcagcggcgcccctcctcccagcggcggcagcccagccggctccccaacctctaccgaggagggcacctctgagtccgccacccccgagagcggccctggcacctccaccgagcccagcgagggcagcgcacccggcagccctgccggcagccccacctccacagaggagggaaccagcaccgagcccagcgaaggcagcgccccaggcaccagcaccgagcctagtgagggcggctctggcggcggcagcgcccaggagattaaacggatcaacaagatcagaagaagacttgtgaaagacagcaacaccaagaaggccggcaagacaggccccatgaaaaccctgctggttagagtgatgacacccgatctgagagagcggctggaaaacctgagaaagaagcctgaaaatatcccccagcccatcagcaatacatctagagccaacctgaataagctgctgaccgattacaccgaaatgaagaaggcgatcctgcatgtgtactgggaagagttccagaaggaccctgtgggcctgatgagccgggtggcccagcctgccagcaagaagatcgatcagaacaagctgaaacctgagatggacgagaagggcaacctgaccaccgccggctttgcctgctctcagtgtggccagcccctgttcgtgtacaagctggagcaggtgtctgagaagggcaaggcttacaccaactacttcggacggtgcaatgtggccgagcacgaaaagctgatcctgctggcccagctgaagcccgagaaggatagcgacgaagccgtgacatatagcctgggaaagtttgggcagagggccctggatttctacagcattcatgtgaccaaggagtccacccaccccgtgaagcccctggcccagatcgccggaaacagatacgcctccggacctgtgggaaaggccctgagcgacgcatgtatgggcacaatcgcctccttcctgtctaagtaccaggacatcatcatcgaacaccagaaggtggtgaagggcaaccagaagagactggagagcctgcgggagctggccggcaaggaaaacctggaataccctagcgtgaccctgccacctcagcctcacaccaaggagggcgttgatgcctacaacgaagtgatcgcccgggtgcgaatgtgggtgaacctgaacctgtggcagaagctgaagctaagcagagatgatgccaagcctctgctgagactgaagggattcccttcctttcctctggtcgagagacaggccaacgaagtggactggtgggacatggtgtgtaacgtgaagaagctgatcaacgagaaaaaggaggatggcaaggtgttttggcagaatctggctggctacaagagacaggaagccctgagaccatacctgagcagcgaggaagatcggaagaagggaaagaaattcgctcggtaccagctgggcgacctgctgctgcacctggaaaagaagcacggcgaggactggggaaaggtgtacgacgaggcctgggagcggattgacaagaaagtggaaggcctgagcaagcacatcaagctggaagaggaacggagaagcgaggacgcccagagcaaggccgccctgaccgactggctgcgggctaaggccagcttcgtgatcgagggcctgaaggaggccgacaaggacgagttctgcagatgcgagctgaagctgcagaagtggtacggggacctgcggggaaagcccttcgccatcgaagccgagaacagcatcctggacatcagcggcttcagcaagcagtacaactgtgccttcatctggcagaaggacggcgtgaagaagctgaacctgtacctgatcatcaactacttcaagggcggcaagctgcggttcaagaagatcaaacctgaagccttcgaagccaacagattctacaccgtgatcaacaaaaagagcggcgagatcgtgcccatggaggtgaacttcaacttcgacgaccccaacctgatcatcctgcctctggcctttggcaagagacagggcagagaattcatctggaacgacctgctgtccctggaaaccggcagcctgaagctggccaacggaagagtgatcgagaagacactgtacaacagaagaacccggcaggatgagcctgccctgttcgtggccctgaccttcgagcggcgggaggtcctggactcctccaatatcaaaccaatgaacctgatcggcgtggcaagaggcgaaaacatccccgccgtgatcgccctgaccgaccccgagggctgcccactgagccggtttaaggatagcctgggaaacccaacccacatcctgagaatcggcgagagctataaggagaagcagcggaccatccaggccaagaaggaggtggagcagcggagagccggcggctacagccggaagtacgccagcaaagccaagaatctggcagacgatatggtgagaaacaccgctagagatctgctgtactacgccgtgacccaggatgccatgctgatcttcgccaacctgagccggggcttcggccggcagggcaagcggaccttcatggccgagagacagtacacacggatggaggactggctgaccgccaagctggcctacgagggcctgagcaagacctacctgtccaagacactggcccagtacacctccaagacatgcagcaactgtgggtttaccatcaccagcgccgactacgacagggtgctggagaagctgaagaagacagcaacaggctggatgaccacaattaacggcaaggagctgaaggtggagggccagattacctactacaacagatacaagagacagaacgtagtcaaggacctgtccgtcgagctggatagactgagcgaagaatctgtgaacaacgacatctcctcctggacaaagggcagaagcggagaagctctgagcctcctgaagaaaagattctcccatagacccgtgcaggagaagttcgtgtgcctgaactgcggcttcgagacacacgcagccgagcaagccgccctgaacatcgccagatcctggctgttcctgcggagccaggagtacaagaaataccagacaaacaagacaaccggcaacaccgataagagagccttcgtcgagacctggcagtccttttaccggaagaagcttaaggaggtgtggaaacctgccgtgcggtctggcggatctggcggaggctccacaagcagccaggtgagcgtgaccttcgaggacgtggccgtgctgttcaccagggacgagtggaggaagctgggccccagccagaggaacgtgtaccaggaggtgatgctggagaactacagcaacctggtgagcctgggcctgctgttcagcaagcccagggtgatcagcctgctgcaggagggcgaggacccctggaaggtggagaaggagagccccggcggccccagcctgggctggaacagcagcaccagccccaagaaaaagagaaaagtctaagctgccttctgcggggcttgccttctggccatgcccttcttctctcccttgcacctgtacctcttggtctttgaataaagcctgagtaggaaggctagcaaaaaaaaaaaaaaaaaaaaaaaaaaaaaaaaaaaaaaaaaaaaaaaaaaaaaaaaaaaaaaaaaaaaaaaaaaaaaaaa

SEQ ID NO: 3454 - RNA, 5419 nt, synthetic construct
  source 1..5419: mol_type = other RNA
aggaaataagagagaaaagaagagtaagaagaaatataagagccaccatggcccctaagaagaagcgtaaagtgagccgggtgaacggcagcggcagcggcggcggcatgaaccacgaccaggagttcgacccccctaaggtgtaccctcccgtccccgccgagaagagaaagcccatccgggtcctgagcctgttcgatggcatcgccaccggtctgctggtgctgaaggacctgggcatccaggtggataggtacattgcctccgaggtgtgcgaggactccatcaccgtgggaatggtgcgtcatcagggcaagatcatgtacgtgggcgacgtgcggagcgtgacacagaagcatatccaggagtggggccctttcgacctggtgatcggcggcagcccttgcaatgacctgagcatcgtgaacccagcccggaagggcctgtacgagggaaccggcagactgttcttcgagttttacagactgctgcacgacgcccggcctaaggaaggcgacgaccggcccttcttttggctgttcgagaatgtggtggccatgggagtcagcgacaagcgggatattagccggttcctggagagcaaccccgtgatgatcgatgccaaggaagtgagcgccgcccaccgggccagatacttctggggcaatctgcctggcatgaacagacccctggccagcaccgtgaacgacaagctggagctgcaggagtgcctggagcacggccggatcgccaagttcagcaaggtgagaaccatcaccacccgaagcaacagcatcaaacaaggcaaggaccagcactttcctgtgttcatgaacgagaaggaggacatcctgtggtgtaccgagatggagagagtgttcgggttcccagtccactacacagatgtcagcaacatgtctagactggccagacagagactgctgggaagaagctggtccgtccctgtgatcagacacctgttcgcccctctgaaggagtacttcgcctgcgtgagcagcggcaacagcaacgccaacagccggggccccagcttctctagcggcctggtgccactgtccctgagagggagccacatgggccccatggagatctacaaaaccgtgagcgcctggaagcggcagcctgtgcgcgtgctgagcctgtttcggaatatcgataaagtcctgaaaagcctgggattcctggagagcggctctggctccggcggtggcaccctgaagtacgtggaggatgtgacaaacgtggtcagacgggatgtggagaagtggggccccttcgatctggtgtacggcagcacccaacccctgggcagctcttgtgaccggtgccctggctggtacatgtttcagttccaccggatcctgcagtacgccctgccgagacaggagtcccagcggccattcttttggattttcatggacaacttgctgctgaccgaggatgaccaggaaactaccactcggttcctgcagaccgaagccgtgaccctgcaggacgtgagaggccgggactaccagaacgccatgcgggtgtggtccaacatccctggactgaaaagcaagcacgcacctctgacccctaaagaagaggagtacctgcaggcccaggtgcggagcagaagcaagctggacgcccctaaggtggatctgctggtgaagaattgcctcctgcccctgagagagtacttcaagtatttcagccagaatagtctgcccctgggcggcccaagcagcggcgcccctcctcccagcggcggcagcccagccggctccccaacctctaccgaggagggcacctctgagtccgccacccccgagagcggccctggcacctccaccgagcccagcgagggcagcgcacccggcagccctgccggcagccccacctccacagaggagggaaccagcaccgagcccagcgaaggcagcgccccaggcaccagcaccgagcctagtgagggcggctctggcggcggcagcgcccaggagattaaacggatcaacaagatcagaagaagacttgtgaaagacagcaacaccaagaaggccggcaagacaggccccatgaaaaccctgctggttagagtgatgacacccgatctgagagagcggctggaaaacctgagaaagaagcctgaaaatatcccccagcccatcagcaatacatctagagccaacctgaataagctgctgaccgattacaccgaaatgaagaaggcgatcctgcatgtgtactgggaagagttccagaaggaccctgtgggcctgatgagccgggtggcccagcctgccagcaagaagatcgatcagaacaagctgaaacctgagatggacgagaagggcaacctgaccaccgccggctttgcctgctctcagtgtggccagcccctgttcgtgtacaagctggagcaggtgtctgagaagggcaaggcttacaccaactacttcggacggtgcaatgtggccgagcacgaaaagctgatcctgctggcccagctgaagcccgagaaggatagcgacgaagccgtgacatatagcctgggaaagtttgggcagagggccctggatttctacagcattcatgtgaccaaggagtccacccaccccgtgaagcccctggcccagatcgccggaaacagatacgcctccggacctgtgggaaaggccctgagcgacgcatgtatgggcacaatcgcctccttcctgtctaagtaccaggacatcatcatcgaacaccagaaggtggtgaagggcaaccagaagagactggagagcctgcgggagctggccggcaaggaaaacctggaataccctagcgtgaccctgccacctcagcctcacaccaaggagggcgttgatgcctacaacgaagtgatcgcccgggtgcgaatgtgggtgaacctgaacctgtggcagaagctgaagctaagcagagatgatgccaagcctctgctgagactgaagggattcccttcctttcctctggtcgagagacaggccaacgaagtggactggtgggacatggtgtgtaacgtgaagaagctgatcaacgagaaaaaggaggatggcaaggtgttttggcagaatctggctggctacaagagacaggaagccctgagaccatacctgagcagcgaggaagatcggaagaagggaaagaaattcgctcggtaccagctgggcgacctgctgctgcacctggaaaagaagcacggcgaggactggggaaaggtgtacgacgaggcctgggagcggattgacaagaaagtggaaggcctgagcaagcacatcaagctggaagaggaacggagaagcgaggacgcccagagcaaggccgccctgaccgactggctgcgggctaaggccagcttcgtgatcgagggcctgaaggaggccgacaaggacgagttctgcagatgcgagctgaagctgcagaagtggtacggggacctgcggggaaagcccttcgccatcgaagccgagaacagcatcctggacatcagcggcttcagcaagcagtacaactgtgccttcatctggcagaaggacggcgtgaagaagctgaacctgtacctgatcatcaactacttcaagggcggcaagctgcggttcaagaagatcaaacctgaagccttcgaagccaacagattctacaccgtgatcaacaaaaagagcggcgagatcgtgcccatggaggtgaacttcaacttcgacgaccccaacctgatcatcctgcctctggcctttggcaagagacagggcagagaattcatctggaacgacctgctgtccctggaaaccggcagcctgaagctggccaacggaagagtgatcgagaagacactgtacaacagaagaacccggcaggatgagcctgccctgttcgtggccctgaccttcgagcggcgggaggtcctggactcctccaatatcaaaccaatgaacctgatcggcgtggcaagaggcgaaaacatccccgccgtgatcgccctgaccgaccccgagggctgcccactgagccggtttaaggatagcctgggaaacccaacccacatcctgagaatcggcgagagctataaggagaagcagcggaccatccaggccaagaaggaggtggagcagcggagagccggcggctacagccggaagtacgccagcaaagccaagaatctggcagacgatatggtgagaaacaccgctagagatctgctgtactacgccgtgacccaggatgccatgctgatcttcgccaacctgagccggggcttcggccggcagggcaagcggaccttcatggccgagagacagtacacacggatggaggactggctgaccgccaagctggcctacgagggcctgagcaagacctacctgtccaagacactggcccagtacacctccaagacatgcagcaactgtgggtttaccatcaccagcgccgactacgacagggtgctggagaagctgaagaagacagcaacaggctggatgaccacaattaacggcaaggagctgaaggtggagggccagattacctactacaacagatacaagagacagaacgtagtcaaggacctgtccgtcgagctggatagactgagcgaagaatctgtgaacaacgacatctcctcctggacaaagggcagaagcggagaagctctgagcctcctgaagaaaagattctcccatagacccgtgcaggagaagttcgtgtgcctgaactgcggcttcgagacacacgcagccgagcaagccgccctgaacatcgccagatcctggctgttcctgcggagccaggagtacaagaaataccagacaaacaagacaaccggcaacaccgataagagagccttcgtcgagacctggcagtccttttaccggaagaagcttaaggaggtgtggaaacctgccgtgcggtctggcggatctggcggaggctccacaagcccccaggagagcgtgaccttcgaggacgtggccgtgaacttcagccacgaggagtggcagtgcctgacccacgcccagaggcacctgtacaaggacgtgatgctggagaactacggcaacatggtgagcctgggcttcagcttcagcaagccccccctgatcagcaggctggagcagggcaccgagccctacgtgcaggacaggcaggactgggagttcctgagctgcagctaccccgtgagcaccagccccaagaaaaagagaaaagtctaagctgccttctgcggggcttgccttctggccatgcccttcttctctcccttgcacctgtacctcttggtctttgaataaagcctgagtaggaaggctagcaaaaaaaaaaaaaaaaaaaaaaaaaaaaaaaaaaaaaaaaaaaaaaaaaaaaaaaaaaaaaaaaaaaaaaaaaaaaaaaa

SEQ ID NO: 3455 - RNA, 5419 nt, synthetic construct
  source 1..5419: mol_type = other RNA
aggaaataagagagaaaagaagagtaagaagaaatataagagccaccatggcccctaagaagaagcgtaaagtgagccgggtgaacggcagcggcagcggcggcggcatgaaccacgaccaggagttcgacccccctaaggtgtaccctcccgtccccgccgagaagagaaagcccatccgggtcctgagcctgttcgatggcatcgccaccggtctgctggtgctgaaggacctgggcatccaggtggataggtacattgcctccgaggtgtgcgaggactccatcaccgtgggaatggtgcgtcatcagggcaagatcatgtacgtgggcgacgtgcggagcgtgacacagaagcatatccaggagtggggccctttcgacctggtgatcggcggcagcccttgcaatgacctgagcatcgtgaacccagcccggaagggcctgtacgagggaaccggcagactgttcttcgagttttacagactgctgcacgacgcccggcctaaggaaggcgacgaccggcccttcttttggctgttcgagaatgtggtggccatgggagtcagcgacaagcgggatattagccggttcctggagagcaaccccgtgatgatcgatgccaaggaagtgagcgccgcccaccgggccagatacttctggggcaatctgcctggcatgaacagacccctggccagcaccgtgaacgacaagctggagctgcaggagtgcctggagcacggccggatcgccaagttcagcaaggtgagaaccatcaccacccgaagcaacagcatcaaacaaggcaaggaccagcactttcctgtgttcatgaacgagaaggaggacatcctgtggtgtaccgagatggagagagtgttcgggttcccagtccactacacagatgtcagcaacatgtctagactggccagacagagactgctgggaagaagctggtccgtccctgtgatcagacacctgttcgcccctctgaaggagtacttcgcctgcgtgagcagcggcaacagcaacgccaacagccggggccccagcttctctagcggcctggtgccactgtccctgagagggagccacatgggccccatggagatctacaaaaccgtgagcgcctggaagcggcagcctgtgcgcgtgctgagcctgtttcggaatatcgataaagtcctgaaaagcctgggattcctggagagcggctctggctccggcggtggcaccctgaagtacgtggaggatgtgacaaacgtggtcagacgggatgtggagaagtggggccccttcgatctggtgtacggcagcacccaacccctgggcagctcttgtgaccggtgccctggctggtacatgtttcagttccaccggatcctgcagtacgccctgccgagacaggagtcccagcggccattcttttggattttcatggacaacttgctgctgaccgaggatgaccaggaaactaccactcggttcctgcagaccgaagccgtgaccctgcaggacgtgagaggccgggactaccagaacgccatgcgggtgtggtccaacatccctggactgaaaagcaagcacgcacctctgacccctaaagaagaggagtacctgcaggcccaggtgcggagcagaagcaagctggacgcccctaaggtggatctgctggtgaagaattgcctcctgcccctgagagagtacttcaagtatttcagccagaatagtctgcccctgggcggcccaagcagcggcgcccctcctcccagcggcggcagcccagccggctccccaacctctaccgaggagggcacctctgagtccgccacccccgagagcggccctggcacctccaccgagcccagcgagggcagcgcacccggcagccctgccggcagccccacctccacagaggagggaaccagcaccgagcccagcgaaggcagcgccccaggcaccagcaccgagcctagtgagggcggctctggcggcggcagcgcccaggagattaaacggatcaacaagatcagaagaagacttgtgaaagacagcaacaccaagaaggccggcaagacaggccccatgaaaaccctgctggttagagtgatgacacccgatctgagagagcggctggaaaacctgagaaagaagcctgaaaatatcccccagcccatcagcaatacatctagagccaacctgaataagctgctgaccgattacaccgaaatgaagaaggcgatcctgcatgtgtactgggaagagttccagaaggaccctgtgggcctgatgagccgggtggcccagcctgccagcaagaagatcgatcagaacaagctgaaacctgagatggacgagaagggcaacctgaccaccgccggctttgcctgctctcagtgtggccagcccctgttcgtgtacaagctggagcaggtgtctgagaagggcaaggcttacaccaactacttcggacggtgcaatgtggccgagcacgaaaagctgatcctgctggcccagctgaagcccgagaaggatagcgacgaagccgtgacatatagcctgggaaagtttgggcagagggccctggatttctacagcattcatgtgaccaaggagtccacccaccccgtgaagcccctggcccagatcgccggaaacagatacgcctccggacctgtgggaaaggccctgagcgacgcatgtatgggcacaatcgcctccttcctgtctaagtaccaggacatcatcatcgaacaccagaaggtggtgaagggcaaccagaagagactggagagcctgcgggagctggccggcaaggaaaacctggaataccctagcgtgaccctgccacctcagcctcacaccaaggagggcgttgatgcctacaacgaagtgatcgcccgggtgcgaatgtgggtgaacctgaacctgtggcagaagctgaagctaagcagagatgatgccaagcctctgctgagactgaagggattcccttcctttcctctggtcgagagacaggccaacgaagtggactggtgggacatggtgtgtaacgtgaagaagctgatcaacgagaaaaaggaggatggcaaggtgttttggcagaatctggctggctacaagagacaggaagccctgagaccatacctgagcagcgaggaagatcggaagaagggaaagaaattcgctcggtaccagctgggcgacctgctgctgcacctggaaaagaagcacggcgaggactggggaaaggtgtacgacgaggcctgggagcggattgacaagaaagtggaaggcctgagcaagcacatcaagctggaagaggaacggagaagcgaggacgcccagagcaaggccgccctgaccgactggctgcgggctaaggccagcttcgtgatcgagggcctgaaggaggccgacaaggacgagttctgcagatgcgagctgaagctgcagaagtggtacggggacctgcggggaaagcccttcgccatcgaagccgagaacagcatcctggacatcagcggcttcagcaagcagtacaactgtgccttcatctggcagaaggacggcgtgaagaagctgaacctgtacctgatcatcaactacttcaagggcggcaagctgcggttcaagaagatcaaacctgaagccttcgaagccaacagattctacaccgtgatcaacaaaaagagcggcgagatcgtgcccatggaggtgaacttcaacttcgacgaccccaacctgatcatcctgcctctggcctttggcaagagacagggcagagaattcatctggaacgacctgctgtccctggaaaccggcagcctgaagctggccaacggaagagtgatcgagaagacactgtacaacagaagaacccggcaggatgagcctgccctgttcgtggccctgaccttcgagcggcgggaggtcctggactcctccaatatcaaaccaatgaacctgatcggcgtggcaagaggcgaaaacatccccgccgtgatcgccctgaccgaccccgagggctgcccactgagccggtttaaggatagcctgggaaacccaacccacatcctgagaatcggcgagagctataaggagaagcagcggaccatccaggccaagaaggaggtggagcagcggagagccggcggctacagccggaagtacgccagcaaagccaagaatctggcagacgatatggtgagaaacaccgctagagatctgctgtactacgccgtgacccaggatgccatgctgatcttcgccaacctgagccggggcttcggccggcagggcaagcggaccttcatggccgagagacagtacacacggatggaggactggctgaccgccaagctggcctacgagggcctgagcaagacctacctgtccaagacactggcccagtacacctccaagacatgcagcaactgtgggtttaccatcaccagcgccgactacgacagggtgctggagaagctgaagaagacagcaacaggctggatgaccacaattaacggcaaggagctgaaggtggagggccagattacctactacaacagatacaagagacagaacgtagtcaaggacctgtccgtcgagctggatagactgagcgaagaatctgtgaacaacgacatctcctcctggacaaagggcagaagcggagaagctctgagcctcctgaagaaaagattctcccatagacccgtgcaggagaagttcgtgtgcctgaactgcggcttcgagacacacgcagccgagcaagccgccctgaacatcgccagatcctggctgttcctgcggagccaggagtacaagaaataccagacaaacaagacaaccggcaacaccgataagagagccttcgtcgagacctggcagtccttttaccggaagaagcttaaggaggtgtggaaacctgccgtgcggtctggcggatctggcggaggctccacaagcatggccgccgccgccctgaggctgcccgcccagggcaccgtgaccttcgaggacgtggccgtgaagttcagccaggaggagtggagcctgctgagcgaggcccagaggtgcctgtaccacgacgtgatgctggagaacctggccctgatcagcagcctgggctgctggtacggcgccaacgacgagacccccagcaagcagaccctgagcatccagcagcagagccccctgaggagccactggaccagccccaagaaaaagagaaaagtctaagctgccttctgcggggcttgccttctggccatgcccttcttctctcccttgcacctgtacctcttggtctttgaataaagcctgagtaggaaggctagcaaaaaaaaaaaaaaaaaaaaaaaaaaaaaaaaaaaaaaaaaaaaaaaaaaaaaaaaaaaaaaaaaaaaaaaaaaaaaaaa

SEQ ID NO: 3456 - RNA, 5419 nt, synthetic construct
  source 1..5419: mol_type = other RNA
aggaaataagagagaaaagaagagtaagaagaaatataagagccaccatggcccctaagaagaagcgtaaagtgagccgggtgaacggcagcggcagcggcggcggcatgaaccacgaccaggagttcgacccccctaaggtgtaccctcccgtccccgccgagaagagaaagcccatccgggtcctgagcctgttcgatggcatcgccaccggtctgctggtgctgaaggacctgggcatccaggtggataggtacattgcctccgaggtgtgcgaggactccatcaccgtgggaatggtgcgtcatcagggcaagatcatgtacgtgggcgacgtgcggagcgtgacacagaagcatatccaggagtggggccctttcgacctggtgatcggcggcagcccttgcaatgacctgagcatcgtgaacccagcccggaagggcctgtacgagggaaccggcagactgttcttcgagttttacagactgctgcacgacgcccggcctaaggaaggcgacgaccggcccttcttttggctgttcgagaatgtggtggccatgggagtcagcgacaagcgggatattagccggttcctggagagcaaccccgtgatgatcgatgccaaggaagtgagcgccgcccaccgggccagatacttctggggcaatctgcctggcatgaacagacccctggccagcaccgtgaacgacaagctggagctgcaggagtgcctggagcacggccggatcgccaagttcagcaaggtgagaaccatcaccacccgaagcaacagcatcaaacaaggcaaggaccagcactttcctgtgttcatgaacgagaaggaggacatcctgtggtgtaccgagatggagagagtgttcgggttcccagtccactacacagatgtcagcaacatgtctagactggccagacagagactgctgggaagaagctggtccgtccctgtgatcagacacctgttcgcccctctgaaggagtacttcgcctgcgtgagcagcggcaacagcaacgccaacagccggggccccagcttctctagcggcctggtgccactgtccctgagagggagccacatgggccccatggagatctacaaaaccgtgagcgcctggaagcggcagcctgtgcgcgtgctgagcctgtttcggaatatcgataaagtcctgaaaagcctgggattcctggagagcggctctggctccggcggtggcaccctgaagtacgtggaggatgtgacaaacgtggtcagacgggatgtggagaagtggggccccttcgatctggtgtacggcagcacccaacccctgggcagctcttgtgaccggtgccctggctggtacatgtttcagttccaccggatcctgcagtacgccctgccgagacaggagtcccagcggccattcttttggattttcatggacaacttgctgctgaccgaggatgaccaggaaactaccactcggttcctgcagaccgaagccgtgaccctgcaggacgtgagaggccgggactaccagaacgccatgcgggtgtggtccaacatccctggactgaaaagcaagcacgcacctctgacccctaaagaagaggagtacctgcaggcccaggtgcggagcagaagcaagctggacgcccctaaggtggatctgctggtgaagaattgcctcctgcccctgagagagtacttcaagtatttcagccagaatagtctgcccctgggcggcccaagcagcggcgcccctcctcccagcggcggcagcccagccggctccccaacctctaccgaggagggcacctctgagtccgccacccccgagagcggccctggcacctccaccgagcccagcgagggcagcgcacccggcagccctgccggcagccccacctccacagaggagggaaccagcaccgagcccagcgaaggcagcgccccaggcaccagcaccgagcctagtgagggcggctctggcggcggcagcgcccaggagattaaacggatcaacaagatcagaagaagacttgtgaaagacagcaacaccaagaaggccggcaagacaggccccatgaaaaccctgctggttagagtgatgacacccgatctgagagagcggctggaaaacctgagaaagaagcctgaaaatatcccccagcccatcagcaatacatctagagccaacctgaataagctgctgaccgattacaccgaaatgaagaaggcgatcctgcatgtgtactgggaagagttccagaaggaccctgtgggcctgatgagccgggtggcccagcctgccagcaagaagatcgatcagaacaagctgaaacctgagatggacgagaagggcaacctgaccaccgccggctttgcctgctctcagtgtggccagcccctgttcgtgtacaagctggagcaggtgtctgagaagggcaaggcttacaccaactacttcggacggtgcaatgtggccgagcacgaaaagctgatcctgctggcccagctgaagcccgagaaggatagcgacgaagccgtgacatatagcctgggaaagtttgggcagagggccctggatttctacagcattcatgtgaccaaggagtccacccaccccgtgaagcccctggcccagatcgccggaaacagatacgcctccggacctgtgggaaaggccctgagcgacgcatgtatgggcacaatcgcctccttcctgtctaagtaccaggacatcatcatcgaacaccagaaggtggtgaagggcaaccagaagagactggagagcctgcgggagctggccggcaaggaaaacctggaataccctagcgtgaccctgccacctcagcctcacaccaaggagggcgttgatgcctacaacgaagtgatcgcccgggtgcgaatgtgggtgaacctgaacctgtggcagaagctgaagctaagcagagatgatgccaagcctctgctgagactgaagggattcccttcctttcctctggtcgagagacaggccaacgaagtggactggtgggacatggtgtgtaacgtgaagaagctgatcaacgagaaaaaggaggatggcaaggtgttttggcagaatctggctggctacaagagacaggaagccctgagaccatacctgagcagcgaggaagatcggaagaagggaaagaaattcgctcggtaccagctgggcgacctgctgctgcacctggaaaagaagcacggcgaggactggggaaaggtgtacgacgaggcctgggagcggattgacaagaaagtggaaggcctgagcaagcacatcaagctggaagaggaacggagaagcgaggacgcccagagcaaggccgccctgaccgactggctgcgggctaaggccagcttcgtgatcgagggcctgaaggaggccgacaaggacgagttctgcagatgcgagctgaagctgcagaagtggtacggggacctgcggggaaagcccttcgccatcgaagccgagaacagcatcctggacatcagcggcttcagcaagcagtacaactgtgccttcatctggcagaaggacggcgtgaagaagctgaacctgtacctgatcatcaactacttcaagggcggcaagctgcggttcaagaagatcaaacctgaagccttcgaagccaacagattctacaccgtgatcaacaaaaagagcggcgagatcgtgcccatggaggtgaacttcaacttcgacgaccccaacctgatcatcctgcctctggcctttggcaagagacagggcagagaattcatctggaacgacctgctgtccctggaaaccggcagcctgaagctggccaacggaagagtgatcgagaagacactgtacaacagaagaacccggcaggatgagcctgccctgttcgtggccctgaccttcgagcggcgggaggtcctggactcctccaatatcaaaccaatgaacctgatcggcgtggcaagaggcgaaaacatccccgccgtgatcgccctgaccgaccccgagggctgcccactgagccggtttaaggatagcctgggaaacccaacccacatcctgagaatcggcgagagctataaggagaagcagcggaccatccaggccaagaaggaggtggagcagcggagagccggcggctacagccggaagtacgccagcaaagccaagaatctggcagacgatatggtgagaaacaccgctagagatctgctgtactacgccgtgacccaggatgccatgctgatcttcgccaacctgagccggggcttcggccggcagggcaagcggaccttcatggccgagagacagtacacacggatggaggactggctgaccgccaagctggcctacgagggcctgagcaagacctacctgtccaagacactggcccagtacacctccaagacatgcagcaactgtgggtttaccatcaccagcgccgactacgacagggtgctggagaagctgaagaagacagcaacaggctggatgaccacaattaacggcaaggagctgaaggtggagggccagattacctactacaacagatacaagagacagaacgtagtcaaggacctgtccgtcgagctggatagactgagcgaagaatctgtgaacaacgacatctcctcctggacaaagggcagaagcggagaagctctgagcctcctgaagaaaagattctcccatagacccgtgcaggagaagttcgtgtgcctgaactgcggcttcgagacacacgcagccgagcaagccgccctgaacatcgccagatcctggctgttcctgcggagccaggagtacaagaaataccagacaaacaagacaaccggcaacaccgataagagagccttcgtcgagacctggcagtccttttaccggaagaagcttaaggaggtgtggaaacctgccgtgcggtctggcggatctggcggaggctccacaagcgagcccggcgccgtgagcttcgccgacgtggccgtgtacttctgcagggaggagtggggctgcctgaggcccgcccagagggccctgtacagggacgtgatgagggagacctacggccacctgagcgccctgggcatcggcggcaacaagcccgccctgatcagctgggtggaggaggaggccgagctgtgggaccccgccgcccaggaccccgaggtggccaagtgccagaccgaggccgacaccagccccaagaaaaagagaaaagtctaagctgccttctgcggggcttgccttctggccatgcccttcttctctcccttgcacctgtacctcttggtctttgaataaagcctgagtaggaaggctagcaaaaaaaaaaaaaaaaaaaaaaaaaaaaaaaaaaaaaaaaaaaaaaaaaaaaaaaaaaaaaaaaaaaaaaaaaaaaaaaa

SEQ ID NO: 3457 - RNA, 5419 nt, synthetic construct
  source 1..5419: mol_type = other RNA
aggaaataagagagaaaagaagagtaagaagaaatataagagccaccatggcccctaagaagaagcgtaaagtgagccgggtgaacggcagcggcagcggcggcggcatgaaccacgaccaggagttcgacccccctaaggtgtaccctcccgtccccgccgagaagagaaagcccatccgggtcctgagcctgttcgatggcatcgccaccggtctgctggtgctgaaggacctgggcatccaggtggataggtacattgcctccgaggtgtgcgaggactccatcaccgtgggaatggtgcgtcatcagggcaagatcatgtacgtgggcgacgtgcggagcgtgacacagaagcatatccaggagtggggccctttcgacctggtgatcggcggcagcccttgcaatgacctgagcatcgtgaacccagcccggaagggcctgtacgagggaaccggcagactgttcttcgagttttacagactgctgcacgacgcccggcctaaggaaggcgacgaccggcccttcttttggctgttcgagaatgtggtggccatgggagtcagcgacaagcgggatattagccggttcctggagagcaaccccgtgatgatcgatgccaaggaagtgagcgccgcccaccgggccagatacttctggggcaatctgcctggcatgaacagacccctggccagcaccgtgaacgacaagctggagctgcaggagtgcctggagcacggccggatcgccaagttcagcaaggtgagaaccatcaccacccgaagcaacagcatcaaacaaggcaaggaccagcactttcctgtgttcatgaacgagaaggaggacatcctgtggtgtaccgagatggagagagtgttcgggttcccagtccactacacagatgtcagcaacatgtctagactggccagacagagactgctgggaagaagctggtccgtccctgtgatcagacacctgttcgcccctctgaaggagtacttcgcctgcgtgagcagcggcaacagcaacgccaacagccggggccccagcttctctagcggcctggtgccactgtccctgagagggagccacatgggccccatggagatctacaaaaccgtgagcgcctggaagcggcagcctgtgcgcgtgctgagcctgtttcggaatatcgataaagtcctgaaaagcctgggattcctggagagcggctctggctccggcggtggcaccctgaagtacgtggaggatgtgacaaacgtggtcagacgggatgtggagaagtggggccccttcgatctggtgtacggcagcacccaacccctgggcagctcttgtgaccggtgccctggctggtacatgtttcagttccaccggatcctgcagtacgccctgccgagacaggagtcccagcggccattcttttggattttcatggacaacttgctgctgaccgaggatgaccaggaaactaccactcggttcctgcagaccgaagccgtgaccctgcaggacgtgagaggccgggactaccagaacgccatgcgggtgtggtccaacatccctggactgaaaagcaagcacgcacctctgacccctaaagaagaggagtacctgcaggcccaggtgcggagcagaagcaagctggacgcccctaaggtggatctgctggtgaagaattgcctcctgcccctgagagagtacttcaagtatttcagccagaatagtctgcccctgggcggcccaagcagcggcgcccctcctcccagcggcggcagcccagccggctccccaacctctaccgaggagggcacctctgagtccgccacccccgagagcggccctggcacctccaccgagcccagcgagggcagcgcacccggcagccctgccggcagccccacctccacagaggagggaaccagcaccgagcccagcgaaggcagcgccccaggcaccagcaccgagcctagtgagggcggctctggcggcggcagcgcccaggagattaaacggatcaacaagatcagaagaagacttgtgaaagacagcaacaccaagaaggccggcaagacaggccccatgaaaaccctgctggttagagtgatgacacccgatctgagagagcggctggaaaacctgagaaagaagcctgaaaatatcccccagcccatcagcaatacatctagagccaacctgaataagctgctgaccgattacaccgaaatgaagaaggcgatcctgcatgtgtactgggaagagttccagaaggaccctgtgggcctgatgagccgggtggcccagcctgccagcaagaagatcgatcagaacaagctgaaacctgagatggacgagaagggcaacctgaccaccgccggctttgcctgctctcagtgtggccagcccctgttcgtgtacaagctggagcaggtgtctgagaagggcaaggcttacaccaactacttcggacggtgcaatgtggccgagcacgaaaagctgatcctgctggcccagctgaagcccgagaaggatagcgacgaagccgtgacatatagcctgggaaagtttgggcagagggccctggatttctacagcattcatgtgaccaaggagtccacccaccccgtgaagcccctggcccagatcgccggaaacagatacgcctccggacctgtgggaaaggccctgagcgacgcatgtatgggcacaatcgcctccttcctgtctaagtaccaggacatcatcatcgaacaccagaaggtggtgaagggcaaccagaagagactggagagcctgcgggagctggccggcaaggaaaacctggaataccctagcgtgaccctgccacctcagcctcacaccaaggagggcgttgatgcctacaacgaagtgatcgcccgggtgcgaatgtgggtgaacctgaacctgtggcagaagctgaagctaagcagagatgatgccaagcctctgctgagactgaagggattcccttcctttcctctggtcgagagacaggccaacgaagtggactggtgggacatggtgtgtaacgtgaagaagctgatcaacgagaaaaaggaggatggcaaggtgttttggcagaatctggctggctacaagagacaggaagccctgagaccatacctgagcagcgaggaagatcggaagaagggaaagaaattcgctcggtaccagctgggcgacctgctgctgcacctggaaaagaagcacggcgaggactggggaaaggtgtacgacgaggcctgggagcggattgacaagaaagtggaaggcctgagcaagcacatcaagctggaagaggaacggagaagcgaggacgcccagagcaaggccgccctgaccgactggctgcgggctaaggccagcttcgtgatcgagggcctgaaggaggccgacaaggacgagttctgcagatgcgagctgaagctgcagaagtggtacggggacctgcggggaaagcccttcgccatcgaagccgagaacagcatcctggacatcagcggcttcagcaagcagtacaactgtgccttcatctggcagaaggacggcgtgaagaagctgaacctgtacctgatcatcaactacttcaagggcggcaagctgcggttcaagaagatcaaacctgaagccttcgaagccaacagattctacaccgtgatcaacaaaaagagcggcgagatcgtgcccatggaggtgaacttcaacttcgacgaccccaacctgatcatcctgcctctggcctttggcaagagacagggcagagaattcatctggaacgacctgctgtccctggaaaccggcagcctgaagctggccaacggaagagtgatcgagaagacactgtacaacagaagaacccggcaggatgagcctgccctgttcgtggccctgaccttcgagcggcgggaggtcctggactcctccaatatcaaaccaatgaacctgatcggcgtggcaagaggcgaaaacatccccgccgtgatcgccctgaccgaccccgagggctgcccactgagccggtttaaggatagcctgggaaacccaacccacatcctgagaatcggcgagagctataaggagaagcagcggaccatccaggccaagaaggaggtggagcagcggagagccggcggctacagccggaagtacgccagcaaagccaagaatctggcagacgatatggtgagaaacaccgctagagatctgctgtactacgccgtgacccaggatgccatgctgatcttcgccaacctgagccggggcttcggccggcagggcaagcggaccttcatggccgagagacagtacacacggatggaggactggctgaccgccaagctggcctacgagggcctgagcaagacctacctgtccaagacactggcccagtacacctccaagacatgcagcaactgtgggtttaccatcaccagcgccgactacgacagggtgctggagaagctgaagaagacagcaacaggctggatgaccacaattaacggcaaggagctgaaggtggagggccagattacctactacaacagatacaagagacagaacgtagtcaaggacctgtccgtcgagctggatagactgagcgaagaatctgtgaacaacgacatctcctcctggacaaagggcagaagcggagaagctctgagcctcctgaagaaaagattctcccatagacccgtgcaggagaagttcgtgtgcctgaactgcggcttcgagacacacgcagccgagcaagccgccctgaacatcgccagatcctggctgttcctgcggagccaggagtacaagaaataccagacaaacaagacaaccggcaacaccgataagagagccttcgtcgagacctggcagtccttttaccggaagaagcttaaggaggtgtggaaacctgccgtgcggtctggcggatctggcggaggctccacaagcagctacggcagcctgagcttcgaggacgtgaccgtgggcttcagccaggaggagtggcagcacctggaccccgcccagaggaccctgtacagggacgtgatgctggagaactacagccacctggtggccgtgggctgctgcgtgcccaagcccgacgtgatcttcaggctggagcagggccagcagccctggctgatcgaggaggagagcctggaccagagctgccccgaggtgtgcagggtgaccagccccaagaaaaagagaaaagtctaagctgccttctgcggggcttgccttctggccatgcccttcttctctcccttgcacctgtacctcttggtctttgaataaagcctgagtaggaaggctagcaaaaaaaaaaaaaaaaaaaaaaaaaaaaaaaaaaaaaaaaaaaaaaaaaaaaaaaaaaaaaaaaaaaaaaaaaaaaaaaa

SEQ ID NO: 3458 - RNA, 5419 nt, synthetic construct
  source 1..5419: mol_type = other RNA
aggaaataagagagaaaagaagagtaagaagaaatataagagccaccatggcccctaagaagaagcgtaaagtgagccgggtgaacggcagcggcagcggcggcggcatgaaccacgaccaggagttcgacccccctaaggtgtaccctcccgtccccgccgagaagagaaagcccatccgggtcctgagcctgttcgatggcatcgccaccggtctgctggtgctgaaggacctgggcatccaggtggataggtacattgcctccgaggtgtgcgaggactccatcaccgtgggaatggtgcgtcatcagggcaagatcatgtacgtgggcgacgtgcggagcgtgacacagaagcatatccaggagtggggccctttcgacctggtgatcggcggcagcccttgcaatgacctgagcatcgtgaacccagcccggaagggcctgtacgagggaaccggcagactgttcttcgagttttacagactgctgcacgacgcccggcctaaggaaggcgacgaccggcccttcttttggctgttcgagaatgtggtggccatgggagtcagcgacaagcgggatattagccggttcctggagagcaaccccgtgatgatcgatgccaaggaagtgagcgccgcccaccgggccagatacttctggggcaatctgcctggcatgaacagacccctggccagcaccgtgaacgacaagctggagctgcaggagtgcctggagcacggccggatcgccaagttcagcaaggtgagaaccatcaccacccgaagcaacagcatcaaacaaggcaaggaccagcactttcctgtgttcatgaacgagaaggaggacatcctgtggtgtaccgagatggagagagtgttcgggttcccagtccactacacagatgtcagcaacatgtctagactggccagacagagactgctgggaagaagctggtccgtccctgtgatcagacacctgttcgcccctctgaaggagtacttcgcctgcgtgagcagcggcaacagcaacgccaacagccggggccccagcttctctagcggcctggtgccactgtccctgagagggagccacatgggccccatggagatctacaaaaccgtgagcgcctggaagcggcagcctgtgcgcgtgctgagcctgtttcggaatatcgataaagtcctgaaaagcctgggattcctggagagcggctctggctccggcggtggcaccctgaagtacgtggaggatgtgacaaacgtggtcagacgggatgtggagaagtggggccccttcgatctggtgtacggcagcacccaacccctgggcagctcttgtgaccggtgccctggctggtacatgtttcagttccaccggatcctgcagtacgccctgccgagacaggagtcccagcggccattcttttggattttcatggacaacttgctgctgaccgaggatgaccaggaaactaccactcggttcctgcagaccgaagccgtgaccctgcaggacgtgagaggccgggactaccagaacgccatgcgggtgtggtccaacatccctggactgaaaagcaagcacgcacctctgacccctaaagaagaggagtacctgcaggcccaggtgcggagcagaagcaagctggacgcccctaaggtggatctgctggtgaagaattgcctcctgcccctgagagagtacttcaagtatttcagccagaatagtctgcccctgggcggcccaagcagcggcgcccctcctcccagcggcggcagcccagccggctccccaacctctaccgaggagggcacctctgagtccgccacccccgagagcggccctggcacctccaccgagcccagcgagggcagcgcacccggcagccctgccggcagccccacctccacagaggagggaaccagcaccgagcccagcgaaggcagcgccccaggcaccagcaccgagcctagtgagggcggctctggcggcggcagcgcccaggagattaaacggatcaacaagatcagaagaagacttgtgaaagacagcaacaccaagaaggccggcaagacaggccccatgaaaaccctgctggttagagtgatgacacccgatctgagagagcggctggaaaacctgagaaagaagcctgaaaatatcccccagcccatcagcaatacatctagagccaacctgaataagctgctgaccgattacaccgaaatgaagaaggcgatcctgcatgtgtactgggaagagttccagaaggaccctgtgggcctgatgagccgggtggcccagcctgccagcaagaagatcgatcagaacaagctgaaacctgagatggacgagaagggcaacctgaccaccgccggctttgcctgctctcagtgtggccagcccctgttcgtgtacaagctggagcaggtgtctgagaagggcaaggcttacaccaactacttcggacggtgcaatgtggccgagcacgaaaagctgatcctgctggcccagctgaagcccgagaaggatagcgacgaagccgtgacatatagcctgggaaagtttgggcagagggccctggatttctacagcattcatgtgaccaaggagtccacccaccccgtgaagcccctggcccagatcgccggaaacagatacgcctccggacctgtgggaaaggccctgagcgacgcatgtatgggcacaatcgcctccttcctgtctaagtaccaggacatcatcatcgaacaccagaaggtggtgaagggcaaccagaagagactggagagcctgcgggagctggccggcaaggaaaacctggaataccctagcgtgaccctgccacctcagcctcacaccaaggagggcgttgatgcctacaacgaagtgatcgcccgggtgcgaatgtgggtgaacctgaacctgtggcagaagctgaagctaagcagagatgatgccaagcctctgctgagactgaagggattcccttcctttcctctggtcgagagacaggccaacgaagtggactggtgggacatggtgtgtaacgtgaagaagctgatcaacgagaaaaaggaggatggcaaggtgttttggcagaatctggctggctacaagagacaggaagccctgagaccatacctgagcagcgaggaagatcggaagaagggaaagaaattcgctcggtaccagctgggcgacctgctgctgcacctggaaaagaagcacggcgaggactggggaaaggtgtacgacgaggcctgggagcggattgacaagaaagtggaaggcctgagcaagcacatcaagctggaagaggaacggagaagcgaggacgcccagagcaaggccgccctgaccgactggctgcgggctaaggccagcttcgtgatcgagggcctgaaggaggccgacaaggacgagttctgcagatgcgagctgaagctgcagaagtggtacggggacctgcggggaaagcccttcgccatcgaagccgagaacagcatcctggacatcagcggcttcagcaagcagtacaactgtgccttcatctggcagaaggacggcgtgaagaagctgaacctgtacctgatcatcaactacttcaagggcggcaagctgcggttcaagaagatcaaacctgaagccttcgaagccaacagattctacaccgtgatcaacaaaaagagcggcgagatcgtgcccatggaggtgaacttcaacttcgacgaccccaacctgatcatcctgcctctggcctttggcaagagacagggcagagaattcatctggaacgacctgctgtccctggaaaccggcagcctgaagctggccaacggaagagtgatcgagaagacactgtacaacagaagaacccggcaggatgagcctgccctgttcgtggccctgaccttcgagcggcgggaggtcctggactcctccaatatcaaaccaatgaacctgatcggcgtggcaagaggcgaaaacatccccgccgtgatcgccctgaccgaccccgagggctgcccactgagccggtttaaggatagcctgggaaacccaacccacatcctgagaatcggcgagagctataaggagaagcagcggaccatccaggccaagaaggaggtggagcagcggagagccggcggctacagccggaagtacgccagcaaagccaagaatctggcagacgatatggtgagaaacaccgctagagatctgctgtactacgccgtgacccaggatgccatgctgatcttcgccaacctgagccggggcttcggccggcagggcaagcggaccttcatggccgagagacagtacacacggatggaggactggctgaccgccaagctggcctacgagggcctgagcaagacctacctgtccaagacactggcccagtacacctccaagacatgcagcaactgtgggtttaccatcaccagcgccgactacgacagggtgctggagaagctgaagaagacagcaacaggctggatgaccacaattaacggcaaggagctgaaggtggagggccagattacctactacaacagatacaagagacagaacgtagtcaaggacctgtccgtcgagctggatagactgagcgaagaatctgtgaacaacgacatctcctcctggacaaagggcagaagcggagaagctctgagcctcctgaagaaaagattctcccatagacccgtgcaggagaagttcgtgtgcctgaactgcggcttcgagacacacgcagccgagcaagccgccctgaacatcgccagatcctggctgttcctgcggagccaggagtacaagaaataccagacaaacaagacaaccggcaacaccgataagagagccttcgtcgagacctggcagtccttttaccggaagaagcttaaggaggtgtggaaacctgccgtgcggtctggcggatctggcggaggctccacaagcagcctggagcccgacagcttcggcgacgtggccgtgctgttcagccaggaggagtgggccaggctggcccccgcccagagggagctgtacagggacgtgatgctggagacctacagccacctggtgagcctgggcctggccgtgagcaagcccgacgtgatcagcttcctggagcagggcaaggagccctggctgggcgagaaggccgccgccggcggcctgggccccgagctggagagcaggaccagccccaagaaaaagagaaaagtctaagctgccttctgcggggcttgccttctggccatgcccttcttctctcccttgcacctgtacctcttggtctttgaataaagcctgagtaggaaggctagcaaaaaaaaaaaaaaaaaaaaaaaaaaaaaaaaaaaaaaaaaaaaaaaaaaaaaaaaaaaaaaaaaaaaaaaaaaaaaaaa

SEQ ID NO: 3459 - RNA, 5419 nt, synthetic construct
  source 1..5419: mol_type = other RNA
aggaaataagagagaaaagaagagtaagaagaaatataagagccaccatggcccctaagaagaagcgtaaagtgagccgggtgaacggcagcggcagcggcggcggcatgaaccacgaccaggagttcgacccccctaaggtgtaccctcccgtccccgccgagaagagaaagcccatccgggtcctgagcctgttcgatggcatcgccaccggtctgctggtgctgaaggacctgggcatccaggtggataggtacattgcctccgaggtgtgcgaggactccatcaccgtgggaatggtgcgtcatcagggcaagatcatgtacgtgggcgacgtgcggagcgtgacacagaagcatatccaggagtggggccctttcgacctggtgatcggcggcagcccttgcaatgacctgagcatcgtgaacccagcccggaagggcctgtacgagggaaccggcagactgttcttcgagttttacagactgctgcacgacgcccggcctaaggaaggcgacgaccggcccttcttttggctgttcgagaatgtggtggccatgggagtcagcgacaagcgggatattagccggttcctggagagcaaccccgtgatgatcgatgccaaggaagtgagcgccgcccaccgggccagatacttctggggcaatctgcctggcatgaacagacccctggccagcaccgtgaacgacaagctggagctgcaggagtgcctggagcacggccggatcgccaagttcagcaaggtgagaaccatcaccacccgaagcaacagcatcaaacaaggcaaggaccagcactttcctgtgttcatgaacgagaaggaggacatcctgtggtgtaccgagatggagagagtgttcgggttcccagtccactacacagatgtcagcaacatgtctagactggccagacagagactgctgggaagaagctggtccgtccctgtgatcagacacctgttcgcccctctgaaggagtacttcgcctgcgtgagcagcggcaacagcaacgccaacagccggggccccagcttctctagcggcctggtgccactgtccctgagagggagccacatgggccccatggagatctacaaaaccgtgagcgcctggaagcggcagcctgtgcgcgtgctgagcctgtttcggaatatcgataaagtcctgaaaagcctgggattcctggagagcggctctggctccggcggtggcaccctgaagtacgtggaggatgtgacaaacgtggtcagacgggatgtggagaagtggggccccttcgatctggtgtacggcagcacccaacccctgggcagctcttgtgaccggtgccctggctggtacatgtttcagttccaccggatcctgcagtacgccctgccgagacaggagtcccagcggccattcttttggattttcatggacaacttgctgctgaccgaggatgaccaggaaactaccactcggttcctgcagaccgaagccgtgaccctgcaggacgtgagaggccgggactaccagaacgccatgcgggtgtggtccaacatccctggactgaaaagcaagcacgcacctctgacccctaaagaagaggagtacctgcaggcccaggtgcggagcagaagcaagctggacgcccctaaggtggatctgctggtgaagaattgcctcctgcccctgagagagtacttcaagtatttcagccagaatagtctgcccctgggcggcccaagcagcggcgcccctcctcccagcggcggcagcccagccggctccccaacctctaccgaggagggcacctctgagtccgccacccccgagagcggccctggcacctccaccgagcccagcgagggcagcgcacccggcagccctgccggcagccccacctccacagaggagggaaccagcaccgagcccagcgaaggcagcgccccaggcaccagcaccgagcctagtgagggcggctctggcggcggcagcgcccaggagattaaacggatcaacaagatcagaagaagacttgtgaaagacagcaacaccaagaaggccggcaagacaggccccatgaaaaccctgctggttagagtgatgacacccgatctgagagagcggctggaaaacctgagaaagaagcctgaaaatatcccccagcccatcagcaatacatctagagccaacctgaataagctgctgaccgattacaccgaaatgaagaaggcgatcctgcatgtgtactgggaagagttccagaaggaccctgtgggcctgatgagccgggtggcccagcctgccagcaagaagatcgatcagaacaagctgaaacctgagatggacgagaagggcaacctgaccaccgccggctttgcctgctctcagtgtggccagcccctgttcgtgtacaagctggagcaggtgtctgagaagggcaaggcttacaccaactacttcggacggtgcaatgtggccgagcacgaaaagctgatcctgctggcccagctgaagcccgagaaggatagcgacgaagccgtgacatatagcctgggaaagtttgggcagagggccctggatttctacagcattcatgtgaccaaggagtccacccaccccgtgaagcccctggcccagatcgccggaaacagatacgcctccggacctgtgggaaaggccctgagcgacgcatgtatgggcacaatcgcctccttcctgtctaagtaccaggacatcatcatcgaacaccagaaggtggtgaagggcaaccagaagagactggagagcctgcgggagctggccggcaaggaaaacctggaataccctagcgtgaccctgccacctcagcctcacaccaaggagggcgttgatgcctacaacgaagtgatcgcccgggtgcgaatgtgggtgaacctgaacctgtggcagaagctgaagctaagcagagatgatgccaagcctctgctgagactgaagggattcccttcctttcctctggtcgagagacaggccaacgaagtggactggtgggacatggtgtgtaacgtgaagaagctgatcaacgagaaaaaggaggatggcaaggtgttttggcagaatctggctggctacaagagacaggaagccctgagaccatacctgagcagcgaggaagatcggaagaagggaaagaaattcgctcggtaccagctgggcgacctgctgctgcacctggaaaagaagcacggcgaggactggggaaaggtgtacgacgaggcctgggagcggattgacaagaaagtggaaggcctgagcaagcacatcaagctggaagaggaacggagaagcgaggacgcccagagcaaggccgccctgaccgactggctgcgggctaaggccagcttcgtgatcgagggcctgaaggaggccgacaaggacgagttctgcagatgcgagctgaagctgcagaagtggtacggggacctgcggggaaagcccttcgccatcgaagccgagaacagcatcctggacatcagcggcttcagcaagcagtacaactgtgccttcatctggcagaaggacggcgtgaagaagctgaacctgtacctgatcatcaactacttcaagggcggcaagctgcggttcaagaagatcaaacctgaagccttcgaagccaacagattctacaccgtgatcaacaaaaagagcggcgagatcgtgcccatggaggtgaacttcaacttcgacgaccccaacctgatcatcctgcctctggcctttggcaagagacagggcagagaattcatctggaacgacctgctgtccctggaaaccggcagcctgaagctggccaacggaagagtgatcgagaagacactgtacaacagaagaacccggcaggatgagcctgccctgttcgtggccctgaccttcgagcggcgggaggtcctggactcctccaatatcaaaccaatgaacctgatcggcgtggcaagaggcgaaaacatccccgccgtgatcgccctgaccgaccccgagggctgcccactgagccggtttaaggatagcctgggaaacccaacccacatcctgagaatcggcgagagctataaggagaagcagcggaccatccaggccaagaaggaggtggagcagcggagagccggcggctacagccggaagtacgccagcaaagccaagaatctggcagacgatatggtgagaaacaccgctagagatctgctgtactacgccgtgacccaggatgccatgctgatcttcgccaacctgagccggggcttcggccggcagggcaagcggaccttcatggccgagagacagtacacacggatggaggactggctgaccgccaagctggcctacgagggcctgagcaagacctacctgtccaagacactggcccagtacacctccaagacatgcagcaactgtgggtttaccatcaccagcgccgactacgacagggtgctggagaagctgaagaagacagcaacaggctggatgaccacaattaacggcaaggagctgaaggtggagggccagattacctactacaacagatacaagagacagaacgtagtcaaggacctgtccgtcgagctggatagactgagcgaagaatctgtgaacaacgacatctcctcctggacaaagggcagaagcggagaagctctgagcctcctgaagaaaagattctcccatagacccgtgcaggagaagttcgtgtgcctgaactgcggcttcgagacacacgcagccgagcaagccgccctgaacatcgccagatcctggctgttcctgcggagccaggagtacaagaaataccagacaaacaagacaaccggcaacaccgataagagagccttcgtcgagacctggcagtccttttaccggaagaagcttaaggaggtgtggaaacctgccgtgcggtctggcggatctggcggaggctccacaagcgcccacgacctggtggtgttcagggacgtgagcgtggacttcagccaggaggagtgggagtgcctgaacagctaccagaggaacctgtacagggacgtgatcctggagaactacagcaacctggtgagcctggccggctgcagcatcagcaagcccgacgtgatcaccctgctggagcagggcaaggagccctggatggtggtgaggaacgagaagaggaggtggaacctggacctggagagcaccagccccaagaaaaagagaaaagtctaagctgccttctgcggggcttgccttctggccatgcccttcttctctcccttgcacctgtacctcttggtctttgaataaagcctgagtaggaaggctagcaaaaaaaaaaaaaaaaaaaaaaaaaaaaaaaaaaaaaaaaaaaaaaaaaaaaaaaaaaaaaaaaaaaaaaaaaaaaaaaa

SEQ ID NO: 3460 - RNA, 5419 nt, synthetic construct
  source 1..5419: mol_type = other RNA
aggaaataagagagaaaagaagagtaagaagaaatataagagccaccatggcccctaagaagaagcgtaaagtgagccgggtgaacggcagcggcagcggcggcggcatgaaccacgaccaggagttcgacccccctaaggtgtaccctcccgtccccgccgagaagagaaagcccatccgggtcctgagcctgttcgatggcatcgccaccggtctgctggtgctgaaggacctgggcatccaggtggataggtacattgcctccgaggtgtgcgaggactccatcaccgtgggaatggtgcgtcatcagggcaagatcatgtacgtgggcgacgtgcggagcgtgacacagaagcatatccaggagtggggccctttcgacctggtgatcggcggcagcccttgcaatgacctgagcatcgtgaacccagcccggaagggcctgtacgagggaaccggcagactgttcttcgagttttacagactgctgcacgacgcccggcctaaggaaggcgacgaccggcccttcttttggctgttcgagaatgtggtggccatgggagtcagcgacaagcgggatattagccggttcctggagagcaaccccgtgatgatcgatgccaaggaagtgagcgccgcccaccgggccagatacttctggggcaatctgcctggcatgaacagacccctggccagcaccgtgaacgacaagctggagctgcaggagtgcctggagcacggccggatcgccaagttcagcaaggtgagaaccatcaccacccgaagcaacagcatcaaacaaggcaaggaccagcactttcctgtgttcatgaacgagaaggaggacatcctgtggtgtaccgagatggagagagtgttcgggttcccagtccactacacagatgtcagcaacatgtctagactggccagacagagactgctgggaagaagctggtccgtccctgtgatcagacacctgttcgcccctctgaaggagtacttcgcctgcgtgagcagcggcaacagcaacgccaacagccggggccccagcttctctagcggcctggtgccactgtccctgagagggagccacatgggccccatggagatctacaaaaccgtgagcgcctggaagcggcagcctgtgcgcgtgctgagcctgtttcggaatatcgataaagtcctgaaaagcctgggattcctggagagcggctctggctccggcggtggcaccctgaagtacgtggaggatgtgacaaacgtggtcagacgggatgtggagaagtggggccccttcgatctggtgtacggcagcacccaacccctgggcagctcttgtgaccggtgccctggctggtacatgtttcagttccaccggatcctgcagtacgccctgccgagacaggagtcccagcggccattcttttggattttcatggacaacttgctgctgaccgaggatgaccaggaaactaccactcggttcctgcagaccgaagccgtgaccctgcaggacgtgagaggccgggactaccagaacgccatgcgggtgtggtccaacatccctggactgaaaagcaagcacgcacctctgacccctaaagaagaggagtacctgcaggcccaggtgcggagcagaagcaagctggacgcccctaaggtggatctgctggtgaagaattgcctcctgcccctgagagagtacttcaagtatttcagccagaatagtctgcccctgggcggcccaagcagcggcgcccctcctcccagcggcggcagcccagccggctccccaacctctaccgaggagggcacctctgagtccgccacccccgagagcggccctggcacctccaccgagcccagcgagggcagcgcacccggcagccctgccggcagccccacctccacagaggagggaaccagcaccgagcccagcgaaggcagcgccccaggcaccagcaccgagcctagtgagggcggctctggcggcggcagcgcccaggagattaaacggatcaacaagatcagaagaagacttgtgaaagacagcaacaccaagaaggccggcaagacaggccccatgaaaaccctgctggttagagtgatgacacccgatctgagagagcggctggaaaacctgagaaagaagcctgaaaatatcccccagcccatcagcaatacatctagagccaacctgaataagctgctgaccgattacaccgaaatgaagaaggcgatcctgcatgtgtactgggaagagttccagaaggaccctgtgggcctgatgagccgggtggcccagcctgccagcaagaagatcgatcagaacaagctgaaacctgagatggacgagaagggcaacctgaccaccgccggctttgcctgctctcagtgtggccagcccctgttcgtgtacaagctggagcaggtgtctgagaagggcaaggcttacaccaactacttcggacggtgcaatgtggccgagcacgaaaagctgatcctgctggcccagctgaagcccgagaaggatagcgacgaagccgtgacatatagcctgggaaagtttgggcagagggccctggatttctacagcattcatgtgaccaaggagtccacccaccccgtgaagcccctggcccagatcgccggaaacagatacgcctccggacctgtgggaaaggccctgagcgacgcatgtatgggcacaatcgcctccttcctgtctaagtaccaggacatcatcatcgaacaccagaaggtggtgaagggcaaccagaagagactggagagcctgcgggagctggccggcaaggaaaacctggaataccctagcgtgaccctgccacctcagcctcacaccaaggagggcgttgatgcctacaacgaagtgatcgcccgggtgcgaatgtgggtgaacctgaacctgtggcagaagctgaagctaagcagagatgatgccaagcctctgctgagactgaagggattcccttcctttcctctggtcgagagacaggccaacgaagtggactggtgggacatggtgtgtaacgtgaagaagctgatcaacgagaaaaaggaggatggcaaggtgttttggcagaatctggctggctacaagagacaggaagccctgagaccatacctgagcagcgaggaagatcggaagaagggaaagaaattcgctcggtaccagctgggcgacctgctgctgcacctggaaaagaagcacggcgaggactggggaaaggtgtacgacgaggcctgggagcggattgacaagaaagtggaaggcctgagcaagcacatcaagctggaagaggaacggagaagcgaggacgcccagagcaaggccgccctgaccgactggctgcgggctaaggccagcttcgtgatcgagggcctgaaggaggccgacaaggacgagttctgcagatgcgagctgaagctgcagaagtggtacggggacctgcggggaaagcccttcgccatcgaagccgagaacagcatcctggacatcagcggcttcagcaagcagtacaactgtgccttcatctggcagaaggacggcgtgaagaagctgaacctgtacctgatcatcaactacttcaagggcggcaagctgcggttcaagaagatcaaacctgaagccttcgaagccaacagattctacaccgtgatcaacaaaaagagcggcgagatcgtgcccatggaggtgaacttcaacttcgacgaccccaacctgatcatcctgcctctggcctttggcaagagacagggcagagaattcatctggaacgacctgctgtccctggaaaccggcagcctgaagctggccaacggaagagtgatcgagaagacactgtacaacagaagaacccggcaggatgagcctgccctgttcgtggccctgaccttcgagcggcgggaggtcctggactcctccaatatcaaaccaatgaacctgatcggcgtggcaagaggcgaaaacatccccgccgtgatcgccctgaccgaccccgagggctgcccactgagccggtttaaggatagcctgggaaacccaacccacatcctgagaatcggcgagagctataaggagaagcagcggaccatccaggccaagaaggaggtggagcagcggagagccggcggctacagccggaagtacgccagcaaagccaagaatctggcagacgatatggtgagaaacaccgctagagatctgctgtactacgccgtgacccaggatgccatgctgatcttcgccaacctgagccggggcttcggccggcagggcaagcggaccttcatggccgagagacagtacacacggatggaggactggctgaccgccaagctggcctacgagggcctgagcaagacctacctgtccaagacactggcccagtacacctccaagacatgcagcaactgtgggtttaccatcaccagcgccgactacgacagggtgctggagaagctgaagaagacagcaacaggctggatgaccacaattaacggcaaggagctgaaggtggagggccagattacctactacaacagatacaagagacagaacgtagtcaaggacctgtccgtcgagctggatagactgagcgaagaatctgtgaacaacgacatctcctcctggacaaagggcagaagcggagaagctctgagcctcctgaagaaaagattctcccatagacccgtgcaggagaagttcgtgtgcctgaactgcggcttcgagacacacgcagccgagcaagccgccctgaacatcgccagatcctggctgttcctgcggagccaggagtacaagaaataccagacaaacaagacaaccggcaacaccgataagagagccttcgtcgagacctggcagtccttttaccggaagaagcttaaggaggtgtggaaacctgccgtgcggtctggcggatctggcggaggctccacaagcagcgtgatgttcagcgacgtgagcatcgacttcagcctggaggagtgggagttcctgaacctggagcagagggacctgtacagggacgtgatgctggagaactacagcaacctggtgagcctgggctgcttcatcagcaagcccgacgtgatcagcctgctggagcagggcaaggagccctggaaggtggtgaggcagggcaggaggcagtaccccgacctggagaccaactacgagatcaagaccagccccaagaaaaagagaaaagtctaagctgccttctgcggggcttgccttctggccatgcccttcttctctcccttgcacctgtacctcttggtctttgaataaagcctgagtaggaaggctagcaaaaaaaaaaaaaaaaaaaaaaaaaaaaaaaaaaaaaaaaaaaaaaaaaaaaaaaaaaaaaaaaaaaaaaaaaaaaaaaa

SEQ ID NO: 3461 - RNA, 5419 nt, synthetic construct
  source 1..5419: mol_type = other RNA
aggaaataagagagaaaagaagagtaagaagaaatataagagccaccatggcccctaagaagaagcgtaaagtgagccgggtgaacggcagcggcagcggcggcggcatgaaccacgaccaggagttcgacccccctaaggtgtaccctcccgtccccgccgagaagagaaagcccatccgggtcctgagcctgttcgatggcatcgccaccggtctgctggtgctgaaggacctgggcatccaggtggataggtacattgcctccgaggtgtgcgaggactccatcaccgtgggaatggtgcgtcatcagggcaagatcatgtacgtgggcgacgtgcggagcgtgacacagaagcatatccaggagtggggccctttcgacctggtgatcggcggcagcccttgcaatgacctgagcatcgtgaacccagcccggaagggcctgtacgagggaaccggcagactgttcttcgagttttacagactgctgcacgacgcccggcctaaggaaggcgacgaccggcccttcttttggctgttcgagaatgtggtggccatgggagtcagcgacaagcgggatattagccggttcctggagagcaaccccgtgatgatcgatgccaaggaagtgagcgccgcccaccgggccagatacttctggggcaatctgcctggcatgaacagacccctggccagcaccgtgaacgacaagctggagctgcaggagtgcctggagcacggccggatcgccaagttcagcaaggtgagaaccatcaccacccgaagcaacagcatcaaacaaggcaaggaccagcactttcctgtgttcatgaacgagaaggaggacatcctgtggtgtaccgagatggagagagtgttcgggttcccagtccactacacagatgtcagcaacatgtctagactggccagacagagactgctgggaagaagctggtccgtccctgtgatcagacacctgttcgcccctctgaaggagtacttcgcctgcgtgagcagcggcaacagcaacgccaacagccggggccccagcttctctagcggcctggtgccactgtccctgagagggagccacatgggccccatggagatctacaaaaccgtgagcgcctggaagcggcagcctgtgcgcgtgctgagcctgtttcggaatatcgataaagtcctgaaaagcctgggattcctggagagcggctctggctccggcggtggcaccctgaagtacgtggaggatgtgacaaacgtggtcagacgggatgtggagaagtggggccccttcgatctggtgtacggcagcacccaacccctgggcagctcttgtgaccggtgccctggctggtacatgtttcagttccaccggatcctgcagtacgccctgccgagacaggagtcccagcggccattcttttggattttcatggacaacttgctgctgaccgaggatgaccaggaaactaccactcggttcctgcagaccgaagccgtgaccctgcaggacgtgagaggccgggactaccagaacgccatgcgggtgtggtccaacatccctggactgaaaagcaagcacgcacctctgacccctaaagaagaggagtacctgcaggcccaggtgcggagcagaagcaagctggacgcccctaaggtggatctgctggtgaagaattgcctcctgcccctgagagagtacttcaagtatttcagccagaatagtctgcccctgggcggcccaagcagcggcgcccctcctcccagcggcggcagcccagccggctccccaacctctaccgaggagggcacctctgagtccgccacccccgagagcggccctggcacctccaccgagcccagcgagggcagcgcacccggcagccctgccggcagccccacctccacagaggagggaaccagcaccgagcccagcgaaggcagcgccccaggcaccagcaccgagcctagtgagggcggctctggcggcggcagcgcccaggagattaaacggatcaacaagatcagaagaagacttgtgaaagacagcaacaccaagaaggccggcaagacaggccccatgaaaaccctgctggttagagtgatgacacccgatctgagagagcggctggaaaacctgagaaagaagcctgaaaatatcccccagcccatcagcaatacatctagagccaacctgaataagctgctgaccgattacaccgaaatgaagaaggcgatcctgcatgtgtactgggaagagttccagaaggaccctgtgggcctgatgagccgggtggcccagcctgccagcaagaagatcgatcagaacaagctgaaacctgagatggacgagaagggcaacctgaccaccgccggctttgcctgctctcagtgtggccagcccctgttcgtgtacaagctggagcaggtgtctgagaagggcaaggcttacaccaactacttcggacggtgcaatgtggccgagcacgaaaagctgatcctgctggcccagctgaagcccgagaaggatagcgacgaagccgtgacatatagcctgggaaagtttgggcagagggccctggatttctacagcattcatgtgaccaaggagtccacccaccccgtgaagcccctggcccagatcgccggaaacagatacgcctccggacctgtgggaaaggccctgagcgacgcatgtatgggcacaatcgcctccttcctgtctaagtaccaggacatcatcatcgaacaccagaaggtggtgaagggcaaccagaagagactggagagcctgcgggagctggccggcaaggaaaacctggaataccctagcgtgaccctgccacctcagcctcacaccaaggagggcgttgatgcctacaacgaagtgatcgcccgggtgcgaatgtgggtgaacctgaacctgtggcagaagctgaagctaagcagagatgatgccaagcctctgctgagactgaagggattcccttcctttcctctggtcgagagacaggccaacgaagtggactggtgggacatggtgtgtaacgtgaagaagctgatcaacgagaaaaaggaggatggcaaggtgttttggcagaatctggctggctacaagagacaggaagccctgagaccatacctgagcagcgaggaagatcggaagaagggaaagaaattcgctcggtaccagctgggcgacctgctgctgcacctggaaaagaagcacggcgaggactggggaaaggtgtacgacgaggcctgggagcggattgacaagaaagtggaaggcctgagcaagcacatcaagctggaagaggaacggagaagcgaggacgcccagagcaaggccgccctgaccgactggctgcgggctaaggccagcttcgtgatcgagggcctgaaggaggccgacaaggacgagttctgcagatgcgagctgaagctgcagaagtggtacggggacctgcggggaaagcccttcgccatcgaagccgagaacagcatcctggacatcagcggcttcagcaagcagtacaactgtgccttcatctggcagaaggacggcgtgaagaagctgaacctgtacctgatcatcaactacttcaagggcggcaagctgcggttcaagaagatcaaacctgaagccttcgaagccaacagattctacaccgtgatcaacaaaaagagcggcgagatcgtgcccatggaggtgaacttcaacttcgacgaccccaacctgatcatcctgcctctggcctttggcaagagacagggcagagaattcatctggaacgacctgctgtccctggaaaccggcagcctgaagctggccaacggaagagtgatcgagaagacactgtacaacagaagaacccggcaggatgagcctgccctgttcgtggccctgaccttcgagcggcgggaggtcctggactcctccaatatcaaaccaatgaacctgatcggcgtggcaagaggcgaaaacatccccgccgtgatcgccctgaccgaccccgagggctgcccactgagccggtttaaggatagcctgggaaacccaacccacatcctgagaatcggcgagagctataaggagaagcagcggaccatccaggccaagaaggaggtggagcagcggagagccggcggctacagccggaagtacgccagcaaagccaagaatctggcagacgatatggtgagaaacaccgctagagatctgctgtactacgccgtgacccaggatgccatgctgatcttcgccaacctgagccggggcttcggccggcagggcaagcggaccttcatggccgagagacagtacacacggatggaggactggctgaccgccaagctggcctacgagggcctgagcaagacctacctgtccaagacactggcccagtacacctccaagacatgcagcaactgtgggtttaccatcaccagcgccgactacgacagggtgctggagaagctgaagaagacagcaacaggctggatgaccacaattaacggcaaggagctgaaggtggagggccagattacctactacaacagatacaagagacagaacgtagtcaaggacctgtccgtcgagctggatagactgagcgaagaatctgtgaacaacgacatctcctcctggacaaagggcagaagcggagaagctctgagcctcctgaagaaaagattctcccatagacccgtgcaggagaagttcgtgtgcctgaactgcggcttcgagacacacgcagccgagcaagccgccctgaacatcgccagatcctggctgttcctgcggagccaggagtacaagaaataccagacaaacaagacaaccggcaacaccgataagagagccttcgtcgagacctggcagtccttttaccggaagaagcttaaggaggtgtggaaacctgccgtgcggtctggcggatctggcggaggctccacaagcgccgtgacccagctgaccttcgaggacgtggccgtggacttcacccccgaggagtggaggtgcctgacccccgcccagagggccctgtacagggacgtgatgctggacacctacaggaacctggtgagcgtgggcgtgagcccccccagcatgagcgtgatcctgcccctggagttccaggaggagccctgggtggcccagagccacgtgaccaccctgggcggcctgaacggctgggagggcaccagccccaagaaaaagagaaaagtctaagctgccttctgcggggcttgccttctggccatgcccttcttctctcccttgcacctgtacctcttggtctttgaataaagcctgagtaggaaggctagcaaaaaaaaaaaaaaaaaaaaaaaaaaaaaaaaaaaaaaaaaaaaaaaaaaaaaaaaaaaaaaaaaaaaaaaaaaaaaaaa

SEQ ID NO: 3462 - RNA, 5419 nt, synthetic construct
  source 1..5419: mol_type = other RNA
aggaaataagagagaaaagaagagtaagaagaaatataagagccaccatggcccctaagaagaagcgtaaagtgagccgggtgaacggcagcggcagcggcggcggcatgaaccacgaccaggagttcgacccccctaaggtgtaccctcccgtccccgccgagaagagaaagcccatccgggtcctgagcctgttcgatggcatcgccaccggtctgctggtgctgaaggacctgggcatccaggtggataggtacattgcctccgaggtgtgcgaggactccatcaccgtgggaatggtgcgtcatcagggcaagatcatgtacgtgggcgacgtgcggagcgtgacacagaagcatatccaggagtggggccctttcgacctggtgatcggcggcagcccttgcaatgacctgagcatcgtgaacccagcccggaagggcctgtacgagggaaccggcagactgttcttcgagttttacagactgctgcacgacgcccggcctaaggaaggcgacgaccggcccttcttttggctgttcgagaatgtggtggccatgggagtcagcgacaagcgggatattagccggttcctggagagcaaccccgtgatgatcgatgccaaggaagtgagcgccgcccaccgggccagatacttctggggcaatctgcctggcatgaacagacccctggccagcaccgtgaacgacaagctggagctgcaggagtgcctggagcacggccggatcgccaagttcagcaaggtgagaaccatcaccacccgaagcaacagcatcaaacaaggcaaggaccagcactttcctgtgttcatgaacgagaaggaggacatcctgtggtgtaccgagatggagagagtgttcgggttcccagtccactacacagatgtcagcaacatgtctagactggccagacagagactgctgggaagaagctggtccgtccctgtgatcagacacctgttcgcccctctgaaggagtacttcgcctgcgtgagcagcggcaacagcaacgccaacagccggggccccagcttctctagcggcctggtgccactgtccctgagagggagccacatgggccccatggagatctacaaaaccgtgagcgcctggaagcggcagcctgtgcgcgtgctgagcctgtttcggaatatcgataaagtcctgaaaagcctgggattcctggagagcggctctggctccggcggtggcaccctgaagtacgtggaggatgtgacaaacgtggtcagacgggatgtggagaagtggggccccttcgatctggtgtacggcagcacccaacccctgggcagctcttgtgaccggtgccctggctggtacatgtttcagttccaccggatcctgcagtacgccctgccgagacaggagtcccagcggccattcttttggattttcatggacaacttgctgctgaccgaggatgaccaggaaactaccactcggttcctgcagaccgaagccgtgaccctgcaggacgtgagaggccgggactaccagaacgccatgcgggtgtggtccaacatccctggactgaaaagcaagcacgcacctctgacccctaaagaagaggagtacctgcaggcccaggtgcggagcagaagcaagctggacgcccctaaggtggatctgctggtgaagaattgcctcctgcccctgagagagtacttcaagtatttcagccagaatagtctgcccctgggcggcccaagcagcggcgcccctcctcccagcggcggcagcccagccggctccccaacctctaccgaggagggcacctctgagtccgccacccccgagagcggccctggcacctccaccgagcccagcgagggcagcgcacccggcagccctgccggcagccccacctccacagaggagggaaccagcaccgagcccagcgaaggcagcgccccaggcaccagcaccgagcctagtgagggcggctctggcggcggcagcgcccaggagattaaacggatcaacaagatcagaagaagacttgtgaaagacagcaacaccaagaaggccggcaagacaggccccatgaaaaccctgctggttagagtgatgacacccgatctgagagagcggctggaaaacctgagaaagaagcctgaaaatatcccccagcccatcagcaatacatctagagccaacctgaataagctgctgaccgattacaccgaaatgaagaaggcgatcctgcatgtgtactgggaagagttccagaaggaccctgtgggcctgatgagccgggtggcccagcctgccagcaagaagatcgatcagaacaagctgaaacctgagatggacgagaagggcaacctgaccaccgccggctttgcctgctctcagtgtggccagcccctgttcgtgtacaagctggagcaggtgtctgagaagggcaaggcttacaccaactacttcggacggtgcaatgtggccgagcacgaaaagctgatcctgctggcccagctgaagcccgagaaggatagcgacgaagccgtgacatatagcctgggaaagtttgggcagagggccctggatttctacagcattcatgtgaccaaggagtccacccaccccgtgaagcccctggcccagatcgccggaaacagatacgcctccggacctgtgggaaaggccctgagcgacgcatgtatgggcacaatcgcctccttcctgtctaagtaccaggacatcatcatcgaacaccagaaggtggtgaagggcaaccagaagagactggagagcctgcgggagctggccggcaaggaaaacctggaataccctagcgtgaccctgccacctcagcctcacaccaaggagggcgttgatgcctacaacgaagtgatcgcccgggtgcgaatgtgggtgaacctgaacctgtggcagaagctgaagctaagcagagatgatgccaagcctctgctgagactgaagggattcccttcctttcctctggtcgagagacaggccaacgaagtggactggtgggacatggtgtgtaacgtgaagaagctgatcaacgagaaaaaggaggatggcaaggtgttttggcagaatctggctggctacaagagacaggaagccctgagaccatacctgagcagcgaggaagatcggaagaagggaaagaaattcgctcggtaccagctgggcgacctgctgctgcacctggaaaagaagcacggcgaggactggggaaaggtgtacgacgaggcctgggagcggattgacaagaaagtggaaggcctgagcaagcacatcaagctggaagaggaacggagaagcgaggacgcccagagcaaggccgccctgaccgactggctgcgggctaaggccagcttcgtgatcgagggcctgaaggaggccgacaaggacgagttctgcagatgcgagctgaagctgcagaagtggtacggggacctgcggggaaagcccttcgccatcgaagccgagaacagcatcctggacatcagcggcttcagcaagcagtacaactgtgccttcatctggcagaaggacggcgtgaagaagctgaacctgtacctgatcatcaactacttcaagggcggcaagctgcggttcaagaagatcaaacctgaagccttcgaagccaacagattctacaccgtgatcaacaaaaagagcggcgagatcgtgcccatggaggtgaacttcaacttcgacgaccccaacctgatcatcctgcctctggcctttggcaagagacagggcagagaattcatctggaacgacctgctgtccctggaaaccggcagcctgaagctggccaacggaagagtgatcgagaagacactgtacaacagaagaacccggcaggatgagcctgccctgttcgtggccctgaccttcgagcggcgggaggtcctggactcctccaatatcaaaccaatgaacctgatcggcgtggcaagaggcgaaaacatccccgccgtgatcgccctgaccgaccccgagggctgcccactgagccggtttaaggatagcctgggaaacccaacccacatcctgagaatcggcgagagctataaggagaagcagcggaccatccaggccaagaaggaggtggagcagcggagagccggcggctacagccggaagtacgccagcaaagccaagaatctggcagacgatatggtgagaaacaccgctagagatctgctgtactacgccgtgacccaggatgccatgctgatcttcgccaacctgagccggggcttcggccggcagggcaagcggaccttcatggccgagagacagtacacacggatggaggactggctgaccgccaagctggcctacgagggcctgagcaagacctacctgtccaagacactggcccagtacacctccaagacatgcagcaactgtgggtttaccatcaccagcgccgactacgacagggtgctggagaagctgaagaagacagcaacaggctggatgaccacaattaacggcaaggagctgaaggtggagggccagattacctactacaacagatacaagagacagaacgtagtcaaggacctgtccgtcgagctggatagactgagcgaagaatctgtgaacaacgacatctcctcctggacaaagggcagaagcggagaagctctgagcctcctgaagaaaagattctcccatagacccgtgcaggagaagttcgtgtgcctgaactgcggcttcgagacacacgcagccgagcaagccgccctgaacatcgccagatcctggctgttcctgcggagccaggagtacaagaaataccagacaaacaagacaaccggcaacaccgataagagagccttcgtcgagacctggcagtccttttaccggaagaagcttaaggaggtgtggaaacctgccgtgcggtctggcggatctggcggaggctccacaagccaccaggaggtggtgaccttcgaggacgtggccgtgtacttcaccaggaccgagtgggccggcctgagccccgcccagagggccctgtacaggagcgtgatgctggagatctacaggagcctgaccagcctgggctaccccgtgcccaagcccgccctgatcagcctgctggagaggggcgacctgcccgtgggcctggagacccaggacaacccccccgcccagggcaccagggacatctacaccagccccaagaaaaagagaaaagtctaagctgccttctgcggggcttgccttctggccatgcccttcttctctcccttgcacctgtacctcttggtctttgaataaagcctgagtaggaaggctagcaaaaaaaaaaaaaaaaaaaaaaaaaaaaaaaaaaaaaaaaaaaaaaaaaaaaaaaaaaaaaaaaaaaaaaaaaaaaaaaa

SEQ ID NO: 3463 - RNA, 5419 nt, synthetic construct
  source 1..5419: mol_type = other RNA
aggaaataagagagaaaagaagagtaagaagaaatataagagccaccatggcccctaagaagaagcgtaaagtgagccgggtgaacggcagcggcagcggcggcggcatgaaccacgaccaggagttcgacccccctaaggtgtaccctcccgtccccgccgagaagagaaagcccatccgggtcctgagcctgttcgatggcatcgccaccggtctgctggtgctgaaggacctgggcatccaggtggataggtacattgcctccgaggtgtgcgaggactccatcaccgtgggaatggtgcgtcatcagggcaagatcatgtacgtgggcgacgtgcggagcgtgacacagaagcatatccaggagtggggccctttcgacctggtgatcggcggcagcccttgcaatgacctgagcatcgtgaacccagcccggaagggcctgtacgagggaaccggcagactgttcttcgagttttacagactgctgcacgacgcccggcctaaggaaggcgacgaccggcccttcttttggctgttcgagaatgtggtggccatgggagtcagcgacaagcgggatattagccggttcctggagagcaaccccgtgatgatcgatgccaaggaagtgagcgccgcccaccgggccagatacttctggggcaatctgcctggcatgaacagacccctggccagcaccgtgaacgacaagctggagctgcaggagtgcctggagcacggccggatcgccaagttcagcaaggtgagaaccatcaccacccgaagcaacagcatcaaacaaggcaaggaccagcactttcctgtgttcatgaacgagaaggaggacatcctgtggtgtaccgagatggagagagtgttcgggttcccagtccactacacagatgtcagcaacatgtctagactggccagacagagactgctgggaagaagctggtccgtccctgtgatcagacacctgttcgcccctctgaaggagtacttcgcctgcgtgagcagcggcaacagcaacgccaacagccggggccccagcttctctagcggcctggtgccactgtccctgagagggagccacatgggccccatggagatctacaaaaccgtgagcgcctggaagcggcagcctgtgcgcgtgctgagcctgtttcggaatatcgataaagtcctgaaaagcctgggattcctggagagcggctctggctccggcggtggcaccctgaagtacgtggaggatgtgacaaacgtggtcagacgggatgtggagaagtggggccccttcgatctggtgtacggcagcacccaacccctgggcagctcttgtgaccggtgccctggctggtacatgtttcagttccaccggatcctgcagtacgccctgccgagacaggagtcccagcggccattcttttggattttcatggacaacttgctgctgaccgaggatgaccaggaaactaccactcggttcctgcagaccgaagccgtgaccctgcaggacgtgagaggccgggactaccagaacgccatgcgggtgtggtccaacatccctggactgaaaagcaagcacgcacctctgacccctaaagaagaggagtacctgcaggcccaggtgcggagcagaagcaagctggacgcccctaaggtggatctgctggtgaagaattgcctcctgcccctgagagagtacttcaagtatttcagccagaatagtctgcccctgggcggcccaagcagcggcgcccctcctcccagcggcggcagcccagccggctccccaacctctaccgaggagggcacctctgagtccgccacccccgagagcggccctggcacctccaccgagcccagcgagggcagcgcacccggcagccctgccggcagccccacctccacagaggagggaaccagcaccgagcccagcgaaggcagcgccccaggcaccagcaccgagcctagtgagggcggctctggcggcggcagcgcccaggagattaaacggatcaacaagatcagaagaagacttgtgaaagacagcaacaccaagaaggccggcaagacaggccccatgaaaaccctgctggttagagtgatgacacccgatctgagagagcggctggaaaacctgagaaagaagcctgaaaatatcccccagcccatcagcaatacatctagagccaacctgaataagctgctgaccgattacaccgaaatgaagaaggcgatcctgcatgtgtactgggaagagttccagaaggaccctgtgggcctgatgagccgggtggcccagcctgccagcaagaagatcgatcagaacaagctgaaacctgagatggacgagaagggcaacctgaccaccgccggctttgcctgctctcagtgtggccagcccctgttcgtgtacaagctggagcaggtgtctgagaagggcaaggcttacaccaactacttcggacggtgcaatgtggccgagcacgaaaagctgatcctgctggcccagctgaagcccgagaaggatagcgacgaagccgtgacatatagcctgggaaagtttgggcagagggccctggatttctacagcattcatgtgaccaaggagtccacccaccccgtgaagcccctggcccagatcgccggaaacagatacgcctccggacctgtgggaaaggccctgagcgacgcatgtatgggcacaatcgcctccttcctgtctaagtaccaggacatcatcatcgaacaccagaaggtggtgaagggcaaccagaagagactggagagcctgcgggagctggccggcaaggaaaacctggaataccctagcgtgaccctgccacctcagcctcacaccaaggagggcgttgatgcctacaacgaagtgatcgcccgggtgcgaatgtgggtgaacctgaacctgtggcagaagctgaagctaagcagagatgatgccaagcctctgctgagactgaagggattcccttcctttcctctggtcgagagacaggccaacgaagtggactggtgggacatggtgtgtaacgtgaagaagctgatcaacgagaaaaaggaggatggcaaggtgttttggcagaatctggctggctacaagagacaggaagccctgagaccatacctgagcagcgaggaagatcggaagaagggaaagaaattcgctcggtaccagctgggcgacctgctgctgcacctggaaaagaagcacggcgaggactggggaaaggtgtacgacgaggcctgggagcggattgacaagaaagtggaaggcctgagcaagcacatcaagctggaagaggaacggagaagcgaggacgcccagagcaaggccgccctgaccgactggctgcgggctaaggccagcttcgtgatcgagggcctgaaggaggccgacaaggacgagttctgcagatgcgagctgaagctgcagaagtggtacggggacctgcggggaaagcccttcgccatcgaagccgagaacagcatcctggacatcagcggcttcagcaagcagtacaactgtgccttcatctggcagaaggacggcgtgaagaagctgaacctgtacctgatcatcaactacttcaagggcggcaagctgcggttcaagaagatcaaacctgaagccttcgaagccaacagattctacaccgtgatcaacaaaaagagcggcgagatcgtgcccatggaggtgaacttcaacttcgacgaccccaacctgatcatcctgcctctggcctttggcaagagacagggcagagaattcatctggaacgacctgctgtccctggaaaccggcagcctgaagctggccaacggaagagtgatcgagaagacactgtacaacagaagaacccggcaggatgagcctgccctgttcgtggccctgaccttcgagcggcgggaggtcctggactcctccaatatcaaaccaatgaacctgatcggcgtggcaagaggcgaaaacatccccgccgtgatcgccctgaccgaccccgagggctgcccactgagccggtttaaggatagcctgggaaacccaacccacatcctgagaatcggcgagagctataaggagaagcagcggaccatccaggccaagaaggaggtggagcagcggagagccggcggctacagccggaagtacgccagcaaagccaagaatctggcagacgatatggtgagaaacaccgctagagatctgctgtactacgccgtgacccaggatgccatgctgatcttcgccaacctgagccggggcttcggccggcagggcaagcggaccttcatggccgagagacagtacacacggatggaggactggctgaccgccaagctggcctacgagggcctgagcaagacctacctgtccaagacactggcccagtacacctccaagacatgcagcaactgtgggtttaccatcaccagcgccgactacgacagggtgctggagaagctgaagaagacagcaacaggctggatgaccacaattaacggcaaggagctgaaggtggagggccagattacctactacaacagatacaagagacagaacgtagtcaaggacctgtccgtcgagctggatagactgagcgaagaatctgtgaacaacgacatctcctcctggacaaagggcagaagcggagaagctctgagcctcctgaagaaaagattctcccatagacccgtgcaggagaagttcgtgtgcctgaactgcggcttcgagacacacgcagccgagcaagccgccctgaacatcgccagatcctggctgttcctgcggagccaggagtacaagaaataccagacaaacaagacaaccggcaacaccgataagagagccttcgtcgagacctggcagtccttttaccggaagaagcttaaggaggtgtggaaacctgccgtgcggtctggcggatctggcggaggctccacaagcgcccaggagagcgtgatgttcagcgacgtgagcgtggacttcagccaggaggagtgggagtgcctgaacgacgaccagagggacctgtacagggacgtgatgctggagaactacagcaacctggtgagcatgggccacagcgtgagcaagcccaacgtgatcagctacctggagcagggcaaggagccctggctggtggacagggagctgaccaggggccagtggcccgtgctggagagcaggaccagccccaagaaaaagagaaaagtctaagctgccttctgcggggcttgccttctggccatgcccttcttctctcccttgcacctgtacctcttggtctttgaataaagcctgagtaggaaggctagcaaaaaaaaaaaaaaaaaaaaaaaaaaaaaaaaaaaaaaaaaaaaaaaaaaaaaaaaaaaaaaaaaaaaaaaaaaaaaaaa

SEQ ID NO: 3464 - RNA, 5419 nt, synthetic construct
  source 1..5419: mol_type = other RNA
aggaaataagagagaaaagaagagtaagaagaaatataagagccaccatggcccctaagaagaagcgtaaagtgagccgggtgaacggcagcggcagcggcggcggcatgaaccacgaccaggagttcgacccccctaaggtgtaccctcccgtccccgccgagaagagaaagcccatccgggtcctgagcctgttcgatggcatcgccaccggtctgctggtgctgaaggacctgggcatccaggtggataggtacattgcctccgaggtgtgcgaggactccatcaccgtgggaatggtgcgtcatcagggcaagatcatgtacgtgggcgacgtgcggagcgtgacacagaagcatatccaggagtggggccctttcgacctggtgatcggcggcagcccttgcaatgacctgagcatcgtgaacccagcccggaagggcctgtacgagggaaccggcagactgttcttcgagttttacagactgctgcacgacgcccggcctaaggaaggcgacgaccggcccttcttttggctgttcgagaatgtggtggccatgggagtcagcgacaagcgggatattagccggttcctggagagcaaccccgtgatgatcgatgccaaggaagtgagcgccgcccaccgggccagatacttctggggcaatctgcctggcatgaacagacccctggccagcaccgtgaacgacaagctggagctgcaggagtgcctggagcacggccggatcgccaagttcagcaaggtgagaaccatcaccacccgaagcaacagcatcaaacaaggcaaggaccagcactttcctgtgttcatgaacgagaaggaggacatcctgtggtgtaccgagatggagagagtgttcgggttcccagtccactacacagatgtcagcaacatgtctagactggccagacagagactgctgggaagaagctggtccgtccctgtgatcagacacctgttcgcccctctgaaggagtacttcgcctgcgtgagcagcggcaacagcaacgccaacagccggggccccagcttctctagcggcctggtgccactgtccctgagagggagccacatgggccccatggagatctacaaaaccgtgagcgcctggaagcggcagcctgtgcgcgtgctgagcctgtttcggaatatcgataaagtcctgaaaagcctgggattcctggagagcggctctggctccggcggtggcaccctgaagtacgtggaggatgtgacaaacgtggtcagacgggatgtggagaagtggggccccttcgatctggtgtacggcagcacccaacccctgggcagctcttgtgaccggtgccctggctggtacatgtttcagttccaccggatcctgcagtacgccctgccgagacaggagtcccagcggccattcttttggattttcatggacaacttgctgctgaccgaggatgaccaggaaactaccactcggttcctgcagaccgaagccgtgaccctgcaggacgtgagaggccgggactaccagaacgccatgcgggtgtggtccaacatccctggactgaaaagcaagcacgcacctctgacccctaaagaagaggagtacctgcaggcccaggtgcggagcagaagcaagctggacgcccctaaggtggatctgctggtgaagaattgcctcctgcccctgagagagtacttcaagtatttcagccagaatagtctgcccctgggcggcccaagcagcggcgcccctcctcccagcggcggcagcccagccggctccccaacctctaccgaggagggcacctctgagtccgccacccccgagagcggccctggcacctccaccgagcccagcgagggcagcgcacccggcagccctgccggcagccccacctccacagaggagggaaccagcaccgagcccagcgaaggcagcgccccaggcaccagcaccgagcctagtgagggcggctctggcggcggcagcgcccaggagattaaacggatcaacaagatcagaagaagacttgtgaaagacagcaacaccaagaaggccggcaagacaggccccatgaaaaccctgctggttagagtgatgacacccgatctgagagagcggctggaaaacctgagaaagaagcctgaaaatatcccccagcccatcagcaatacatctagagccaacctgaataagctgctgaccgattacaccgaaatgaagaaggcgatcctgcatgtgtactgggaagagttccagaaggaccctgtgggcctgatgagccgggtggcccagcctgccagcaagaagatcgatcagaacaagctgaaacctgagatggacgagaagggcaacctgaccaccgccggctttgcctgctctcagtgtggccagcccctgttcgtgtacaagctggagcaggtgtctgagaagggcaaggcttacaccaactacttcggacggtgcaatgtggccgagcacgaaaagctgatcctgctggcccagctgaagcccgagaaggatagcgacgaagccgtgacatatagcctgggaaagtttgggcagagggccctggatttctacagcattcatgtgaccaaggagtccacccaccccgtgaagcccctggcccagatcgccggaaacagatacgcctccggacctgtgggaaaggccctgagcgacgcatgtatgggcacaatcgcctccttcctgtctaagtaccaggacatcatcatcgaacaccagaaggtggtgaagggcaaccagaagagactggagagcctgcgggagctggccggcaaggaaaacctggaataccctagcgtgaccctgccacctcagcctcacaccaaggagggcgttgatgcctacaacgaagtgatcgcccgggtgcgaatgtgggtgaacctgaacctgtggcagaagctgaagctaagcagagatgatgccaagcctctgctgagactgaagggattcccttcctttcctctggtcgagagacaggccaacgaagtggactggtgggacatggtgtgtaacgtgaagaagctgatcaacgagaaaaaggaggatggcaaggtgttttggcagaatctggctggctacaagagacaggaagccctgagaccatacctgagcagcgaggaagatcggaagaagggaaagaaattcgctcggtaccagctgggcgacctgctgctgcacctggaaaagaagcacggcgaggactggggaaaggtgtacgacgaggcctgggagcggattgacaagaaagtggaaggcctgagcaagcacatcaagctggaagaggaacggagaagcgaggacgcccagagcaaggccgccctgaccgactggctgcgggctaaggccagcttcgtgatcgagggcctgaaggaggccgacaaggacgagttctgcagatgcgagctgaagctgcagaagtggtacggggacctgcggggaaagcccttcgccatcgaagccgagaacagcatcctggacatcagcggcttcagcaagcagtacaactgtgccttcatctggcagaaggacggcgtgaagaagctgaacctgtacctgatcatcaactacttcaagggcggcaagctgcggttcaagaagatcaaacctgaagccttcgaagccaacagattctacaccgtgatcaacaaaaagagcggcgagatcgtgcccatggaggtgaacttcaacttcgacgaccccaacctgatcatcctgcctctggcctttggcaagagacagggcagagaattcatctggaacgacctgctgtccctggaaaccggcagcctgaagctggccaacggaagagtgatcgagaagacactgtacaacagaagaacccggcaggatgagcctgccctgttcgtggccctgaccttcgagcggcgggaggtcctggactcctccaatatcaaaccaatgaacctgatcggcgtggcaagaggcgaaaacatccccgccgtgatcgccctgaccgaccccgagggctgcccactgagccggtttaaggatagcctgggaaacccaacccacatcctgagaatcggcgagagctataaggagaagcagcggaccatccaggccaagaaggaggtggagcagcggagagccggcggctacagccggaagtacgccagcaaagccaagaatctggcagacgatatggtgagaaacaccgctagagatctgctgtactacgccgtgacccaggatgccatgctgatcttcgccaacctgagccggggcttcggccggcagggcaagcggaccttcatggccgagagacagtacacacggatggaggactggctgaccgccaagctggcctacgagggcctgagcaagacctacctgtccaagacactggcccagtacacctccaagacatgcagcaactgtgggtttaccatcaccagcgccgactacgacagggtgctggagaagctgaagaagacagcaacaggctggatgaccacaattaacggcaaggagctgaaggtggagggccagattacctactacaacagatacaagagacagaacgtagtcaaggacctgtccgtcgagctggatagactgagcgaagaatctgtgaacaacgacatctcctcctggacaaagggcagaagcggagaagctctgagcctcctgaagaaaagattctcccatagacccgtgcaggagaagttcgtgtgcctgaactgcggcttcgagacacacgcagccgagcaagccgccctgaacatcgccagatcctggctgttcctgcggagccaggagtacaagaaataccagacaaacaagacaaccggcaacaccgataagagagccttcgtcgagacctggcagtccttttaccggaagaagcttaaggaggtgtggaaacctgccgtgcggtctggcggatctggcggaggctccacaagcatggtgagcttcgaggacgtggccgtgcccctgagccaggaggagtggaactgcctgatccccgcccagaggggcctgtacagggacgtgatgctggagacctacggcaacctggtgagcctgggcctgcaggccagcaagcccgacgtgatcagcaggctggagcagggcgacgagccctggaccccccacatcctgaggacccagggcagctggagctggaggcacaagagggagggctacaccagccccaagaaaaagagaaaagtctaagctgccttctgcggggcttgccttctggccatgcccttcttctctcccttgcacctgtacctcttggtctttgaataaagcctgagtaggaaggctagcaaaaaaaaaaaaaaaaaaaaaaaaaaaaaaaaaaaaaaaaaaaaaaaaaaaaaaaaaaaaaaaaaaaaaaaaaaaaaaaa

SEQ ID NO: 3465 - RNA, 5419 nt, synthetic construct
  source 1..5419: mol_type = other RNA
aggaaataagagagaaaagaagagtaagaagaaatataagagccaccatggcccctaagaagaagcgtaaagtgagccgggtgaacggcagcggcagcggcggcggcatgaaccacgaccaggagttcgacccccctaaggtgtaccctcccgtccccgccgagaagagaaagcccatccgggtcctgagcctgttcgatggcatcgccaccggtctgctggtgctgaaggacctgggcatccaggtggataggtacattgcctccgaggtgtgcgaggactccatcaccgtgggaatggtgcgtcatcagggcaagatcatgtacgtgggcgacgtgcggagcgtgacacagaagcatatccaggagtggggccctttcgacctggtgatcggcggcagcccttgcaatgacctgagcatcgtgaacccagcccggaagggcctgtacgagggaaccggcagactgttcttcgagttttacagactgctgcacgacgcccggcctaaggaaggcgacgaccggcccttcttttggctgttcgagaatgtggtggccatgggagtcagcgacaagcgggatattagccggttcctggagagcaaccccgtgatgatcgatgccaaggaagtgagcgccgcccaccgggccagatacttctggggcaatctgcctggcatgaacagacccctggccagcaccgtgaacgacaagctggagctgcaggagtgcctggagcacggccggatcgccaagttcagcaaggtgagaaccatcaccacccgaagcaacagcatcaaacaaggcaaggaccagcactttcctgtgttcatgaacgagaaggaggacatcctgtggtgtaccgagatggagagagtgttcgggttcccagtccactacacagatgtcagcaacatgtctagactggccagacagagactgctgggaagaagctggtccgtccctgtgatcagacacctgttcgcccctctgaaggagtacttcgcctgcgtgagcagcggcaacagcaacgccaacagccggggccccagcttctctagcggcctggtgccactgtccctgagagggagccacatgggccccatggagatctacaaaaccgtgagcgcctggaagcggcagcctgtgcgcgtgctgagcctgtttcggaatatcgataaagtcctgaaaagcctgggattcctggagagcggctctggctccggcggtggcaccctgaagtacgtggaggatgtgacaaacgtggtcagacgggatgtggagaagtggggccccttcgatctggtgtacggcagcacccaacccctgggcagctcttgtgaccggtgccctggctggtacatgtttcagttccaccggatcctgcagtacgccctgccgagacaggagtcccagcggccattcttttggattttcatggacaacttgctgctgaccgaggatgaccaggaaactaccactcggttcctgcagaccgaagccgtgaccctgcaggacgtgagaggccgggactaccagaacgccatgcgggtgtggtccaacatccctggactgaaaagcaagcacgcacctctgacccctaaagaagaggagtacctgcaggcccaggtgcggagcagaagcaagctggacgcccctaaggtggatctgctggtgaagaattgcctcctgcccctgagagagtacttcaagtatttcagccagaatagtctgcccctgggcggcccaagcagcggcgcccctcctcccagcggcggcagcccagccggctccccaacctctaccgaggagggcacctctgagtccgccacccccgagagcggccctggcacctccaccgagcccagcgagggcagcgcacccggcagccctgccggcagccccacctccacagaggagggaaccagcaccgagcccagcgaaggcagcgccccaggcaccagcaccgagcctagtgagggcggctctggcggcggcagcgcccaggagattaaacggatcaacaagatcagaagaagacttgtgaaagacagcaacaccaagaaggccggcaagacaggccccatgaaaaccctgctggttagagtgatgacacccgatctgagagagcggctggaaaacctgagaaagaagcctgaaaatatcccccagcccatcagcaatacatctagagccaacctgaataagctgctgaccgattacaccgaaatgaagaaggcgatcctgcatgtgtactgggaagagttccagaaggaccctgtgggcctgatgagccgggtggcccagcctgccagcaagaagatcgatcagaacaagctgaaacctgagatggacgagaagggcaacctgaccaccgccggctttgcctgctctcagtgtggccagcccctgttcgtgtacaagctggagcaggtgtctgagaagggcaaggcttacaccaactacttcggacggtgcaatgtggccgagcacgaaaagctgatcctgctggcccagctgaagcccgagaaggatagcgacgaagccgtgacatatagcctgggaaagtttgggcagagggccctggatttctacagcattcatgtgaccaaggagtccacccaccccgtgaagcccctggcccagatcgccggaaacagatacgcctccggacctgtgggaaaggccctgagcgacgcatgtatgggcacaatcgcctccttcctgtctaagtaccaggacatcatcatcgaacaccagaaggtggtgaagggcaaccagaagagactggagagcctgcgggagctggccggcaaggaaaacctggaataccctagcgtgaccctgccacctcagcctcacaccaaggagggcgttgatgcctacaacgaagtgatcgcccgggtgcgaatgtgggtgaacctgaacctgtggcagaagctgaagctaagcagagatgatgccaagcctctgctgagactgaagggattcccttcctttcctctggtcgagagacaggccaacgaagtggactggtgggacatggtgtgtaacgtgaagaagctgatcaacgagaaaaaggaggatggcaaggtgttttggcagaatctggctggctacaagagacaggaagccctgagaccatacctgagcagcgaggaagatcggaagaagggaaagaaattcgctcggtaccagctgggcgacctgctgctgcacctggaaaagaagcacggcgaggactggggaaaggtgtacgacgaggcctgggagcggattgacaagaaagtggaaggcctgagcaagcacatcaagctggaagaggaacggagaagcgaggacgcccagagcaaggccgccctgaccgactggctgcgggctaaggccagcttcgtgatcgagggcctgaaggaggccgacaaggacgagttctgcagatgcgagctgaagctgcagaagtggtacggggacctgcggggaaagcccttcgccatcgaagccgagaacagcatcctggacatcagcggcttcagcaagcagtacaactgtgccttcatctggcagaaggacggcgtgaagaagctgaacctgtacctgatcatcaactacttcaagggcggcaagctgcggttcaagaagatcaaacctgaagccttcgaagccaacagattctacaccgtgatcaacaaaaagagcggcgagatcgtgcccatggaggtgaacttcaacttcgacgaccccaacctgatcatcctgcctctggcctttggcaagagacagggcagagaattcatctggaacgacctgctgtccctggaaaccggcagcctgaagctggccaacggaagagtgatcgagaagacactgtacaacagaagaacccggcaggatgagcctgccctgttcgtggccctgaccttcgagcggcgggaggtcctggactcctccaatatcaaaccaatgaacctgatcggcgtggcaagaggcgaaaacatccccgccgtgatcgccctgaccgaccccgagggctgcccactgagccggtttaaggatagcctgggaaacccaacccacatcctgagaatcggcgagagctataaggagaagcagcggaccatccaggccaagaaggaggtggagcagcggagagccggcggctacagccggaagtacgccagcaaagccaagaatctggcagacgatatggtgagaaacaccgctagagatctgctgtactacgccgtgacccaggatgccatgctgatcttcgccaacctgagccggggcttcggccggcagggcaagcggaccttcatggccgagagacagtacacacggatggaggactggctgaccgccaagctggcctacgagggcctgagcaagacctacctgtccaagacactggcccagtacacctccaagacatgcagcaactgtgggtttaccatcaccagcgccgactacgacagggtgctggagaagctgaagaagacagcaacaggctggatgaccacaattaacggcaaggagctgaaggtggagggccagattacctactacaacagatacaagagacagaacgtagtcaaggacctgtccgtcgagctggatagactgagcgaagaatctgtgaacaacgacatctcctcctggacaaagggcagaagcggagaagctctgagcctcctgaagaaaagattctcccatagacccgtgcaggagaagttcgtgtgcctgaactgcggcttcgagacacacgcagccgagcaagccgccctgaacatcgccagatcctggctgttcctgcggagccaggagtacaagaaataccagacaaacaagacaaccggcaacaccgataagagagccttcgtcgagacctggcagtccttttaccggaagaagcttaaggaggtgtggaaacctgccgtgcggtctggcggatctggcggaggctccacaagcagccagatccccctgaccttccaggacgtggccgtggacttcacctgggaggagtggggcctgctggagcccagccagaaggacatgtactgggacgtgatgctggagatctacgagaacttcatcagcctgggcggcgtgcccctgagcatccccgacgtgatcagccagctggagaggatggaggccccctggatgacccagggcggcgtgctgatcagcaccttcctggacagcagcaccaccagccccaagaaaaagagaaaagtctaagctgccttctgcggggcttgccttctggccatgcccttcttctctcccttgcacctgtacctcttggtctttgaataaagcctgagtaggaaggctagcaaaaaaaaaaaaaaaaaaaaaaaaaaaaaaaaaaaaaaaaaaaaaaaaaaaaaaaaaaaaaaaaaaaaaaaaaaaaaaaa

SEQ ID NO: 3466 - RNA, 5419 nt, synthetic construct
  source 1..5419: mol_type = other RNA
aggaaataagagagaaaagaagagtaagaagaaatataagagccaccatggcccctaagaagaagcgtaaagtgagccgggtgaacggcagcggcagcggcggcggcatgaaccacgaccaggagttcgacccccctaaggtgtaccctcccgtccccgccgagaagagaaagcccatccgggtcctgagcctgttcgatggcatcgccaccggtctgctggtgctgaaggacctgggcatccaggtggataggtacattgcctccgaggtgtgcgaggactccatcaccgtgggaatggtgcgtcatcagggcaagatcatgtacgtgggcgacgtgcggagcgtgacacagaagcatatccaggagtggggccctttcgacctggtgatcggcggcagcccttgcaatgacctgagcatcgtgaacccagcccggaagggcctgtacgagggaaccggcagactgttcttcgagttttacagactgctgcacgacgcccggcctaaggaaggcgacgaccggcccttcttttggctgttcgagaatgtggtggccatgggagtcagcgacaagcgggatattagccggttcctggagagcaaccccgtgatgatcgatgccaaggaagtgagcgccgcccaccgggccagatacttctggggcaatctgcctggcatgaacagacccctggccagcaccgtgaacgacaagctggagctgcaggagtgcctggagcacggccggatcgccaagttcagcaaggtgagaaccatcaccacccgaagcaacagcatcaaacaaggcaaggaccagcactttcctgtgttcatgaacgagaaggaggacatcctgtggtgtaccgagatggagagagtgttcgggttcccagtccactacacagatgtcagcaacatgtctagactggccagacagagactgctgggaagaagctggtccgtccctgtgatcagacacctgttcgcccctctgaaggagtacttcgcctgcgtgagcagcggcaacagcaacgccaacagccggggccccagcttctctagcggcctggtgccactgtccctgagagggagccacatgggccccatggagatctacaaaaccgtgagcgcctggaagcggcagcctgtgcgcgtgctgagcctgtttcggaatatcgataaagtcctgaaaagcctgggattcctggagagcggctctggctccggcggtggcaccctgaagtacgtggaggatgtgacaaacgtggtcagacgggatgtggagaagtggggccccttcgatctggtgtacggcagcacccaacccctgggcagctcttgtgaccggtgccctggctggtacatgtttcagttccaccggatcctgcagtacgccctgccgagacaggagtcccagcggccattcttttggattttcatggacaacttgctgctgaccgaggatgaccaggaaactaccactcggttcctgcagaccgaagccgtgaccctgcaggacgtgagaggccgggactaccagaacgccatgcgggtgtggtccaacatccctggactgaaaagcaagcacgcacctctgacccctaaagaagaggagtacctgcaggcccaggtgcggagcagaagcaagctggacgcccctaaggtggatctgctggtgaagaattgcctcctgcccctgagagagtacttcaagtatttcagccagaatagtctgcccctgggcggcccaagcagcggcgcccctcctcccagcggcggcagcccagccggctccccaacctctaccgaggagggcacctctgagtccgccacccccgagagcggccctggcacctccaccgagcccagcgagggcagcgcacccggcagccctgccggcagccccacctccacagaggagggaaccagcaccgagcccagcgaaggcagcgccccaggcaccagcaccgagcctagtgagggcggctctggcggcggcagcgcccaggagattaaacggatcaacaagatcagaagaagacttgtgaaagacagcaacaccaagaaggccggcaagacaggccccatgaaaaccctgctggttagagtgatgacacccgatctgagagagcggctggaaaacctgagaaagaagcctgaaaatatcccccagcccatcagcaatacatctagagccaacctgaataagctgctgaccgattacaccgaaatgaagaaggcgatcctgcatgtgtactgggaagagttccagaaggaccctgtgggcctgatgagccgggtggcccagcctgccagcaagaagatcgatcagaacaagctgaaacctgagatggacgagaagggcaacctgaccaccgccggctttgcctgctctcagtgtggccagcccctgttcgtgtacaagctggagcaggtgtctgagaagggcaaggcttacaccaactacttcggacggtgcaatgtggccgagcacgaaaagctgatcctgctggcccagctgaagcccgagaaggatagcgacgaagccgtgacatatagcctgggaaagtttgggcagagggccctggatttctacagcattcatgtgaccaaggagtccacccaccccgtgaagcccctggcccagatcgccggaaacagatacgcctccggacctgtgggaaaggccctgagcgacgcatgtatgggcacaatcgcctccttcctgtctaagtaccaggacatcatcatcgaacaccagaaggtggtgaagggcaaccagaagagactggagagcctgcgggagctggccggcaaggaaaacctggaataccctagcgtgaccctgccacctcagcctcacaccaaggagggcgttgatgcctacaacgaagtgatcgcccgggtgcgaatgtgggtgaacctgaacctgtggcagaagctgaagctaagcagagatgatgccaagcctctgctgagactgaagggattcccttcctttcctctggtcgagagacaggccaacgaagtggactggtgggacatggtgtgtaacgtgaagaagctgatcaacgagaaaaaggaggatggcaaggtgttttggcagaatctggctggctacaagagacaggaagccctgagaccatacctgagcagcgaggaagatcggaagaagggaaagaaattcgctcggtaccagctgggcgacctgctgctgcacctggaaaagaagcacggcgaggactggggaaaggtgtacgacgaggcctgggagcggattgacaagaaagtggaaggcctgagcaagcacatcaagctggaagaggaacggagaagcgaggacgcccagagcaaggccgccctgaccgactggctgcgggctaaggccagcttcgtgatcgagggcctgaaggaggccgacaaggacgagttctgcagatgcgagctgaagctgcagaagtggtacggggacctgcggggaaagcccttcgccatcgaagccgagaacagcatcctggacatcagcggcttcagcaagcagtacaactgtgccttcatctggcagaaggacggcgtgaagaagctgaacctgtacctgatcatcaactacttcaagggcggcaagctgcggttcaagaagatcaaacctgaagccttcgaagccaacagattctacaccgtgatcaacaaaaagagcggcgagatcgtgcccatggaggtgaacttcaacttcgacgaccccaacctgatcatcctgcctctggcctttggcaagagacagggcagagaattcatctggaacgacctgctgtccctggaaaccggcagcctgaagctggccaacggaagagtgatcgagaagacactgtacaacagaagaacccggcaggatgagcctgccctgttcgtggccctgaccttcgagcggcgggaggtcctggactcctccaatatcaaaccaatgaacctgatcggcgtggcaagaggcgaaaacatccccgccgtgatcgccctgaccgaccccgagggctgcccactgagccggtttaaggatagcctgggaaacccaacccacatcctgagaatcggcgagagctataaggagaagcagcggaccatccaggccaagaaggaggtggagcagcggagagccggcggctacagccggaagtacgccagcaaagccaagaatctggcagacgatatggtgagaaacaccgctagagatctgctgtactacgccgtgacccaggatgccatgctgatcttcgccaacctgagccggggcttcggccggcagggcaagcggaccttcatggccgagagacagtacacacggatggaggactggctgaccgccaagctggcctacgagggcctgagcaagacctacctgtccaagacactggcccagtacacctccaagacatgcagcaactgtgggtttaccatcaccagcgccgactacgacagggtgctggagaagctgaagaagacagcaacaggctggatgaccacaattaacggcaaggagctgaaggtggagggccagattacctactacaacagatacaagagacagaacgtagtcaaggacctgtccgtcgagctggatagactgagcgaagaatctgtgaacaacgacatctcctcctggacaaagggcagaagcggagaagctctgagcctcctgaagaaaagattctcccatagacccgtgcaggagaagttcgtgtgcctgaactgcggcttcgagacacacgcagccgagcaagccgccctgaacatcgccagatcctggctgttcctgcggagccaggagtacaagaaataccagacaaacaagacaaccggcaacaccgataagagagccttcgtcgagacctggcagtccttttaccggaagaagcttaaggaggtgtggaaacctgccgtgcggtctggcggatctggcggaggctccacaagcgcccaggagagcgtgatgttcagcgacgtgagcatcgacttcagccaggaggagtgggagtgcctgaacgacgaccagagggacctgtacagggacgtgatgctggagaactacagcaacctggtgagcatggccggccacagcatcagcaagcccaacgtgatcagctacctggagcagggcaaggagccctggctggtggacagggagatcaccagcggccagtggcccgtgctggagagcaccagccccaagaaaaagagaaaagtctaagctgccttctgcggggcttgccttctggccatgcccttcttctctcccttgcacctgtacctcttggtctttgaataaagcctgagtaggaaggctagcaaaaaaaaaaaaaaaaaaaaaaaaaaaaaaaaaaaaaaaaaaaaaaaaaaaaaaaaaaaaaaaaaaaaaaaaaaaaaaaa

SEQ ID NO: 3467 - RNA, 5419 nt, synthetic construct
  source 1..5419: mol_type = other RNA
aggaaataagagagaaaagaagagtaagaagaaatataagagccaccatggcccctaagaagaagcgtaaagtgagccgggtgaacggcagcggcagcggcggcggcatgaaccacgaccaggagttcgacccccctaaggtgtaccctcccgtccccgccgagaagagaaagcccatccgggtcctgagcctgttcgatggcatcgccaccggtctgctggtgctgaaggacctgggcatccaggtggataggtacattgcctccgaggtgtgcgaggactccatcaccgtgggaatggtgcgtcatcagggcaagatcatgtacgtgggcgacgtgcggagcgtgacacagaagcatatccaggagtggggccctttcgacctggtgatcggcggcagcccttgcaatgacctgagcatcgtgaacccagcccggaagggcctgtacgagggaaccggcagactgttcttcgagttttacagactgctgcacgacgcccggcctaaggaaggcgacgaccggcccttcttttggctgttcgagaatgtggtggccatgggagtcagcgacaagcgggatattagccggttcctggagagcaaccccgtgatgatcgatgccaaggaagtgagcgccgcccaccgggccagatacttctggggcaatctgcctggcatgaacagacccctggccagcaccgtgaacgacaagctggagctgcaggagtgcctggagcacggccggatcgccaagttcagcaaggtgagaaccatcaccacccgaagcaacagcatcaaacaaggcaaggaccagcactttcctgtgttcatgaacgagaaggaggacatcctgtggtgtaccgagatggagagagtgttcgggttcccagtccactacacagatgtcagcaacatgtctagactggccagacagagactgctgggaagaagctggtccgtccctgtgatcagacacctgttcgcccctctgaaggagtacttcgcctgcgtgagcagcggcaacagcaacgccaacagccggggccccagcttctctagcggcctggtgccactgtccctgagagggagccacatgggccccatggagatctacaaaaccgtgagcgcctggaagcggcagcctgtgcgcgtgctgagcctgtttcggaatatcgataaagtcctgaaaagcctgggattcctggagagcggctctggctccggcggtggcaccctgaagtacgtggaggatgtgacaaacgtggtcagacgggatgtggagaagtggggccccttcgatctggtgtacggcagcacccaacccctgggcagctcttgtgaccggtgccctggctggtacatgtttcagttccaccggatcctgcagtacgccctgccgagacaggagtcccagcggccattcttttggattttcatggacaacttgctgctgaccgaggatgaccaggaaactaccactcggttcctgcagaccgaagccgtgaccctgcaggacgtgagaggccgggactaccagaacgccatgcgggtgtggtccaacatccctggactgaaaagcaagcacgcacctctgacccctaaagaagaggagtacctgcaggcccaggtgcggagcagaagcaagctggacgcccctaaggtggatctgctggtgaagaattgcctcctgcccctgagagagtacttcaagtatttcagccagaatagtctgcccctgggcggcccaagcagcggcgcccctcctcccagcggcggcagcccagccggctccccaacctctaccgaggagggcacctctgagtccgccacccccgagagcggccctggcacctccaccgagcccagcgagggcagcgcacccggcagccctgccggcagccccacctccacagaggagggaaccagcaccgagcccagcgaaggcagcgccccaggcaccagcaccgagcctagtgagggcggctctggcggcggcagcgcccaggagattaaacggatcaacaagatcagaagaagacttgtgaaagacagcaacaccaagaaggccggcaagacaggccccatgaaaaccctgctggttagagtgatgacacccgatctgagagagcggctggaaaacctgagaaagaagcctgaaaatatcccccagcccatcagcaatacatctagagccaacctgaataagctgctgaccgattacaccgaaatgaagaaggcgatcctgcatgtgtactgggaagagttccagaaggaccctgtgggcctgatgagccgggtggcccagcctgccagcaagaagatcgatcagaacaagctgaaacctgagatggacgagaagggcaacctgaccaccgccggctttgcctgctctcagtgtggccagcccctgttcgtgtacaagctggagcaggtgtctgagaagggcaaggcttacaccaactacttcggacggtgcaatgtggccgagcacgaaaagctgatcctgctggcccagctgaagcccgagaaggatagcgacgaagccgtgacatatagcctgggaaagtttgggcagagggccctggatttctacagcattcatgtgaccaaggagtccacccaccccgtgaagcccctggcccagatcgccggaaacagatacgcctccggacctgtgggaaaggccctgagcgacgcatgtatgggcacaatcgcctccttcctgtctaagtaccaggacatcatcatcgaacaccagaaggtggtgaagggcaaccagaagagactggagagcctgcgggagctggccggcaaggaaaacctggaataccctagcgtgaccctgccacctcagcctcacaccaaggagggcgttgatgcctacaacgaagtgatcgcccgggtgcgaatgtgggtgaacctgaacctgtggcagaagctgaagctaagcagagatgatgccaagcctctgctgagactgaagggattcccttcctttcctctggtcgagagacaggccaacgaagtggactggtgggacatggtgtgtaacgtgaagaagctgatcaacgagaaaaaggaggatggcaaggtgttttggcagaatctggctggctacaagagacaggaagccctgagaccatacctgagcagcgaggaagatcggaagaagggaaagaaattcgctcggtaccagctgggcgacctgctgctgcacctggaaaagaagcacggcgaggactggggaaaggtgtacgacgaggcctgggagcggattgacaagaaagtggaaggcctgagcaagcacatcaagctggaagaggaacggagaagcgaggacgcccagagcaaggccgccctgaccgactggctgcgggctaaggccagcttcgtgatcgagggcctgaaggaggccgacaaggacgagttctgcagatgcgagctgaagctgcagaagtggtacggggacctgcggggaaagcccttcgccatcgaagccgagaacagcatcctggacatcagcggcttcagcaagcagtacaactgtgccttcatctggcagaaggacggcgtgaagaagctgaacctgtacctgatcatcaactacttcaagggcggcaagctgcggttcaagaagatcaaacctgaagccttcgaagccaacagattctacaccgtgatcaacaaaaagagcggcgagatcgtgcccatggaggtgaacttcaacttcgacgaccccaacctgatcatcctgcctctggcctttggcaagagacagggcagagaattcatctggaacgacctgctgtccctggaaaccggcagcctgaagctggccaacggaagagtgatcgagaagacactgtacaacagaagaacccggcaggatgagcctgccctgttcgtggccctgaccttcgagcggcgggaggtcctggactcctccaatatcaaaccaatgaacctgatcggcgtggcaagaggcgaaaacatccccgccgtgatcgccctgaccgaccccgagggctgcccactgagccggtttaaggatagcctgggaaacccaacccacatcctgagaatcggcgagagctataaggagaagcagcggaccatccaggccaagaaggaggtggagcagcggagagccggcggctacagccggaagtacgccagcaaagccaagaatctggcagacgatatggtgagaaacaccgctagagatctgctgtactacgccgtgacccaggatgccatgctgatcttcgccaacctgagccggggcttcggccggcagggcaagcggaccttcatggccgagagacagtacacacggatggaggactggctgaccgccaagctggcctacgagggcctgagcaagacctacctgtccaagacactggcccagtacacctccaagacatgcagcaactgtgggtttaccatcaccagcgccgactacgacagggtgctggagaagctgaagaagacagcaacaggctggatgaccacaattaacggcaaggagctgaaggtggagggccagattacctactacaacagatacaagagacagaacgtagtcaaggacctgtccgtcgagctggatagactgagcgaagaatctgtgaacaacgacatctcctcctggacaaagggcagaagcggagaagctctgagcctcctgaagaaaagattctcccatagacccgtgcaggagaagttcgtgtgcctgaactgcggcttcgagacacacgcagccgagcaagccgccctgaacatcgccagatcctggctgttcctgcggagccaggagtacaagaaataccagacaaacaagacaaccggcaacaccgataagagagccttcgtcgagacctggcagtccttttaccggaagaagcttaaggaggtgtggaaacctgccgtgcggtctggcggatctggcggaggctccacaagcatggccctggtgaccttcagggacgtggccatcgacttcagccagaaggagtgggagtgcctggacaccacccagaggaagctgtacagggacgtgatgctggagaactacaacaacctggtgagcctgggctacagcggcagcaagcccgacgtgatcaccctgctggagcagggcaaggagccctgcgtggccgccagggacgtgaccggcaggcagtgccccggcctgctgagcaggcacaccagccccaagaaaaagagaaaagtctaagctgccttctgcggggcttgccttctggccatgcccttcttctctcccttgcacctgtacctcttggtctttgaataaagcctgagtaggaaggctagcaaaaaaaaaaaaaaaaaaaaaaaaaaaaaaaaaaaaaaaaaaaaaaaaaaaaaaaaaaaaaaaaaaaaaaaaaaaaaaaa

SEQ ID NO: 3468 - RNA, 5419 nt, synthetic construct
  source 1..5419: mol_type = other RNA
aggaaataagagagaaaagaagagtaagaagaaatataagagccaccatggcccctaagaagaagcgtaaagtgagccgggtgaacggcagcggcagcggcggcggcatgaaccacgaccaggagttcgacccccctaaggtgtaccctcccgtccccgccgagaagagaaagcccatccgggtcctgagcctgttcgatggcatcgccaccggtctgctggtgctgaaggacctgggcatccaggtggataggtacattgcctccgaggtgtgcgaggactccatcaccgtgggaatggtgcgtcatcagggcaagatcatgtacgtgggcgacgtgcggagcgtgacacagaagcatatccaggagtggggccctttcgacctggtgatcggcggcagcccttgcaatgacctgagcatcgtgaacccagcccggaagggcctgtacgagggaaccggcagactgttcttcgagttttacagactgctgcacgacgcccggcctaaggaaggcgacgaccggcccttcttttggctgttcgagaatgtggtggccatgggagtcagcgacaagcgggatattagccggttcctggagagcaaccccgtgatgatcgatgccaaggaagtgagcgccgcccaccgggccagatacttctggggcaatctgcctggcatgaacagacccctggccagcaccgtgaacgacaagctggagctgcaggagtgcctggagcacggccggatcgccaagttcagcaaggtgagaaccatcaccacccgaagcaacagcatcaaacaaggcaaggaccagcactttcctgtgttcatgaacgagaaggaggacatcctgtggtgtaccgagatggagagagtgttcgggttcccagtccactacacagatgtcagcaacatgtctagactggccagacagagactgctgggaagaagctggtccgtccctgtgatcagacacctgttcgcccctctgaaggagtacttcgcctgcgtgagcagcggcaacagcaacgccaacagccggggccccagcttctctagcggcctggtgccactgtccctgagagggagccacatgggccccatggagatctacaaaaccgtgagcgcctggaagcggcagcctgtgcgcgtgctgagcctgtttcggaatatcgataaagtcctgaaaagcctgggattcctggagagcggctctggctccggcggtggcaccctgaagtacgtggaggatgtgacaaacgtggtcagacgggatgtggagaagtggggccccttcgatctggtgtacggcagcacccaacccctgggcagctcttgtgaccggtgccctggctggtacatgtttcagttccaccggatcctgcagtacgccctgccgagacaggagtcccagcggccattcttttggattttcatggacaacttgctgctgaccgaggatgaccaggaaactaccactcggttcctgcagaccgaagccgtgaccctgcaggacgtgagaggccgggactaccagaacgccatgcgggtgtggtccaacatccctggactgaaaagcaagcacgcacctctgacccctaaagaagaggagtacctgcaggcccaggtgcggagcagaagcaagctggacgcccctaaggtggatctgctggtgaagaattgcctcctgcccctgagagagtacttcaagtatttcagccagaatagtctgcccctgggcggcccaagcagcggcgcccctcctcccagcggcggcagcccagccggctccccaacctctaccgaggagggcacctctgagtccgccacccccgagagcggccctggcacctccaccgagcccagcgagggcagcgcacccggcagccctgccggcagccccacctccacagaggagggaaccagcaccgagcccagcgaaggcagcgccccaggcaccagcaccgagcctagtgagggcggctctggcggcggcagcgcccaggagattaaacggatcaacaagatcagaagaagacttgtgaaagacagcaacaccaagaaggccggcaagacaggccccatgaaaaccctgctggttagagtgatgacacccgatctgagagagcggctggaaaacctgagaaagaagcctgaaaatatcccccagcccatcagcaatacatctagagccaacctgaataagctgctgaccgattacaccgaaatgaagaaggcgatcctgcatgtgtactgggaagagttccagaaggaccctgtgggcctgatgagccgggtggcccagcctgccagcaagaagatcgatcagaacaagctgaaacctgagatggacgagaagggcaacctgaccaccgccggctttgcctgctctcagtgtggccagcccctgttcgtgtacaagctggagcaggtgtctgagaagggcaaggcttacaccaactacttcggacggtgcaatgtggccgagcacgaaaagctgatcctgctggcccagctgaagcccgagaaggatagcgacgaagccgtgacatatagcctgggaaagtttgggcagagggccctggatttctacagcattcatgtgaccaaggagtccacccaccccgtgaagcccctggcccagatcgccggaaacagatacgcctccggacctgtgggaaaggccctgagcgacgcatgtatgggcacaatcgcctccttcctgtctaagtaccaggacatcatcatcgaacaccagaaggtggtgaagggcaaccagaagagactggagagcctgcgggagctggccggcaaggaaaacctggaataccctagcgtgaccctgccacctcagcctcacaccaaggagggcgttgatgcctacaacgaagtgatcgcccgggtgcgaatgtgggtgaacctgaacctgtggcagaagctgaagctaagcagagatgatgccaagcctctgctgagactgaagggattcccttcctttcctctggtcgagagacaggccaacgaagtggactggtgggacatggtgtgtaacgtgaagaagctgatcaacgagaaaaaggaggatggcaaggtgttttggcagaatctggctggctacaagagacaggaagccctgagaccatacctgagcagcgaggaagatcggaagaagggaaagaaattcgctcggtaccagctgggcgacctgctgctgcacctggaaaagaagcacggcgaggactggggaaaggtgtacgacgaggcctgggagcggattgacaagaaagtggaaggcctgagcaagcacatcaagctggaagaggaacggagaagcgaggacgcccagagcaaggccgccctgaccgactggctgcgggctaaggccagcttcgtgatcgagggcctgaaggaggccgacaaggacgagttctgcagatgcgagctgaagctgcagaagtggtacggggacctgcggggaaagcccttcgccatcgaagccgagaacagcatcctggacatcagcggcttcagcaagcagtacaactgtgccttcatctggcagaaggacggcgtgaagaagctgaacctgtacctgatcatcaactacttcaagggcggcaagctgcggttcaagaagatcaaacctgaagccttcgaagccaacagattctacaccgtgatcaacaaaaagagcggcgagatcgtgcccatggaggtgaacttcaacttcgacgaccccaacctgatcatcctgcctctggcctttggcaagagacagggcagagaattcatctggaacgacctgctgtccctggaaaccggcagcctgaagctggccaacggaagagtgatcgagaagacactgtacaacagaagaacccggcaggatgagcctgccctgttcgtggccctgaccttcgagcggcgggaggtcctggactcctccaatatcaaaccaatgaacctgatcggcgtggcaagaggcgaaaacatccccgccgtgatcgccctgaccgaccccgagggctgcccactgagccggtttaaggatagcctgggaaacccaacccacatcctgagaatcggcgagagctataaggagaagcagcggaccatccaggccaagaaggaggtggagcagcggagagccggcggctacagccggaagtacgccagcaaagccaagaatctggcagacgatatggtgagaaacaccgctagagatctgctgtactacgccgtgacccaggatgccatgctgatcttcgccaacctgagccggggcttcggccggcagggcaagcggaccttcatggccgagagacagtacacacggatggaggactggctgaccgccaagctggcctacgagggcctgagcaagacctacctgtccaagacactggcccagtacacctccaagacatgcagcaactgtgggtttaccatcaccagcgccgactacgacagggtgctggagaagctgaagaagacagcaacaggctggatgaccacaattaacggcaaggagctgaaggtggagggccagattacctactacaacagatacaagagacagaacgtagtcaaggacctgtccgtcgagctggatagactgagcgaagaatctgtgaacaacgacatctcctcctggacaaagggcagaagcggagaagctctgagcctcctgaagaaaagattctcccatagacccgtgcaggagaagttcgtgtgcctgaactgcggcttcgagacacacgcagccgagcaagccgccctgaacatcgccagatcctggctgttcctgcggagccaggagtacaagaaataccagacaaacaagacaaccggcaacaccgataagagagccttcgtcgagacctggcagtccttttaccggaagaagcttaaggaggtgtggaaacctgccgtgcggtctggcggatctggcggaggctccacaagcgccgtgacccagctgaccttcgaggacgtggccgtggacttcacccaggaggagtggaggtgcctgacccaggcccagaggaccctgtacagggacgtgatgctggacacctacggcaacctggtgagcgtgggcgtgagcccccccagcatgagcgtgatcctgcccctggagttccaggaggacccctgggtggccaagagccacgtgaccacccccggcgagctgaacggctgggagggcaccagccccaagaaaaagagaaaagtctaagctgccttctgcggggcttgccttctggccatgcccttcttctctcccttgcacctgtacctcttggtctttgaataaagcctgagtaggaaggctagcaaaaaaaaaaaaaaaaaaaaaaaaaaaaaaaaaaaaaaaaaaaaaaaaaaaaaaaaaaaaaaaaaaaaaaaaaaaaaaaa

SEQ ID NO: 3469 - RNA, 5419 nt, synthetic construct
  source 1..5419: mol_type = other RNA
aggaaataagagagaaaagaagagtaagaagaaatataagagccaccatggcccctaagaagaagcgtaaagtgagccgggtgaacggcagcggcagcggcggcggcatgaaccacgaccaggagttcgacccccctaaggtgtaccctcccgtccccgccgagaagagaaagcccatccgggtcctgagcctgttcgatggcatcgccaccggtctgctggtgctgaaggacctgggcatccaggtggataggtacattgcctccgaggtgtgcgaggactccatcaccgtgggaatggtgcgtcatcagggcaagatcatgtacgtgggcgacgtgcggagcgtgacacagaagcatatccaggagtggggccctttcgacctggtgatcggcggcagcccttgcaatgacctgagcatcgtgaacccagcccggaagggcctgtacgagggaaccggcagactgttcttcgagttttacagactgctgcacgacgcccggcctaaggaaggcgacgaccggcccttcttttggctgttcgagaatgtggtggccatgggagtcagcgacaagcgggatattagccggttcctggagagcaaccccgtgatgatcgatgccaaggaagtgagcgccgcccaccgggccagatacttctggggcaatctgcctggcatgaacagacccctggccagcaccgtgaacgacaagctggagctgcaggagtgcctggagcacggccggatcgccaagttcagcaaggtgagaaccatcaccacccgaagcaacagcatcaaacaaggcaaggaccagcactttcctgtgttcatgaacgagaaggaggacatcctgtggtgtaccgagatggagagagtgttcgggttcccagtccactacacagatgtcagcaacatgtctagactggccagacagagactgctgggaagaagctggtccgtccctgtgatcagacacctgttcgcccctctgaaggagtacttcgcctgcgtgagcagcggcaacagcaacgccaacagccggggccccagcttctctagcggcctggtgccactgtccctgagagggagccacatgggccccatggagatctacaaaaccgtgagcgcctggaagcggcagcctgtgcgcgtgctgagcctgtttcggaatatcgataaagtcctgaaaagcctgggattcctggagagcggctctggctccggcggtggcaccctgaagtacgtggaggatgtgacaaacgtggtcagacgggatgtggagaagtggggccccttcgatctggtgtacggcagcacccaacccctgggcagctcttgtgaccggtgccctggctggtacatgtttcagttccaccggatcctgcagtacgccctgccgagacaggagtcccagcggccattcttttggattttcatggacaacttgctgctgaccgaggatgaccaggaaactaccactcggttcctgcagaccgaagccgtgaccctgcaggacgtgagaggccgggactaccagaacgccatgcgggtgtggtccaacatccctggactgaaaagcaagcacgcacctctgacccctaaagaagaggagtacctgcaggcccaggtgcggagcagaagcaagctggacgcccctaaggtggatctgctggtgaagaattgcctcctgcccctgagagagtacttcaagtatttcagccagaatagtctgcccctgggcggcccaagcagcggcgcccctcctcccagcggcggcagcccagccggctccccaacctctaccgaggagggcacctctgagtccgccacccccgagagcggccctggcacctccaccgagcccagcgagggcagcgcacccggcagccctgccggcagccccacctccacagaggagggaaccagcaccgagcccagcgaaggcagcgccccaggcaccagcaccgagcctagtgagggcggctctggcggcggcagcgcccaggagattaaacggatcaacaagatcagaagaagacttgtgaaagacagcaacaccaagaaggccggcaagacaggccccatgaaaaccctgctggttagagtgatgacacccgatctgagagagcggctggaaaacctgagaaagaagcctgaaaatatcccccagcccatcagcaatacatctagagccaacctgaataagctgctgaccgattacaccgaaatgaagaaggcgatcctgcatgtgtactgggaagagttccagaaggaccctgtgggcctgatgagccgggtggcccagcctgccagcaagaagatcgatcagaacaagctgaaacctgagatggacgagaagggcaacctgaccaccgccggctttgcctgctctcagtgtggccagcccctgttcgtgtacaagctggagcaggtgtctgagaagggcaaggcttacaccaactacttcggacggtgcaatgtggccgagcacgaaaagctgatcctgctggcccagctgaagcccgagaaggatagcgacgaagccgtgacatatagcctgggaaagtttgggcagagggccctggatttctacagcattcatgtgaccaaggagtccacccaccccgtgaagcccctggcccagatcgccggaaacagatacgcctccggacctgtgggaaaggccctgagcgacgcatgtatgggcacaatcgcctccttcctgtctaagtaccaggacatcatcatcgaacaccagaaggtggtgaagggcaaccagaagagactggagagcctgcgggagctggccggcaaggaaaacctggaataccctagcgtgaccctgccacctcagcctcacaccaaggagggcgttgatgcctacaacgaagtgatcgcccgggtgcgaatgtgggtgaacctgaacctgtggcagaagctgaagctaagcagagatgatgccaagcctctgctgagactgaagggattcccttcctttcctctggtcgagagacaggccaacgaagtggactggtgggacatggtgtgtaacgtgaagaagctgatcaacgagaaaaaggaggatggcaaggtgttttggcagaatctggctggctacaagagacaggaagccctgagaccatacctgagcagcgaggaagatcggaagaagggaaagaaattcgctcggtaccagctgggcgacctgctgctgcacctggaaaagaagcacggcgaggactggggaaaggtgtacgacgaggcctgggagcggattgacaagaaagtggaaggcctgagcaagcacatcaagctggaagaggaacggagaagcgaggacgcccagagcaaggccgccctgaccgactggctgcgggctaaggccagcttcgtgatcgagggcctgaaggaggccgacaaggacgagttctgcagatgcgagctgaagctgcagaagtggtacggggacctgcggggaaagcccttcgccatcgaagccgagaacagcatcctggacatcagcggcttcagcaagcagtacaactgtgccttcatctggcagaaggacggcgtgaagaagctgaacctgtacctgatcatcaactacttcaagggcggcaagctgcggttcaagaagatcaaacctgaagccttcgaagccaacagattctacaccgtgatcaacaaaaagagcggcgagatcgtgcccatggaggtgaacttcaacttcgacgaccccaacctgatcatcctgcctctggcctttggcaagagacagggcagagaattcatctggaacgacctgctgtccctggaaaccggcagcctgaagctggccaacggaagagtgatcgagaagacactgtacaacagaagaacccggcaggatgagcctgccctgttcgtggccctgaccttcgagcggcgggaggtcctggactcctccaatatcaaaccaatgaacctgatcggcgtggcaagaggcgaaaacatccccgccgtgatcgccctgaccgaccccgagggctgcccactgagccggtttaaggatagcctgggaaacccaacccacatcctgagaatcggcgagagctataaggagaagcagcggaccatccaggccaagaaggaggtggagcagcggagagccggcggctacagccggaagtacgccagcaaagccaagaatctggcagacgatatggtgagaaacaccgctagagatctgctgtactacgccgtgacccaggatgccatgctgatcttcgccaacctgagccggggcttcggccggcagggcaagcggaccttcatggccgagagacagtacacacggatggaggactggctgaccgccaagctggcctacgagggcctgagcaagacctacctgtccaagacactggcccagtacacctccaagacatgcagcaactgtgggtttaccatcaccagcgccgactacgacagggtgctggagaagctgaagaagacagcaacaggctggatgaccacaattaacggcaaggagctgaaggtggagggccagattacctactacaacagatacaagagacagaacgtagtcaaggacctgtccgtcgagctggatagactgagcgaagaatctgtgaacaacgacatctcctcctggacaaagggcagaagcggagaagctctgagcctcctgaagaaaagattctcccatagacccgtgcaggagaagttcgtgtgcctgaactgcggcttcgagacacacgcagccgagcaagccgccctgaacatcgccagatcctggctgttcctgcggagccaggagtacaagaaataccagacaaacaagacaaccggcaacaccgataagagagccttcgtcgagacctggcagtccttttaccggaagaagcttaaggaggtgtggaaacctgccgtgcggtctggcggatctggcggaggctccacaagccaggccgaggtgaccttcgaggacgtggccgtgctgctgagcagggaggagtggggcaggctgggccccgtgcagaagggcctgtacagggacgtgatgctggagacctacaggaacctggtgagcctgggcgccggccccaccggccccaagcccgaggtgatcacccagctggagaggggcgacgagccctgggtgctggacgtgcagggcagggagggccccaccatcgacggcagcgccaccagccccaagaaaaagagaaaagtctaagctgccttctgcggggcttgccttctggccatgcccttcttctctcccttgcacctgtacctcttggtctttgaataaagcctgagtaggaaggctagcaaaaaaaaaaaaaaaaaaaaaaaaaaaaaaaaaaaaaaaaaaaaaaaaaaaaaaaaaaaaaaaaaaaaaaaaaaaaaaaa

SEQ ID NO: 3470 - RNA, 5419 nt, synthetic construct
  source 1..5419: mol_type = other RNA
aggaaataagagagaaaagaagagtaagaagaaatataagagccaccatggcccctaagaagaagcgtaaagtgagccgggtgaacggcagcggcagcggcggcggcatgaaccacgaccaggagttcgacccccctaaggtgtaccctcccgtccccgccgagaagagaaagcccatccgggtcctgagcctgttcgatggcatcgccaccggtctgctggtgctgaaggacctgggcatccaggtggataggtacattgcctccgaggtgtgcgaggactccatcaccgtgggaatggtgcgtcatcagggcaagatcatgtacgtgggcgacgtgcggagcgtgacacagaagcatatccaggagtggggccctttcgacctggtgatcggcggcagcccttgcaatgacctgagcatcgtgaacccagcccggaagggcctgtacgagggaaccggcagactgttcttcgagttttacagactgctgcacgacgcccggcctaaggaaggcgacgaccggcccttcttttggctgttcgagaatgtggtggccatgggagtcagcgacaagcgggatattagccggttcctggagagcaaccccgtgatgatcgatgccaaggaagtgagcgccgcccaccgggccagatacttctggggcaatctgcctggcatgaacagacccctggccagcaccgtgaacgacaagctggagctgcaggagtgcctggagcacggccggatcgccaagttcagcaaggtgagaaccatcaccacccgaagcaacagcatcaaacaaggcaaggaccagcactttcctgtgttcatgaacgagaaggaggacatcctgtggtgtaccgagatggagagagtgttcgggttcccagtccactacacagatgtcagcaacatgtctagactggccagacagagactgctgggaagaagctggtccgtccctgtgatcagacacctgttcgcccctctgaaggagtacttcgcctgcgtgagcagcggcaacagcaacgccaacagccggggccccagcttctctagcggcctggtgccactgtccctgagagggagccacatgggccccatggagatctacaaaaccgtgagcgcctggaagcggcagcctgtgcgcgtgctgagcctgtttcggaatatcgataaagtcctgaaaagcctgggattcctggagagcggctctggctccggcggtggcaccctgaagtacgtggaggatgtgacaaacgtggtcagacgggatgtggagaagtggggccccttcgatctggtgtacggcagcacccaacccctgggcagctcttgtgaccggtgccctggctggtacatgtttcagttccaccggatcctgcagtacgccctgccgagacaggagtcccagcggccattcttttggattttcatggacaacttgctgctgaccgaggatgaccaggaaactaccactcggttcctgcagaccgaagccgtgaccctgcaggacgtgagaggccgggactaccagaacgccatgcgggtgtggtccaacatccctggactgaaaagcaagcacgcacctctgacccctaaagaagaggagtacctgcaggcccaggtgcggagcagaagcaagctggacgcccctaaggtggatctgctggtgaagaattgcctcctgcccctgagagagtacttcaagtatttcagccagaatagtctgcccctgggcggcccaagcagcggcgcccctcctcccagcggcggcagcccagccggctccccaacctctaccgaggagggcacctctgagtccgccacccccgagagcggccctggcacctccaccgagcccagcgagggcagcgcacccggcagccctgccggcagccccacctccacagaggagggaaccagcaccgagcccagcgaaggcagcgccccaggcaccagcaccgagcctagtgagggcggctctggcggcggcagcgcccaggagattaaacggatcaacaagatcagaagaagacttgtgaaagacagcaacaccaagaaggccggcaagacaggccccatgaaaaccctgctggttagagtgatgacacccgatctgagagagcggctggaaaacctgagaaagaagcctgaaaatatcccccagcccatcagcaatacatctagagccaacctgaataagctgctgaccgattacaccgaaatgaagaaggcgatcctgcatgtgtactgggaagagttccagaaggaccctgtgggcctgatgagccgggtggcccagcctgccagcaagaagatcgatcagaacaagctgaaacctgagatggacgagaagggcaacctgaccaccgccggctttgcctgctctcagtgtggccagcccctgttcgtgtacaagctggagcaggtgtctgagaagggcaaggcttacaccaactacttcggacggtgcaatgtggccgagcacgaaaagctgatcctgctggcccagctgaagcccgagaaggatagcgacgaagccgtgacatatagcctgggaaagtttgggcagagggccctggatttctacagcattcatgtgaccaaggagtccacccaccccgtgaagcccctggcccagatcgccggaaacagatacgcctccggacctgtgggaaaggccctgagcgacgcatgtatgggcacaatcgcctccttcctgtctaagtaccaggacatcatcatcgaacaccagaaggtggtgaagggcaaccagaagagactggagagcctgcgggagctggccggcaaggaaaacctggaataccctagcgtgaccctgccacctcagcctcacaccaaggagggcgttgatgcctacaacgaagtgatcgcccgggtgcgaatgtgggtgaacctgaacctgtggcagaagctgaagctaagcagagatgatgccaagcctctgctgagactgaagggattcccttcctttcctctggtcgagagacaggccaacgaagtggactggtgggacatggtgtgtaacgtgaagaagctgatcaacgagaaaaaggaggatggcaaggtgttttggcagaatctggctggctacaagagacaggaagccctgagaccatacctgagcagcgaggaagatcggaagaagggaaagaaattcgctcggtaccagctgggcgacctgctgctgcacctggaaaagaagcacggcgaggactggggaaaggtgtacgacgaggcctgggagcggattgacaagaaagtggaaggcctgagcaagcacatcaagctggaagaggaacggagaagcgaggacgcccagagcaaggccgccctgaccgactggctgcgggctaaggccagcttcgtgatcgagggcctgaaggaggccgacaaggacgagttctgcagatgcgagctgaagctgcagaagtggtacggggacctgcggggaaagcccttcgccatcgaagccgagaacagcatcctggacatcagcggcttcagcaagcagtacaactgtgccttcatctggcagaaggacggcgtgaagaagctgaacctgtacctgatcatcaactacttcaagggcggcaagctgcggttcaagaagatcaaacctgaagccttcgaagccaacagattctacaccgtgatcaacaaaaagagcggcgagatcgtgcccatggaggtgaacttcaacttcgacgaccccaacctgatcatcctgcctctggcctttggcaagagacagggcagagaattcatctggaacgacctgctgtccctggaaaccggcagcctgaagctggccaacggaagagtgatcgagaagacactgtacaacagaagaacccggcaggatgagcctgccctgttcgtggccctgaccttcgagcggcgggaggtcctggactcctccaatatcaaaccaatgaacctgatcggcgtggcaagaggcgaaaacatccccgccgtgatcgccctgaccgaccccgagggctgcccactgagccggtttaaggatagcctgggaaacccaacccacatcctgagaatcggcgagagctataaggagaagcagcggaccatccaggccaagaaggaggtggagcagcggagagccggcggctacagccggaagtacgccagcaaagccaagaatctggcagacgatatggtgagaaacaccgctagagatctgctgtactacgccgtgacccaggatgccatgctgatcttcgccaacctgagccggggcttcggccggcagggcaagcggaccttcatggccgagagacagtacacacggatggaggactggctgaccgccaagctggcctacgagggcctgagcaagacctacctgtccaagacactggcccagtacacctccaagacatgcagcaactgtgggtttaccatcaccagcgccgactacgacagggtgctggagaagctgaagaagacagcaacaggctggatgaccacaattaacggcaaggagctgaaggtggagggccagattacctactacaacagatacaagagacagaacgtagtcaaggacctgtccgtcgagctggatagactgagcgaagaatctgtgaacaacgacatctcctcctggacaaagggcagaagcggagaagctctgagcctcctgaagaaaagattctcccatagacccgtgcaggagaagttcgtgtgcctgaactgcggcttcgagacacacgcagccgagcaagccgccctgaacatcgccagatcctggctgttcctgcggagccaggagtacaagaaataccagacaaacaagacaaccggcaacaccgataagagagccttcgtcgagacctggcagtccttttaccggaagaagcttaaggaggtgtggaaacctgccgtgcggtctggcggatctggcggaggctccacaagccccagcgtgcccgtgaccttcagggacgtgttcgtgcagttcagcagggacgagtgggccctgctggacgacgagcagaaggagctgcaccagagcgtgatgcagagcaactacgaggtgctgatgagcctgtactgcgacctggccaagcccgaggtgctgctgcagatggagaggggcgagccctgcctgcccgccgagcccgacctgcagggcgccgccgtgagcctgaaccccgccgccaccagccccaagaaaaagagaaaagtctaagctgccttctgcggggcttgccttctggccatgcccttcttctctcccttgcacctgtacctcttggtctttgaataaagcctgagtaggaaggctagcaaaaaaaaaaaaaaaaaaaaaaaaaaaaaaaaaaaaaaaaaaaaaaaaaaaaaaaaaaaaaaaaaaaaaaaaaaaaaaaa

SEQ ID NO: 3471 - RNA, 5419 nt, synthetic construct
  source 1..5419: mol_type = other RNA
aggaaataagagagaaaagaagagtaagaagaaatataagagccaccatggcccctaagaagaagcgtaaagtgagccgggtgaacggcagcggcagcggcggcggcatgaaccacgaccaggagttcgacccccctaaggtgtaccctcccgtccccgccgagaagagaaagcccatccgggtcctgagcctgttcgatggcatcgccaccggtctgctggtgctgaaggacctgggcatccaggtggataggtacattgcctccgaggtgtgcgaggactccatcaccgtgggaatggtgcgtcatcagggcaagatcatgtacgtgggcgacgtgcggagcgtgacacagaagcatatccaggagtggggccctttcgacctggtgatcggcggcagcccttgcaatgacctgagcatcgtgaacccagcccggaagggcctgtacgagggaaccggcagactgttcttcgagttttacagactgctgcacgacgcccggcctaaggaaggcgacgaccggcccttcttttggctgttcgagaatgtggtggccatgggagtcagcgacaagcgggatattagccggttcctggagagcaaccccgtgatgatcgatgccaaggaagtgagcgccgcccaccgggccagatacttctggggcaatctgcctggcatgaacagacccctggccagcaccgtgaacgacaagctggagctgcaggagtgcctggagcacggccggatcgccaagttcagcaaggtgagaaccatcaccacccgaagcaacagcatcaaacaaggcaaggaccagcactttcctgtgttcatgaacgagaaggaggacatcctgtggtgtaccgagatggagagagtgttcgggttcccagtccactacacagatgtcagcaacatgtctagactggccagacagagactgctgggaagaagctggtccgtccctgtgatcagacacctgttcgcccctctgaaggagtacttcgcctgcgtgagcagcggcaacagcaacgccaacagccggggccccagcttctctagcggcctggtgccactgtccctgagagggagccacatgggccccatggagatctacaaaaccgtgagcgcctggaagcggcagcctgtgcgcgtgctgagcctgtttcggaatatcgataaagtcctgaaaagcctgggattcctggagagcggctctggctccggcggtggcaccctgaagtacgtggaggatgtgacaaacgtggtcagacgggatgtggagaagtggggccccttcgatctggtgtacggcagcacccaacccctgggcagctcttgtgaccggtgccctggctggtacatgtttcagttccaccggatcctgcagtacgccctgccgagacaggagtcccagcggccattcttttggattttcatggacaacttgctgctgaccgaggatgaccaggaaactaccactcggttcctgcagaccgaagccgtgaccctgcaggacgtgagaggccgggactaccagaacgccatgcgggtgtggtccaacatccctggactgaaaagcaagcacgcacctctgacccctaaagaagaggagtacctgcaggcccaggtgcggagcagaagcaagctggacgcccctaaggtggatctgctggtgaagaattgcctcctgcccctgagagagtacttcaagtatttcagccagaatagtctgcccctgggcggcccaagcagcggcgcccctcctcccagcggcggcagcccagccggctccccaacctctaccgaggagggcacctctgagtccgccacccccgagagcggccctggcacctccaccgagcccagcgagggcagcgcacccggcagccctgccggcagccccacctccacagaggagggaaccagcaccgagcccagcgaaggcagcgccccaggcaccagcaccgagcctagtgagggcggctctggcggcggcagcgcccaggagattaaacggatcaacaagatcagaagaagacttgtgaaagacagcaacaccaagaaggccggcaagacaggccccatgaaaaccctgctggttagagtgatgacacccgatctgagagagcggctggaaaacctgagaaagaagcctgaaaatatcccccagcccatcagcaatacatctagagccaacctgaataagctgctgaccgattacaccgaaatgaagaaggcgatcctgcatgtgtactgggaagagttccagaaggaccctgtgggcctgatgagccgggtggcccagcctgccagcaagaagatcgatcagaacaagctgaaacctgagatggacgagaagggcaacctgaccaccgccggctttgcctgctctcagtgtggccagcccctgttcgtgtacaagctggagcaggtgtctgagaagggcaaggcttacaccaactacttcggacggtgcaatgtggccgagcacgaaaagctgatcctgctggcccagctgaagcccgagaaggatagcgacgaagccgtgacatatagcctgggaaagtttgggcagagggccctggatttctacagcattcatgtgaccaaggagtccacccaccccgtgaagcccctggcccagatcgccggaaacagatacgcctccggacctgtgggaaaggccctgagcgacgcatgtatgggcacaatcgcctccttcctgtctaagtaccaggacatcatcatcgaacaccagaaggtggtgaagggcaaccagaagagactggagagcctgcgggagctggccggcaaggaaaacctggaataccctagcgtgaccctgccacctcagcctcacaccaaggagggcgttgatgcctacaacgaagtgatcgcccgggtgcgaatgtgggtgaacctgaacctgtggcagaagctgaagctaagcagagatgatgccaagcctctgctgagactgaagggattcccttcctttcctctggtcgagagacaggccaacgaagtggactggtgggacatggtgtgtaacgtgaagaagctgatcaacgagaaaaaggaggatggcaaggtgttttggcagaatctggctggctacaagagacaggaagccctgagaccatacctgagcagcgaggaagatcggaagaagggaaagaaattcgctcggtaccagctgggcgacctgctgctgcacctggaaaagaagcacggcgaggactggggaaaggtgtacgacgaggcctgggagcggattgacaagaaagtggaaggcctgagcaagcacatcaagctggaagaggaacggagaagcgaggacgcccagagcaaggccgccctgaccgactggctgcgggctaaggccagcttcgtgatcgagggcctgaaggaggccgacaaggacgagttctgcagatgcgagctgaagctgcagaagtggtacggggacctgcggggaaagcccttcgccatcgaagccgagaacagcatcctggacatcagcggcttcagcaagcagtacaactgtgccttcatctggcagaaggacggcgtgaagaagctgaacctgtacctgatcatcaactacttcaagggcggcaagctgcggttcaagaagatcaaacctgaagccttcgaagccaacagattctacaccgtgatcaacaaaaagagcggcgagatcgtgcccatggaggtgaacttcaacttcgacgaccccaacctgatcatcctgcctctggcctttggcaagagacagggcagagaattcatctggaacgacctgctgtccctggaaaccggcagcctgaagctggccaacggaagagtgatcgagaagacactgtacaacagaagaacccggcaggatgagcctgccctgttcgtggccctgaccttcgagcggcgggaggtcctggactcctccaatatcaaaccaatgaacctgatcggcgtggcaagaggcgaaaacatccccgccgtgatcgccctgaccgaccccgagggctgcccactgagccggtttaaggatagcctgggaaacccaacccacatcctgagaatcggcgagagctataaggagaagcagcggaccatccaggccaagaaggaggtggagcagcggagagccggcggctacagccggaagtacgccagcaaagccaagaatctggcagacgatatggtgagaaacaccgctagagatctgctgtactacgccgtgacccaggatgccatgctgatcttcgccaacctgagccggggcttcggccggcagggcaagcggaccttcatggccgagagacagtacacacggatggaggactggctgaccgccaagctggcctacgagggcctgagcaagacctacctgtccaagacactggcccagtacacctccaagacatgcagcaactgtgggtttaccatcaccagcgccgactacgacagggtgctggagaagctgaagaagacagcaacaggctggatgaccacaattaacggcaaggagctgaaggtggagggccagattacctactacaacagatacaagagacagaacgtagtcaaggacctgtccgtcgagctggatagactgagcgaagaatctgtgaacaacgacatctcctcctggacaaagggcagaagcggagaagctctgagcctcctgaagaaaagattctcccatagacccgtgcaggagaagttcgtgtgcctgaactgcggcttcgagacacacgcagccgagcaagccgccctgaacatcgccagatcctggctgttcctgcggagccaggagtacaagaaataccagacaaacaagacaaccggcaacaccgataagagagccttcgtcgagacctggcagtccttttaccggaagaagcttaaggaggtgtggaaacctgccgtgcggtctggcggatctggcggaggctccacaagcttccaggagcccgtgaccttcgaggacgtggccgtgtacttcacccagaacgagtgggccagcctgcaccccacccagagggccctgtacagggaggtgatgctggagaactacgccaacgtgaccagcctgctggccttccccttccccaagcccgccctgatcagccacctggagaggggcgaggccccctggggccccgacccctgggacaccgagatccccaggggcatcagccagggcaccagccccaagaaaaagagaaaagtctaagctgccttctgcggggcttgccttctggccatgcccttcttctctcccttgcacctgtacctcttggtctttgaataaagcctgagtaggaaggctagcaaaaaaaaaaaaaaaaaaaaaaaaaaaaaaaaaaaaaaaaaaaaaaaaaaaaaaaaaaaaaaaaaaaaaaaaaaaaaaaa

SEQ ID NO: 3472 - RNA, 5419 nt, synthetic construct
  source 1..5419: mol_type = other RNA
aggaaataagagagaaaagaagagtaagaagaaatataagagccaccatggcccctaagaagaagcgtaaagtgagccgggtgaacggcagcggcagcggcggcggcatgaaccacgaccaggagttcgacccccctaaggtgtaccctcccgtccccgccgagaagagaaagcccatccgggtcctgagcctgttcgatggcatcgccaccggtctgctggtgctgaaggacctgggcatccaggtggataggtacattgcctccgaggtgtgcgaggactccatcaccgtgggaatggtgcgtcatcagggcaagatcatgtacgtgggcgacgtgcggagcgtgacacagaagcatatccaggagtggggccctttcgacctggtgatcggcggcagcccttgcaatgacctgagcatcgtgaacccagcccggaagggcctgtacgagggaaccggcagactgttcttcgagttttacagactgctgcacgacgcccggcctaaggaaggcgacgaccggcccttcttttggctgttcgagaatgtggtggccatgggagtcagcgacaagcgggatattagccggttcctggagagcaaccccgtgatgatcgatgccaaggaagtgagcgccgcccaccgggccagatacttctggggcaatctgcctggcatgaacagacccctggccagcaccgtgaacgacaagctggagctgcaggagtgcctggagcacggccggatcgccaagttcagcaaggtgagaaccatcaccacccgaagcaacagcatcaaacaaggcaaggaccagcactttcctgtgttcatgaacgagaaggaggacatcctgtggtgtaccgagatggagagagtgttcgggttcccagtccactacacagatgtcagcaacatgtctagactggccagacagagactgctgggaagaagctggtccgtccctgtgatcagacacctgttcgcccctctgaaggagtacttcgcctgcgtgagcagcggcaacagcaacgccaacagccggggccccagcttctctagcggcctggtgccactgtccctgagagggagccacatgggccccatggagatctacaaaaccgtgagcgcctggaagcggcagcctgtgcgcgtgctgagcctgtttcggaatatcgataaagtcctgaaaagcctgggattcctggagagcggctctggctccggcggtggcaccctgaagtacgtggaggatgtgacaaacgtggtcagacgggatgtggagaagtggggccccttcgatctggtgtacggcagcacccaacccctgggcagctcttgtgaccggtgccctggctggtacatgtttcagttccaccggatcctgcagtacgccctgccgagacaggagtcccagcggccattcttttggattttcatggacaacttgctgctgaccgaggatgaccaggaaactaccactcggttcctgcagaccgaagccgtgaccctgcaggacgtgagaggccgggactaccagaacgccatgcgggtgtggtccaacatccctggactgaaaagcaagcacgcacctctgacccctaaagaagaggagtacctgcaggcccaggtgcggagcagaagcaagctggacgcccctaaggtggatctgctggtgaagaattgcctcctgcccctgagagagtacttcaagtatttcagccagaatagtctgcccctgggcggcccaagcagcggcgcccctcctcccagcggcggcagcccagccggctccccaacctctaccgaggagggcacctctgagtccgccacccccgagagcggccctggcacctccaccgagcccagcgagggcagcgcacccggcagccctgccggcagccccacctccacagaggagggaaccagcaccgagcccagcgaaggcagcgccccaggcaccagcaccgagcctagtgagggcggctctggcggcggcagcgcccaggagattaaacggatcaacaagatcagaagaagacttgtgaaagacagcaacaccaagaaggccggcaagacaggccccatgaaaaccctgctggttagagtgatgacacccgatctgagagagcggctggaaaacctgagaaagaagcctgaaaatatcccccagcccatcagcaatacatctagagccaacctgaataagctgctgaccgattacaccgaaatgaagaaggcgatcctgcatgtgtactgggaagagttccagaaggaccctgtgggcctgatgagccgggtggcccagcctgccagcaagaagatcgatcagaacaagctgaaacctgagatggacgagaagggcaacctgaccaccgccggctttgcctgctctcagtgtggccagcccctgttcgtgtacaagctggagcaggtgtctgagaagggcaaggcttacaccaactacttcggacggtgcaatgtggccgagcacgaaaagctgatcctgctggcccagctgaagcccgagaaggatagcgacgaagccgtgacatatagcctgggaaagtttgggcagagggccctggatttctacagcattcatgtgaccaaggagtccacccaccccgtgaagcccctggcccagatcgccggaaacagatacgcctccggacctgtgggaaaggccctgagcgacgcatgtatgggcacaatcgcctccttcctgtctaagtaccaggacatcatcatcgaacaccagaaggtggtgaagggcaaccagaagagactggagagcctgcgggagctggccggcaaggaaaacctggaataccctagcgtgaccctgccacctcagcctcacaccaaggagggcgttgatgcctacaacgaagtgatcgcccgggtgcgaatgtgggtgaacctgaacctgtggcagaagctgaagctaagcagagatgatgccaagcctctgctgagactgaagggattcccttcctttcctctggtcgagagacaggccaacgaagtggactggtgggacatggtgtgtaacgtgaagaagctgatcaacgagaaaaaggaggatggcaaggtgttttggcagaatctggctggctacaagagacaggaagccctgagaccatacctgagcagcgaggaagatcggaagaagggaaagaaattcgctcggtaccagctgggcgacctgctgctgcacctggaaaagaagcacggcgaggactggggaaaggtgtacgacgaggcctgggagcggattgacaagaaagtggaaggcctgagcaagcacatcaagctggaagaggaacggagaagcgaggacgcccagagcaaggccgccctgaccgactggctgcgggctaaggccagcttcgtgatcgagggcctgaaggaggccgacaaggacgagttctgcagatgcgagctgaagctgcagaagtggtacggggacctgcggggaaagcccttcgccatcgaagccgagaacagcatcctggacatcagcggcttcagcaagcagtacaactgtgccttcatctggcagaaggacggcgtgaagaagctgaacctgtacctgatcatcaactacttcaagggcggcaagctgcggttcaagaagatcaaacctgaagccttcgaagccaacagattctacaccgtgatcaacaaaaagagcggcgagatcgtgcccatggaggtgaacttcaacttcgacgaccccaacctgatcatcctgcctctggcctttggcaagagacagggcagagaattcatctggaacgacctgctgtccctggaaaccggcagcctgaagctggccaacggaagagtgatcgagaagacactgtacaacagaagaacccggcaggatgagcctgccctgttcgtggccctgaccttcgagcggcgggaggtcctggactcctccaatatcaaaccaatgaacctgatcggcgtggcaagaggcgaaaacatccccgccgtgatcgccctgaccgaccccgagggctgcccactgagccggtttaaggatagcctgggaaacccaacccacatcctgagaatcggcgagagctataaggagaagcagcggaccatccaggccaagaaggaggtggagcagcggagagccggcggctacagccggaagtacgccagcaaagccaagaatctggcagacgatatggtgagaaacaccgctagagatctgctgtactacgccgtgacccaggatgccatgctgatcttcgccaacctgagccggggcttcggccggcagggcaagcggaccttcatggccgagagacagtacacacggatggaggactggctgaccgccaagctggcctacgagggcctgagcaagacctacctgtccaagacactggcccagtacacctccaagacatgcagcaactgtgggtttaccatcaccagcgccgactacgacagggtgctggagaagctgaagaagacagcaacaggctggatgaccacaattaacggcaaggagctgaaggtggagggccagattacctactacaacagatacaagagacagaacgtagtcaaggacctgtccgtcgagctggatagactgagcgaagaatctgtgaacaacgacatctcctcctggacaaagggcagaagcggagaagctctgagcctcctgaagaaaagattctcccatagacccgtgcaggagaagttcgtgtgcctgaactgcggcttcgagacacacgcagccgagcaagccgccctgaacatcgccagatcctggctgttcctgcggagccaggagtacaagaaataccagacaaacaagacaaccggcaacaccgataagagagccttcgtcgagacctggcagtccttttaccggaagaagcttaaggaggtgtggaaacctgccgtgcggtctggcggatctggcggaggctccacaagcggcgaggaggccgtgaccttcagggacgtggccctggacttcacctgggaggagtggggctgcctgagcgccgcccagagggagctgtacaaggacgtgatgctggagaactacaggaacctggtgagcctgggcctgcccggccccaagcccggcctgatcagctggctggagggcgaggaggagccccacccctgggacagcctggtgcacgccgccaggagcaccagcctgagcaaggccaccagccccaagaaaaagagaaaagtctaagctgccttctgcggggcttgccttctggccatgcccttcttctctcccttgcacctgtacctcttggtctttgaataaagcctgagtaggaaggctagcaaaaaaaaaaaaaaaaaaaaaaaaaaaaaaaaaaaaaaaaaaaaaaaaaaaaaaaaaaaaaaaaaaaaaaaaaaaaaaaa

SEQ ID NO: 3473 - RNA, 5419 nt, synthetic construct
  source 1..5419: mol_type = other RNA
aggaaataagagagaaaagaagagtaagaagaaatataagagccaccatggcccctaagaagaagcgtaaagtgagccgggtgaacggcagcggcagcggcggcggcatgaaccacgaccaggagttcgacccccctaaggtgtaccctcccgtccccgccgagaagagaaagcccatccgggtcctgagcctgttcgatggcatcgccaccggtctgctggtgctgaaggacctgggcatccaggtggataggtacattgcctccgaggtgtgcgaggactccatcaccgtgggaatggtgcgtcatcagggcaagatcatgtacgtgggcgacgtgcggagcgtgacacagaagcatatccaggagtggggccctttcgacctggtgatcggcggcagcccttgcaatgacctgagcatcgtgaacccagcccggaagggcctgtacgagggaaccggcagactgttcttcgagttttacagactgctgcacgacgcccggcctaaggaaggcgacgaccggcccttcttttggctgttcgagaatgtggtggccatgggagtcagcgacaagcgggatattagccggttcctggagagcaaccccgtgatgatcgatgccaaggaagtgagcgccgcccaccgggccagatacttctggggcaatctgcctggcatgaacagacccctggccagcaccgtgaacgacaagctggagctgcaggagtgcctggagcacggccggatcgccaagttcagcaaggtgagaaccatcaccacccgaagcaacagcatcaaacaaggcaaggaccagcactttcctgtgttcatgaacgagaaggaggacatcctgtggtgtaccgagatggagagagtgttcgggttcccagtccactacacagatgtcagcaacatgtctagactggccagacagagactgctgggaagaagctggtccgtccctgtgatcagacacctgttcgcccctctgaaggagtacttcgcctgcgtgagcagcggcaacagcaacgccaacagccggggccccagcttctctagcggcctggtgccactgtccctgagagggagccacatgggccccatggagatctacaaaaccgtgagcgcctggaagcggcagcctgtgcgcgtgctgagcctgtttcggaatatcgataaagtcctgaaaagcctgggattcctggagagcggctctggctccggcggtggcaccctgaagtacgtggaggatgtgacaaacgtggtcagacgggatgtggagaagtggggccccttcgatctggtgtacggcagcacccaacccctgggcagctcttgtgaccggtgccctggctggtacatgtttcagttccaccggatcctgcagtacgccctgccgagacaggagtcccagcggccattcttttggattttcatggacaacttgctgctgaccgaggatgaccaggaaactaccactcggttcctgcagaccgaagccgtgaccctgcaggacgtgagaggccgggactaccagaacgccatgcgggtgtggtccaacatccctggactgaaaagcaagcacgcacctctgacccctaaagaagaggagtacctgcaggcccaggtgcggagcagaagcaagctggacgcccctaaggtggatctgctggtgaagaattgcctcctgcccctgagagagtacttcaagtatttcagccagaatagtctgcccctgggcggcccaagcagcggcgcccctcctcccagcggcggcagcccagccggctccccaacctctaccgaggagggcacctctgagtccgccacccccgagagcggccctggcacctccaccgagcccagcgagggcagcgcacccggcagccctgccggcagccccacctccacagaggagggaaccagcaccgagcccagcgaaggcagcgccccaggcaccagcaccgagcctagtgagggcggctctggcggcggcagcgcccaggagattaaacggatcaacaagatcagaagaagacttgtgaaagacagcaacaccaagaaggccggcaagacaggccccatgaaaaccctgctggttagagtgatgacacccgatctgagagagcggctggaaaacctgagaaagaagcctgaaaatatcccccagcccatcagcaatacatctagagccaacctgaataagctgctgaccgattacaccgaaatgaagaaggcgatcctgcatgtgtactgggaagagttccagaaggaccctgtgggcctgatgagccgggtggcccagcctgccagcaagaagatcgatcagaacaagctgaaacctgagatggacgagaagggcaacctgaccaccgccggctttgcctgctctcagtgtggccagcccctgttcgtgtacaagctggagcaggtgtctgagaagggcaaggcttacaccaactacttcggacggtgcaatgtggccgagcacgaaaagctgatcctgctggcccagctgaagcccgagaaggatagcgacgaagccgtgacatatagcctgggaaagtttgggcagagggccctggatttctacagcattcatgtgaccaaggagtccacccaccccgtgaagcccctggcccagatcgccggaaacagatacgcctccggacctgtgggaaaggccctgagcgacgcatgtatgggcacaatcgcctccttcctgtctaagtaccaggacatcatcatcgaacaccagaaggtggtgaagggcaaccagaagagactggagagcctgcgggagctggccggcaaggaaaacctggaataccctagcgtgaccctgccacctcagcctcacaccaaggagggcgttgatgcctacaacgaagtgatcgcccgggtgcgaatgtgggtgaacctgaacctgtggcagaagctgaagctaagcagagatgatgccaagcctctgctgagactgaagggattcccttcctttcctctggtcgagagacaggccaacgaagtggactggtgggacatggtgtgtaacgtgaagaagctgatcaacgagaaaaaggaggatggcaaggtgttttggcagaatctggctggctacaagagacaggaagccctgagaccatacctgagcagcgaggaagatcggaagaagggaaagaaattcgctcggtaccagctgggcgacctgctgctgcacctggaaaagaagcacggcgaggactggggaaaggtgtacgacgaggcctgggagcggattgacaagaaagtggaaggcctgagcaagcacatcaagctggaagaggaacggagaagcgaggacgcccagagcaaggccgccctgaccgactggctgcgggctaaggccagcttcgtgatcgagggcctgaaggaggccgacaaggacgagttctgcagatgcgagctgaagctgcagaagtggtacggggacctgcggggaaagcccttcgccatcgaagccgagaacagcatcctggacatcagcggcttcagcaagcagtacaactgtgccttcatctggcagaaggacggcgtgaagaagctgaacctgtacctgatcatcaactacttcaagggcggcaagctgcggttcaagaagatcaaacctgaagccttcgaagccaacagattctacaccgtgatcaacaaaaagagcggcgagatcgtgcccatggaggtgaacttcaacttcgacgaccccaacctgatcatcctgcctctggcctttggcaagagacagggcagagaattcatctggaacgacctgctgtccctggaaaccggcagcctgaagctggccaacggaagagtgatcgagaagacactgtacaacagaagaacccggcaggatgagcctgccctgttcgtggccctgaccttcgagcggcgggaggtcctggactcctccaatatcaaaccaatgaacctgatcggcgtggcaagaggcgaaaacatccccgccgtgatcgccctgaccgaccccgagggctgcccactgagccggtttaaggatagcctgggaaacccaacccacatcctgagaatcggcgagagctataaggagaagcagcggaccatccaggccaagaaggaggtggagcagcggagagccggcggctacagccggaagtacgccagcaaagccaagaatctggcagacgatatggtgagaaacaccgctagagatctgctgtactacgccgtgacccaggatgccatgctgatcttcgccaacctgagccggggcttcggccggcagggcaagcggaccttcatggccgagagacagtacacacggatggaggactggctgaccgccaagctggcctacgagggcctgagcaagacctacctgtccaagacactggcccagtacacctccaagacatgcagcaactgtgggtttaccatcaccagcgccgactacgacagggtgctggagaagctgaagaagacagcaacaggctggatgaccacaattaacggcaaggagctgaaggtggagggccagattacctactacaacagatacaagagacagaacgtagtcaaggacctgtccgtcgagctggatagactgagcgaagaatctgtgaacaacgacatctcctcctggacaaagggcagaagcggagaagctctgagcctcctgaagaaaagattctcccatagacccgtgcaggagaagttcgtgtgcctgaactgcggcttcgagacacacgcagccgagcaagccgccctgaacatcgccagatcctggctgttcctgcggagccaggagtacaagaaataccagacaaacaagacaaccggcaacaccgataagagagccttcgtcgagacctggcagtccttttaccggaagaagcttaaggaggtgtggaaacctgccgtgcggtctggcggatctggcggaggctccacaagcagccagaccctggtgaccttcaaggacgtgttcgtggacttcaccagggaggagtggaagctgctggacaccgcccagcagatcgtgtacaggaacgtgatgctggagaactacaagaacctggtgagcctgggctaccagctgaccaagcccgacgtgatcctgaggctggagaagggcgaggagccctgggtggtggagaggggcatccaccaggagacccaccccgacagcgagaccgccaccagccccaagaaaaagagaaaagtctaagctgccttctgcggggcttgccttctggccatgcccttcttctctcccttgcacctgtacctcttggtctttgaataaagcctgagtaggaaggctagcaaaaaaaaaaaaaaaaaaaaaaaaaaaaaaaaaaaaaaaaaaaaaaaaaaaaaaaaaaaaaaaaaaaaaaaaaaaaaaaa

SEQ ID NO: 3474 - RNA, 5419 nt, synthetic construct
  source 1..5419: mol_type = other RNA
aggaaataagagagaaaagaagagtaagaagaaatataagagccaccatggcccctaagaagaagcgtaaagtgagccgggtgaacggcagcggcagcggcggcggcatgaaccacgaccaggagttcgacccccctaaggtgtaccctcccgtccccgccgagaagagaaagcccatccgggtcctgagcctgttcgatggcatcgccaccggtctgctggtgctgaaggacctgggcatccaggtggataggtacattgcctccgaggtgtgcgaggactccatcaccgtgggaatggtgcgtcatcagggcaagatcatgtacgtgggcgacgtgcggagcgtgacacagaagcatatccaggagtggggccctttcgacctggtgatcggcggcagcccttgcaatgacctgagcatcgtgaacccagcccggaagggcctgtacgagggaaccggcagactgttcttcgagttttacagactgctgcacgacgcccggcctaaggaaggcgacgaccggcccttcttttggctgttcgagaatgtggtggccatgggagtcagcgacaagcgggatattagccggttcctggagagcaaccccgtgatgatcgatgccaaggaagtgagcgccgcccaccgggccagatacttctggggcaatctgcctggcatgaacagacccctggccagcaccgtgaacgacaagctggagctgcaggagtgcctggagcacggccggatcgccaagttcagcaaggtgagaaccatcaccacccgaagcaacagcatcaaacaaggcaaggaccagcactttcctgtgttcatgaacgagaaggaggacatcctgtggtgtaccgagatggagagagtgttcgggttcccagtccactacacagatgtcagcaacatgtctagactggccagacagagactgctgggaagaagctggtccgtccctgtgatcagacacctgttcgcccctctgaaggagtacttcgcctgcgtgagcagcggcaacagcaacgccaacagccggggccccagcttctctagcggcctggtgccactgtccctgagagggagccacatgggccccatggagatctacaaaaccgtgagcgcctggaagcggcagcctgtgcgcgtgctgagcctgtttcggaatatcgataaagtcctgaaaagcctgggattcctggagagcggctctggctccggcggtggcaccctgaagtacgtggaggatgtgacaaacgtggtcagacgggatgtggagaagtggggccccttcgatctggtgtacggcagcacccaacccctgggcagctcttgtgaccggtgccctggctggtacatgtttcagttccaccggatcctgcagtacgccctgccgagacaggagtcccagcggccattcttttggattttcatggacaacttgctgctgaccgaggatgaccaggaaactaccactcggttcctgcagaccgaagccgtgaccctgcaggacgtgagaggccgggactaccagaacgccatgcgggtgtggtccaacatccctggactgaaaagcaagcacgcacctctgacccctaaagaagaggagtacctgcaggcccaggtgcggagcagaagcaagctggacgcccctaaggtggatctgctggtgaagaattgcctcctgcccctgagagagtacttcaagtatttcagccagaatagtctgcccctgggcggcccaagcagcggcgcccctcctcccagcggcggcagcccagccggctccccaacctctaccgaggagggcacctctgagtccgccacccccgagagcggccctggcacctccaccgagcccagcgagggcagcgcacccggcagccctgccggcagccccacctccacagaggagggaaccagcaccgagcccagcgaaggcagcgccccaggcaccagcaccgagcctagtgagggcggctctggcggcggcagcgcccaggagattaaacggatcaacaagatcagaagaagacttgtgaaagacagcaacaccaagaaggccggcaagacaggccccatgaaaaccctgctggttagagtgatgacacccgatctgagagagcggctggaaaacctgagaaagaagcctgaaaatatcccccagcccatcagcaatacatctagagccaacctgaataagctgctgaccgattacaccgaaatgaagaaggcgatcctgcatgtgtactgggaagagttccagaaggaccctgtgggcctgatgagccgggtggcccagcctgccagcaagaagatcgatcagaacaagctgaaacctgagatggacgagaagggcaacctgaccaccgccggctttgcctgctctcagtgtggccagcccctgttcgtgtacaagctggagcaggtgtctgagaagggcaaggcttacaccaactacttcggacggtgcaatgtggccgagcacgaaaagctgatcctgctggcccagctgaagcccgagaaggatagcgacgaagccgtgacatatagcctgggaaagtttgggcagagggccctggatttctacagcattcatgtgaccaaggagtccacccaccccgtgaagcccctggcccagatcgccggaaacagatacgcctccggacctgtgggaaaggccctgagcgacgcatgtatgggcacaatcgcctccttcctgtctaagtaccaggacatcatcatcgaacaccagaaggtggtgaagggcaaccagaagagactggagagcctgcgggagctggccggcaaggaaaacctggaataccctagcgtgaccctgccacctcagcctcacaccaaggagggcgttgatgcctacaacgaagtgatcgcccgggtgcgaatgtgggtgaacctgaacctgtggcagaagctgaagctaagcagagatgatgccaagcctctgctgagactgaagggattcccttcctttcctctggtcgagagacaggccaacgaagtggactggtgggacatggtgtgtaacgtgaagaagctgatcaacgagaaaaaggaggatggcaaggtgttttggcagaatctggctggctacaagagacaggaagccctgagaccatacctgagcagcgaggaagatcggaagaagggaaagaaattcgctcggtaccagctgggcgacctgctgctgcacctggaaaagaagcacggcgaggactggggaaaggtgtacgacgaggcctgggagcggattgacaagaaagtggaaggcctgagcaagcacatcaagctggaagaggaacggagaagcgaggacgcccagagcaaggccgccctgaccgactggctgcgggctaaggccagcttcgtgatcgagggcctgaaggaggccgacaaggacgagttctgcagatgcgagctgaagctgcagaagtggtacggggacctgcggggaaagcccttcgccatcgaagccgagaacagcatcctggacatcagcggcttcagcaagcagtacaactgtgccttcatctggcagaaggacggcgtgaagaagctgaacctgtacctgatcatcaactacttcaagggcggcaagctgcggttcaagaagatcaaacctgaagccttcgaagccaacagattctacaccgtgatcaacaaaaagagcggcgagatcgtgcccatggaggtgaacttcaacttcgacgaccccaacctgatcatcctgcctctggcctttggcaagagacagggcagagaattcatctggaacgacctgctgtccctggaaaccggcagcctgaagctggccaacggaagagtgatcgagaagacactgtacaacagaagaacccggcaggatgagcctgccctgttcgtggccctgaccttcgagcggcgggaggtcctggactcctccaatatcaaaccaatgaacctgatcggcgtggcaagaggcgaaaacatccccgccgtgatcgccctgaccgaccccgagggctgcccactgagccggtttaaggatagcctgggaaacccaacccacatcctgagaatcggcgagagctataaggagaagcagcggaccatccaggccaagaaggaggtggagcagcggagagccggcggctacagccggaagtacgccagcaaagccaagaatctggcagacgatatggtgagaaacaccgctagagatctgctgtactacgccgtgacccaggatgccatgctgatcttcgccaacctgagccggggcttcggccggcagggcaagcggaccttcatggccgagagacagtacacacggatggaggactggctgaccgccaagctggcctacgagggcctgagcaagacctacctgtccaagacactggcccagtacacctccaagacatgcagcaactgtgggtttaccatcaccagcgccgactacgacagggtgctggagaagctgaagaagacagcaacaggctggatgaccacaattaacggcaaggagctgaaggtggagggccagattacctactacaacagatacaagagacagaacgtagtcaaggacctgtccgtcgagctggatagactgagcgaagaatctgtgaacaacgacatctcctcctggacaaagggcagaagcggagaagctctgagcctcctgaagaaaagattctcccatagacccgtgcaggagaagttcgtgtgcctgaactgcggcttcgagacacacgcagccgagcaagccgccctgaacatcgccagatcctggctgttcctgcggagccaggagtacaagaaataccagacaaacaagacaaccggcaacaccgataagagagccttcgtcgagacctggcagtccttttaccggaagaagcttaaggaggtgtggaaacctgccgtgcggtctggcggatctggcggaggctccacaagccccaaggcccccgtgaccttcggcgacgtggccatctacttcagcaaggaggagtgggagtgcctgagccccaaccagaaggacctgtacgaggacgtgatgatggagaactaccagaacctggccagcatcggcttcagctgcaggaggcccaacgtgatcaccctgctggagaagggcgaggccccctggatggccgagcccctgaggaggaggcagggccccgacagcggcagcaagaagaccagccccaagaaaaagagaaaagtctaagctgccttctgcggggcttgccttctggccatgcccttcttctctcccttgcacctgtacctcttggtctttgaataaagcctgagtaggaaggctagcaaaaaaaaaaaaaaaaaaaaaaaaaaaaaaaaaaaaaaaaaaaaaaaaaaaaaaaaaaaaaaaaaaaaaaaaaaaaaaaa

SEQ ID NO: 3475 - RNA, 5419 nt, synthetic construct
  source 1..5419: mol_type = other RNA
aggaaataagagagaaaagaagagtaagaagaaatataagagccaccatggcccctaagaagaagcgtaaagtgagccgggtgaacggcagcggcagcggcggcggcatgaaccacgaccaggagttcgacccccctaaggtgtaccctcccgtccccgccgagaagagaaagcccatccgggtcctgagcctgttcgatggcatcgccaccggtctgctggtgctgaaggacctgggcatccaggtggataggtacattgcctccgaggtgtgcgaggactccatcaccgtgggaatggtgcgtcatcagggcaagatcatgtacgtgggcgacgtgcggagcgtgacacagaagcatatccaggagtggggccctttcgacctggtgatcggcggcagcccttgcaatgacctgagcatcgtgaacccagcccggaagggcctgtacgagggaaccggcagactgttcttcgagttttacagactgctgcacgacgcccggcctaaggaaggcgacgaccggcccttcttttggctgttcgagaatgtggtggccatgggagtcagcgacaagcgggatattagccggttcctggagagcaaccccgtgatgatcgatgccaaggaagtgagcgccgcccaccgggccagatacttctggggcaatctgcctggcatgaacagacccctggccagcaccgtgaacgacaagctggagctgcaggagtgcctggagcacggccggatcgccaagttcagcaaggtgagaaccatcaccacccgaagcaacagcatcaaacaaggcaaggaccagcactttcctgtgttcatgaacgagaaggaggacatcctgtggtgtaccgagatggagagagtgttcgggttcccagtccactacacagatgtcagcaacatgtctagactggccagacagagactgctgggaagaagctggtccgtccctgtgatcagacacctgttcgcccctctgaaggagtacttcgcctgcgtgagcagcggcaacagcaacgccaacagccggggccccagcttctctagcggcctggtgccactgtccctgagagggagccacatgggccccatggagatctacaaaaccgtgagcgcctggaagcggcagcctgtgcgcgtgctgagcctgtttcggaatatcgataaagtcctgaaaagcctgggattcctggagagcggctctggctccggcggtggcaccctgaagtacgtggaggatgtgacaaacgtggtcagacgggatgtggagaagtggggccccttcgatctggtgtacggcagcacccaacccctgggcagctcttgtgaccggtgccctggctggtacatgtttcagttccaccggatcctgcagtacgccctgccgagacaggagtcccagcggccattcttttggattttcatggacaacttgctgctgaccgaggatgaccaggaaactaccactcggttcctgcagaccgaagccgtgaccctgcaggacgtgagaggccgggactaccagaacgccatgcgggtgtggtccaacatccctggactgaaaagcaagcacgcacctctgacccctaaagaagaggagtacctgcaggcccaggtgcggagcagaagcaagctggacgcccctaaggtggatctgctggtgaagaattgcctcctgcccctgagagagtacttcaagtatttcagccagaatagtctgcccctgggcggcccaagcagcggcgcccctcctcccagcggcggcagcccagccggctccccaacctctaccgaggagggcacctctgagtccgccacccccgagagcggccctggcacctccaccgagcccagcgagggcagcgcacccggcagccctgccggcagccccacctccacagaggagggaaccagcaccgagcccagcgaaggcagcgccccaggcaccagcaccgagcctagtgagggcggctctggcggcggcagcgcccaggagattaaacggatcaacaagatcagaagaagacttgtgaaagacagcaacaccaagaaggccggcaagacaggccccatgaaaaccctgctggttagagtgatgacacccgatctgagagagcggctggaaaacctgagaaagaagcctgaaaatatcccccagcccatcagcaatacatctagagccaacctgaataagctgctgaccgattacaccgaaatgaagaaggcgatcctgcatgtgtactgggaagagttccagaaggaccctgtgggcctgatgagccgggtggcccagcctgccagcaagaagatcgatcagaacaagctgaaacctgagatggacgagaagggcaacctgaccaccgccggctttgcctgctctcagtgtggccagcccctgttcgtgtacaagctggagcaggtgtctgagaagggcaaggcttacaccaactacttcggacggtgcaatgtggccgagcacgaaaagctgatcctgctggcccagctgaagcccgagaaggatagcgacgaagccgtgacatatagcctgggaaagtttgggcagagggccctggatttctacagcattcatgtgaccaaggagtccacccaccccgtgaagcccctggcccagatcgccggaaacagatacgcctccggacctgtgggaaaggccctgagcgacgcatgtatgggcacaatcgcctccttcctgtctaagtaccaggacatcatcatcgaacaccagaaggtggtgaagggcaaccagaagagactggagagcctgcgggagctggccggcaaggaaaacctggaataccctagcgtgaccctgccacctcagcctcacaccaaggagggcgttgatgcctacaacgaagtgatcgcccgggtgcgaatgtgggtgaacctgaacctgtggcagaagctgaagctaagcagagatgatgccaagcctctgctgagactgaagggattcccttcctttcctctggtcgagagacaggccaacgaagtggactggtgggacatggtgtgtaacgtgaagaagctgatcaacgagaaaaaggaggatggcaaggtgttttggcagaatctggctggctacaagagacaggaagccctgagaccatacctgagcagcgaggaagatcggaagaagggaaagaaattcgctcggtaccagctgggcgacctgctgctgcacctggaaaagaagcacggcgaggactggggaaaggtgtacgacgaggcctgggagcggattgacaagaaagtggaaggcctgagcaagcacatcaagctggaagaggaacggagaagcgaggacgcccagagcaaggccgccctgaccgactggctgcgggctaaggccagcttcgtgatcgagggcctgaaggaggccgacaaggacgagttctgcagatgcgagctgaagctgcagaagtggtacggggacctgcggggaaagcccttcgccatcgaagccgagaacagcatcctggacatcagcggcttcagcaagcagtacaactgtgccttcatctggcagaaggacggcgtgaagaagctgaacctgtacctgatcatcaactacttcaagggcggcaagctgcggttcaagaagatcaaacctgaagccttcgaagccaacagattctacaccgtgatcaacaaaaagagcggcgagatcgtgcccatggaggtgaacttcaacttcgacgaccccaacctgatcatcctgcctctggcctttggcaagagacagggcagagaattcatctggaacgacctgctgtccctggaaaccggcagcctgaagctggccaacggaagagtgatcgagaagacactgtacaacagaagaacccggcaggatgagcctgccctgttcgtggccctgaccttcgagcggcgggaggtcctggactcctccaatatcaaaccaatgaacctgatcggcgtggcaagaggcgaaaacatccccgccgtgatcgccctgaccgaccccgagggctgcccactgagccggtttaaggatagcctgggaaacccaacccacatcctgagaatcggcgagagctataaggagaagcagcggaccatccaggccaagaaggaggtggagcagcggagagccggcggctacagccggaagtacgccagcaaagccaagaatctggcagacgatatggtgagaaacaccgctagagatctgctgtactacgccgtgacccaggatgccatgctgatcttcgccaacctgagccggggcttcggccggcagggcaagcggaccttcatggccgagagacagtacacacggatggaggactggctgaccgccaagctggcctacgagggcctgagcaagacctacctgtccaagacactggcccagtacacctccaagacatgcagcaactgtgggtttaccatcaccagcgccgactacgacagggtgctggagaagctgaagaagacagcaacaggctggatgaccacaattaacggcaaggagctgaaggtggagggccagattacctactacaacagatacaagagacagaacgtagtcaaggacctgtccgtcgagctggatagactgagcgaagaatctgtgaacaacgacatctcctcctggacaaagggcagaagcggagaagctctgagcctcctgaagaaaagattctcccatagacccgtgcaggagaagttcgtgtgcctgaactgcggcttcgagacacacgcagccgagcaagccgccctgaacatcgccagatcctggctgttcctgcggagccaggagtacaagaaataccagacaaacaagacaaccggcaacaccgataagagagccttcgtcgagacctggcagtccttttaccggaagaagcttaaggaggtgtggaaacctgccgtgcggtctggcggatctggcggaggctccacaagcagcctggagagcgagctgttcagggacgtggccatcgtgttcagccaggaggagtggcagtgcctggcccccgcccagagggacctgtacagggacgtgatgctggagacctacagcaacctggtgagcctgggcctggccatcagcaagcccgacgtgatcagcttcctggagcagggcaaggagccctggatggtggagagggtggtgagcggcggcctgtgccccgtgctgaagtacaggaccagccccaagaaaaagagaaaagtctaagctgccttctgcggggcttgccttctggccatgcccttcttctctcccttgcacctgtacctcttggtctttgaataaagcctgagtaggaaggctagcaaaaaaaaaaaaaaaaaaaaaaaaaaaaaaaaaaaaaaaaaaaaaaaaaaaaaaaaaaaaaaaaaaaaaaaaaaaaaaaa

SEQ ID NO: 3476 - RNA, 5419 nt, synthetic construct
  source 1..5419: mol_type = other RNA
aggaaataagagagaaaagaagagtaagaagaaatataagagccaccatggcccctaagaagaagcgtaaagtgagccgggtgaacggcagcggcagcggcggcggcatgaaccacgaccaggagttcgacccccctaaggtgtaccctcccgtccccgccgagaagagaaagcccatccgggtcctgagcctgttcgatggcatcgccaccggtctgctggtgctgaaggacctgggcatccaggtggataggtacattgcctccgaggtgtgcgaggactccatcaccgtgggaatggtgcgtcatcagggcaagatcatgtacgtgggcgacgtgcggagcgtgacacagaagcatatccaggagtggggccctttcgacctggtgatcggcggcagcccttgcaatgacctgagcatcgtgaacccagcccggaagggcctgtacgagggaaccggcagactgttcttcgagttttacagactgctgcacgacgcccggcctaaggaaggcgacgaccggcccttcttttggctgttcgagaatgtggtggccatgggagtcagcgacaagcgggatattagccggttcctggagagcaaccccgtgatgatcgatgccaaggaagtgagcgccgcccaccgggccagatacttctggggcaatctgcctggcatgaacagacccctggccagcaccgtgaacgacaagctggagctgcaggagtgcctggagcacggccggatcgccaagttcagcaaggtgagaaccatcaccacccgaagcaacagcatcaaacaaggcaaggaccagcactttcctgtgttcatgaacgagaaggaggacatcctgtggtgtaccgagatggagagagtgttcgggttcccagtccactacacagatgtcagcaacatgtctagactggccagacagagactgctgggaagaagctggtccgtccctgtgatcagacacctgttcgcccctctgaaggagtacttcgcctgcgtgagcagcggcaacagcaacgccaacagccggggccccagcttctctagcggcctggtgccactgtccctgagagggagccacatgggccccatggagatctacaaaaccgtgagcgcctggaagcggcagcctgtgcgcgtgctgagcctgtttcggaatatcgataaagtcctgaaaagcctgggattcctggagagcggctctggctccggcggtggcaccctgaagtacgtggaggatgtgacaaacgtggtcagacgggatgtggagaagtggggccccttcgatctggtgtacggcagcacccaacccctgggcagctcttgtgaccggtgccctggctggtacatgtttcagttccaccggatcctgcagtacgccctgccgagacaggagtcccagcggccattcttttggattttcatggacaacttgctgctgaccgaggatgaccaggaaactaccactcggttcctgcagaccgaagccgtgaccctgcaggacgtgagaggccgggactaccagaacgccatgcgggtgtggtccaacatccctggactgaaaagcaagcacgcacctctgacccctaaagaagaggagtacctgcaggcccaggtgcggagcagaagcaagctggacgcccctaaggtggatctgctggtgaagaattgcctcctgcccctgagagagtacttcaagtatttcagccagaatagtctgcccctgggcggcccaagcagcggcgcccctcctcccagcggcggcagcccagccggctccccaacctctaccgaggagggcacctctgagtccgccacccccgagagcggccctggcacctccaccgagcccagcgagggcagcgcacccggcagccctgccggcagccccacctccacagaggagggaaccagcaccgagcccagcgaaggcagcgccccaggcaccagcaccgagcctagtgagggcggctctggcggcggcagcgcccaggagattaaacggatcaacaagatcagaagaagacttgtgaaagacagcaacaccaagaaggccggcaagacaggccccatgaaaaccctgctggttagagtgatgacacccgatctgagagagcggctggaaaacctgagaaagaagcctgaaaatatcccccagcccatcagcaatacatctagagccaacctgaataagctgctgaccgattacaccgaaatgaagaaggcgatcctgcatgtgtactgggaagagttccagaaggaccctgtgggcctgatgagccgggtggcccagcctgccagcaagaagatcgatcagaacaagctgaaacctgagatggacgagaagggcaacctgaccaccgccggctttgcctgctctcagtgtggccagcccctgttcgtgtacaagctggagcaggtgtctgagaagggcaaggcttacaccaactacttcggacggtgcaatgtggccgagcacgaaaagctgatcctgctggcccagctgaagcccgagaaggatagcgacgaagccgtgacatatagcctgggaaagtttgggcagagggccctggatttctacagcattcatgtgaccaaggagtccacccaccccgtgaagcccctggcccagatcgccggaaacagatacgcctccggacctgtgggaaaggccctgagcgacgcatgtatgggcacaatcgcctccttcctgtctaagtaccaggacatcatcatcgaacaccagaaggtggtgaagggcaaccagaagagactggagagcctgcgggagctggccggcaaggaaaacctggaataccctagcgtgaccctgccacctcagcctcacaccaaggagggcgttgatgcctacaacgaagtgatcgcccgggtgcgaatgtgggtgaacctgaacctgtggcagaagctgaagctaagcagagatgatgccaagcctctgctgagactgaagggattcccttcctttcctctggtcgagagacaggccaacgaagtggactggtgggacatggtgtgtaacgtgaagaagctgatcaacgagaaaaaggaggatggcaaggtgttttggcagaatctggctggctacaagagacaggaagccctgagaccatacctgagcagcgaggaagatcggaagaagggaaagaaattcgctcggtaccagctgggcgacctgctgctgcacctggaaaagaagcacggcgaggactggggaaaggtgtacgacgaggcctgggagcggattgacaagaaagtggaaggcctgagcaagcacatcaagctggaagaggaacggagaagcgaggacgcccagagcaaggccgccctgaccgactggctgcgggctaaggccagcttcgtgatcgagggcctgaaggaggccgacaaggacgagttctgcagatgcgagctgaagctgcagaagtggtacggggacctgcggggaaagcccttcgccatcgaagccgagaacagcatcctggacatcagcggcttcagcaagcagtacaactgtgccttcatctggcagaaggacggcgtgaagaagctgaacctgtacctgatcatcaactacttcaagggcggcaagctgcggttcaagaagatcaaacctgaagccttcgaagccaacagattctacaccgtgatcaacaaaaagagcggcgagatcgtgcccatggaggtgaacttcaacttcgacgaccccaacctgatcatcctgcctctggcctttggcaagagacagggcagagaattcatctggaacgacctgctgtccctggaaaccggcagcctgaagctggccaacggaagagtgatcgagaagacactgtacaacagaagaacccggcaggatgagcctgccctgttcgtggccctgaccttcgagcggcgggaggtcctggactcctccaatatcaaaccaatgaacctgatcggcgtggcaagaggcgaaaacatccccgccgtgatcgccctgaccgaccccgagggctgcccactgagccggtttaaggatagcctgggaaacccaacccacatcctgagaatcggcgagagctataaggagaagcagcggaccatccaggccaagaaggaggtggagcagcggagagccggcggctacagccggaagtacgccagcaaagccaagaatctggcagacgatatggtgagaaacaccgctagagatctgctgtactacgccgtgacccaggatgccatgctgatcttcgccaacctgagccggggcttcggccggcagggcaagcggaccttcatggccgagagacagtacacacggatggaggactggctgaccgccaagctggcctacgagggcctgagcaagacctacctgtccaagacactggcccagtacacctccaagacatgcagcaactgtgggtttaccatcaccagcgccgactacgacagggtgctggagaagctgaagaagacagcaacaggctggatgaccacaattaacggcaaggagctgaaggtggagggccagattacctactacaacagatacaagagacagaacgtagtcaaggacctgtccgtcgagctggatagactgagcgaagaatctgtgaacaacgacatctcctcctggacaaagggcagaagcggagaagctctgagcctcctgaagaaaagattctcccatagacccgtgcaggagaagttcgtgtgcctgaactgcggcttcgagacacacgcagccgagcaagccgccctgaacatcgccagatcctggctgttcctgcggagccaggagtacaagaaataccagacaaacaagacaaccggcaacaccgataagagagccttcgtcgagacctggcagtccttttaccggaagaagcttaaggaggtgtggaaacctgccgtgcggtctggcggatctggcggaggctccacaagcatgagccagggcagcgtgaccttcagggacgtggccatcgacttcagccaggaggagtggaagtggctgcagcccgcccagagggacctgtacaggtgcgtgatgctggagaactacggccacctggtgagcctgggcctgagcatcagcaagcccgacgtggtgagcctgctggagcagggcaaggagccctggctgggcaagagggacgtgaagagggacctgttccccgtgctgaaggagaccagccccaagaaaaagagaaaagtctaagctgccttctgcggggcttgccttctggccatgcccttcttctctcccttgcacctgtacctcttggtctttgaataaagcctgagtaggaaggctagcaaaaaaaaaaaaaaaaaaaaaaaaaaaaaaaaaaaaaaaaaaaaaaaaaaaaaaaaaaaaaaaaaaaaaaaaaaaaaaaa

SEQ ID NO: 3477 - RNA, 5419 nt, synthetic construct
  source 1..5419: mol_type = other RNA
aggaaataagagagaaaagaagagtaagaagaaatataagagccaccatggcccctaagaagaagcgtaaagtgagccgggtgaacggcagcggcagcggcggcggcatgaaccacgaccaggagttcgacccccctaaggtgtaccctcccgtccccgccgagaagagaaagcccatccgggtcctgagcctgttcgatggcatcgccaccggtctgctggtgctgaaggacctgggcatccaggtggataggtacattgcctccgaggtgtgcgaggactccatcaccgtgggaatggtgcgtcatcagggcaagatcatgtacgtgggcgacgtgcggagcgtgacacagaagcatatccaggagtggggccctttcgacctggtgatcggcggcagcccttgcaatgacctgagcatcgtgaacccagcccggaagggcctgtacgagggaaccggcagactgttcttcgagttttacagactgctgcacgacgcccggcctaaggaaggcgacgaccggcccttcttttggctgttcgagaatgtggtggccatgggagtcagcgacaagcgggatattagccggttcctggagagcaaccccgtgatgatcgatgccaaggaagtgagcgccgcccaccgggccagatacttctggggcaatctgcctggcatgaacagacccctggccagcaccgtgaacgacaagctggagctgcaggagtgcctggagcacggccggatcgccaagttcagcaaggtgagaaccatcaccacccgaagcaacagcatcaaacaaggcaaggaccagcactttcctgtgttcatgaacgagaaggaggacatcctgtggtgtaccgagatggagagagtgttcgggttcccagtccactacacagatgtcagcaacatgtctagactggccagacagagactgctgggaagaagctggtccgtccctgtgatcagacacctgttcgcccctctgaaggagtacttcgcctgcgtgagcagcggcaacagcaacgccaacagccggggccccagcttctctagcggcctggtgccactgtccctgagagggagccacatgggccccatggagatctacaaaaccgtgagcgcctggaagcggcagcctgtgcgcgtgctgagcctgtttcggaatatcgataaagtcctgaaaagcctgggattcctggagagcggctctggctccggcggtggcaccctgaagtacgtggaggatgtgacaaacgtggtcagacgggatgtggagaagtggggccccttcgatctggtgtacggcagcacccaacccctgggcagctcttgtgaccggtgccctggctggtacatgtttcagttccaccggatcctgcagtacgccctgccgagacaggagtcccagcggccattcttttggattttcatggacaacttgctgctgaccgaggatgaccaggaaactaccactcggttcctgcagaccgaagccgtgaccctgcaggacgtgagaggccgggactaccagaacgccatgcgggtgtggtccaacatccctggactgaaaagcaagcacgcacctctgacccctaaagaagaggagtacctgcaggcccaggtgcggagcagaagcaagctggacgcccctaaggtggatctgctggtgaagaattgcctcctgcccctgagagagtacttcaagtatttcagccagaatagtctgcccctgggcggcccaagcagcggcgcccctcctcccagcggcggcagcccagccggctccccaacctctaccgaggagggcacctctgagtccgccacccccgagagcggccctggcacctccaccgagcccagcgagggcagcgcacccggcagccctgccggcagccccacctccacagaggagggaaccagcaccgagcccagcgaaggcagcgccccaggcaccagcaccgagcctagtgagggcggctctggcggcggcagcgcccaggagattaaacggatcaacaagatcagaagaagacttgtgaaagacagcaacaccaagaaggccggcaagacaggccccatgaaaaccctgctggttagagtgatgacacccgatctgagagagcggctggaaaacctgagaaagaagcctgaaaatatcccccagcccatcagcaatacatctagagccaacctgaataagctgctgaccgattacaccgaaatgaagaaggcgatcctgcatgtgtactgggaagagttccagaaggaccctgtgggcctgatgagccgggtggcccagcctgccagcaagaagatcgatcagaacaagctgaaacctgagatggacgagaagggcaacctgaccaccgccggctttgcctgctctcagtgtggccagcccctgttcgtgtacaagctggagcaggtgtctgagaagggcaaggcttacaccaactacttcggacggtgcaatgtggccgagcacgaaaagctgatcctgctggcccagctgaagcccgagaaggatagcgacgaagccgtgacatatagcctgggaaagtttgggcagagggccctggatttctacagcattcatgtgaccaaggagtccacccaccccgtgaagcccctggcccagatcgccggaaacagatacgcctccggacctgtgggaaaggccctgagcgacgcatgtatgggcacaatcgcctccttcctgtctaagtaccaggacatcatcatcgaacaccagaaggtggtgaagggcaaccagaagagactggagagcctgcgggagctggccggcaaggaaaacctggaataccctagcgtgaccctgccacctcagcctcacaccaaggagggcgttgatgcctacaacgaagtgatcgcccgggtgcgaatgtgggtgaacctgaacctgtggcagaagctgaagctaagcagagatgatgccaagcctctgctgagactgaagggattcccttcctttcctctggtcgagagacaggccaacgaagtggactggtgggacatggtgtgtaacgtgaagaagctgatcaacgagaaaaaggaggatggcaaggtgttttggcagaatctggctggctacaagagacaggaagccctgagaccatacctgagcagcgaggaagatcggaagaagggaaagaaattcgctcggtaccagctgggcgacctgctgctgcacctggaaaagaagcacggcgaggactggggaaaggtgtacgacgaggcctgggagcggattgacaagaaagtggaaggcctgagcaagcacatcaagctggaagaggaacggagaagcgaggacgcccagagcaaggccgccctgaccgactggctgcgggctaaggccagcttcgtgatcgagggcctgaaggaggccgacaaggacgagttctgcagatgcgagctgaagctgcagaagtggtacggggacctgcggggaaagcccttcgccatcgaagccgagaacagcatcctggacatcagcggcttcagcaagcagtacaactgtgccttcatctggcagaaggacggcgtgaagaagctgaacctgtacctgatcatcaactacttcaagggcggcaagctgcggttcaagaagatcaaacctgaagccttcgaagccaacagattctacaccgtgatcaacaaaaagagcggcgagatcgtgcccatggaggtgaacttcaacttcgacgaccccaacctgatcatcctgcctctggcctttggcaagagacagggcagagaattcatctggaacgacctgctgtccctggaaaccggcagcctgaagctggccaacggaagagtgatcgagaagacactgtacaacagaagaacccggcaggatgagcctgccctgttcgtggccctgaccttcgagcggcgggaggtcctggactcctccaatatcaaaccaatgaacctgatcggcgtggcaagaggcgaaaacatccccgccgtgatcgccctgaccgaccccgagggctgcccactgagccggtttaaggatagcctgggaaacccaacccacatcctgagaatcggcgagagctataaggagaagcagcggaccatccaggccaagaaggaggtggagcagcggagagccggcggctacagccggaagtacgccagcaaagccaagaatctggcagacgatatggtgagaaacaccgctagagatctgctgtactacgccgtgacccaggatgccatgctgatcttcgccaacctgagccggggcttcggccggcagggcaagcggaccttcatggccgagagacagtacacacggatggaggactggctgaccgccaagctggcctacgagggcctgagcaagacctacctgtccaagacactggcccagtacacctccaagacatgcagcaactgtgggtttaccatcaccagcgccgactacgacagggtgctggagaagctgaagaagacagcaacaggctggatgaccacaattaacggcaaggagctgaaggtggagggccagattacctactacaacagatacaagagacagaacgtagtcaaggacctgtccgtcgagctggatagactgagcgaagaatctgtgaacaacgacatctcctcctggacaaagggcagaagcggagaagctctgagcctcctgaagaaaagattctcccatagacccgtgcaggagaagttcgtgtgcctgaactgcggcttcgagacacacgcagccgagcaagccgccctgaacatcgccagatcctggctgttcctgcggagccaggagtacaagaaataccagacaaacaagacaaccggcaacaccgataagagagccttcgtcgagacctggcagtccttttaccggaagaagcttaaggaggtgtggaaacctgccgtgcggtctggcggatctggcggaggctccacaagccagaaccccgtgaccttcagggacgtggccgtggacttcagcctggaggagtggaagtgcctgagccccgcccagagggccctgtacagggacgtgatgctggagaactacgagaacctggccagcgtgggccccaggctgcccttcagcaagccctacgtgatcagccagctggagaggggcgaggccccctggatgcccgaggaggaggtgcccagggaccactggcccgacctgttcaacaccagccccaagaaaaagagaaaagtctaagctgccttctgcggggcttgccttctggccatgcccttcttctctcccttgcacctgtacctcttggtctttgaataaagcctgagtaggaaggctagcaaaaaaaaaaaaaaaaaaaaaaaaaaaaaaaaaaaaaaaaaaaaaaaaaaaaaaaaaaaaaaaaaaaaaaaaaaaaaaaa

SEQ ID NO: 3478 - RNA, 5419 nt, synthetic construct
  source 1..5419: mol_type = other RNA
aggaaataagagagaaaagaagagtaagaagaaatataagagccaccatggcccctaagaagaagcgtaaagtgagccgggtgaacggcagcggcagcggcggcggcatgaaccacgaccaggagttcgacccccctaaggtgtaccctcccgtccccgccgagaagagaaagcccatccgggtcctgagcctgttcgatggcatcgccaccggtctgctggtgctgaaggacctgggcatccaggtggataggtacattgcctccgaggtgtgcgaggactccatcaccgtgggaatggtgcgtcatcagggcaagatcatgtacgtgggcgacgtgcggagcgtgacacagaagcatatccaggagtggggccctttcgacctggtgatcggcggcagcccttgcaatgacctgagcatcgtgaacccagcccggaagggcctgtacgagggaaccggcagactgttcttcgagttttacagactgctgcacgacgcccggcctaaggaaggcgacgaccggcccttcttttggctgttcgagaatgtggtggccatgggagtcagcgacaagcgggatattagccggttcctggagagcaaccccgtgatgatcgatgccaaggaagtgagcgccgcccaccgggccagatacttctggggcaatctgcctggcatgaacagacccctggccagcaccgtgaacgacaagctggagctgcaggagtgcctggagcacggccggatcgccaagttcagcaaggtgagaaccatcaccacccgaagcaacagcatcaaacaaggcaaggaccagcactttcctgtgttcatgaacgagaaggaggacatcctgtggtgtaccgagatggagagagtgttcgggttcccagtccactacacagatgtcagcaacatgtctagactggccagacagagactgctgggaagaagctggtccgtccctgtgatcagacacctgttcgcccctctgaaggagtacttcgcctgcgtgagcagcggcaacagcaacgccaacagccggggccccagcttctctagcggcctggtgccactgtccctgagagggagccacatgggccccatggagatctacaaaaccgtgagcgcctggaagcggcagcctgtgcgcgtgctgagcctgtttcggaatatcgataaagtcctgaaaagcctgggattcctggagagcggctctggctccggcggtggcaccctgaagtacgtggaggatgtgacaaacgtggtcagacgggatgtggagaagtggggccccttcgatctggtgtacggcagcacccaacccctgggcagctcttgtgaccggtgccctggctggtacatgtttcagttccaccggatcctgcagtacgccctgccgagacaggagtcccagcggccattcttttggattttcatggacaacttgctgctgaccgaggatgaccaggaaactaccactcggttcctgcagaccgaagccgtgaccctgcaggacgtgagaggccgggactaccagaacgccatgcgggtgtggtccaacatccctggactgaaaagcaagcacgcacctctgacccctaaagaagaggagtacctgcaggcccaggtgcggagcagaagcaagctggacgcccctaaggtggatctgctggtgaagaattgcctcctgcccctgagagagtacttcaagtatttcagccagaatagtctgcccctgggcggcccaagcagcggcgcccctcctcccagcggcggcagcccagccggctccccaacctctaccgaggagggcacctctgagtccgccacccccgagagcggccctggcacctccaccgagcccagcgagggcagcgcacccggcagccctgccggcagccccacctccacagaggagggaaccagcaccgagcccagcgaaggcagcgccccaggcaccagcaccgagcctagtgagggcggctctggcggcggcagcgcccaggagattaaacggatcaacaagatcagaagaagacttgtgaaagacagcaacaccaagaaggccggcaagacaggccccatgaaaaccctgctggttagagtgatgacacccgatctgagagagcggctggaaaacctgagaaagaagcctgaaaatatcccccagcccatcagcaatacatctagagccaacctgaataagctgctgaccgattacaccgaaatgaagaaggcgatcctgcatgtgtactgggaagagttccagaaggaccctgtgggcctgatgagccgggtggcccagcctgccagcaagaagatcgatcagaacaagctgaaacctgagatggacgagaagggcaacctgaccaccgccggctttgcctgctctcagtgtggccagcccctgttcgtgtacaagctggagcaggtgtctgagaagggcaaggcttacaccaactacttcggacggtgcaatgtggccgagcacgaaaagctgatcctgctggcccagctgaagcccgagaaggatagcgacgaagccgtgacatatagcctgggaaagtttgggcagagggccctggatttctacagcattcatgtgaccaaggagtccacccaccccgtgaagcccctggcccagatcgccggaaacagatacgcctccggacctgtgggaaaggccctgagcgacgcatgtatgggcacaatcgcctccttcctgtctaagtaccaggacatcatcatcgaacaccagaaggtggtgaagggcaaccagaagagactggagagcctgcgggagctggccggcaaggaaaacctggaataccctagcgtgaccctgccacctcagcctcacaccaaggagggcgttgatgcctacaacgaagtgatcgcccgggtgcgaatgtgggtgaacctgaacctgtggcagaagctgaagctaagcagagatgatgccaagcctctgctgagactgaagggattcccttcctttcctctggtcgagagacaggccaacgaagtggactggtgggacatggtgtgtaacgtgaagaagctgatcaacgagaaaaaggaggatggcaaggtgttttggcagaatctggctggctacaagagacaggaagccctgagaccatacctgagcagcgaggaagatcggaagaagggaaagaaattcgctcggtaccagctgggcgacctgctgctgcacctggaaaagaagcacggcgaggactggggaaaggtgtacgacgaggcctgggagcggattgacaagaaagtggaaggcctgagcaagcacatcaagctggaagaggaacggagaagcgaggacgcccagagcaaggccgccctgaccgactggctgcgggctaaggccagcttcgtgatcgagggcctgaaggaggccgacaaggacgagttctgcagatgcgagctgaagctgcagaagtggtacggggacctgcggggaaagcccttcgccatcgaagccgagaacagcatcctggacatcagcggcttcagcaagcagtacaactgtgccttcatctggcagaaggacggcgtgaagaagctgaacctgtacctgatcatcaactacttcaagggcggcaagctgcggttcaagaagatcaaacctgaagccttcgaagccaacagattctacaccgtgatcaacaaaaagagcggcgagatcgtgcccatggaggtgaacttcaacttcgacgaccccaacctgatcatcctgcctctggcctttggcaagagacagggcagagaattcatctggaacgacctgctgtccctggaaaccggcagcctgaagctggccaacggaagagtgatcgagaagacactgtacaacagaagaacccggcaggatgagcctgccctgttcgtggccctgaccttcgagcggcgggaggtcctggactcctccaatatcaaaccaatgaacctgatcggcgtggcaagaggcgaaaacatccccgccgtgatcgccctgaccgaccccgagggctgcccactgagccggtttaaggatagcctgggaaacccaacccacatcctgagaatcggcgagagctataaggagaagcagcggaccatccaggccaagaaggaggtggagcagcggagagccggcggctacagccggaagtacgccagcaaagccaagaatctggcagacgatatggtgagaaacaccgctagagatctgctgtactacgccgtgacccaggatgccatgctgatcttcgccaacctgagccggggcttcggccggcagggcaagcggaccttcatggccgagagacagtacacacggatggaggactggctgaccgccaagctggcctacgagggcctgagcaagacctacctgtccaagacactggcccagtacacctccaagacatgcagcaactgtgggtttaccatcaccagcgccgactacgacagggtgctggagaagctgaagaagacagcaacaggctggatgaccacaattaacggcaaggagctgaaggtggagggccagattacctactacaacagatacaagagacagaacgtagtcaaggacctgtccgtcgagctggatagactgagcgaagaatctgtgaacaacgacatctcctcctggacaaagggcagaagcggagaagctctgagcctcctgaagaaaagattctcccatagacccgtgcaggagaagttcgtgtgcctgaactgcggcttcgagacacacgcagccgagcaagccgccctgaacatcgccagatcctggctgttcctgcggagccaggagtacaagaaataccagacaaacaagacaaccggcaacaccgataagagagccttcgtcgagacctggcagtccttttaccggaagaagcttaaggaggtgtggaaacctgccgtgcggtctggcggatctggcggaggctccacaagcaaggaggccttcatggccttcggcgacgtggccgtggacttcacccaggaggagtggaggctgctgagccccgcccagaggaccctgcacagggaggtgatgctggagacctacaaccacctggtgagcctggagatccccttcagcaagcccaagctgatcagccagctggagaggggcgaggagccctggatcaaggagaggcagaggcccctgagcctgtgccccgccggcagcaagctgaccagccccaagaaaaagagaaaagtctaagctgccttctgcggggcttgccttctggccatgcccttcttctctcccttgcacctgtacctcttggtctttgaataaagcctgagtaggaaggctagcaaaaaaaaaaaaaaaaaaaaaaaaaaaaaaaaaaaaaaaaaaaaaaaaaaaaaaaaaaaaaaaaaaaaaaaaaaaaaaaa

SEQ ID NO: 3479 - RNA, 5419 nt, synthetic construct
  source 1..5419: mol_type = other RNA
aggaaataagagagaaaagaagagtaagaagaaatataagagccaccatggcccctaagaagaagcgtaaagtgagccgggtgaacggcagcggcagcggcggcggcatgaaccacgaccaggagttcgacccccctaaggtgtaccctcccgtccccgccgagaagagaaagcccatccgggtcctgagcctgttcgatggcatcgccaccggtctgctggtgctgaaggacctgggcatccaggtggataggtacattgcctccgaggtgtgcgaggactccatcaccgtgggaatggtgcgtcatcagggcaagatcatgtacgtgggcgacgtgcggagcgtgacacagaagcatatccaggagtggggccctttcgacctggtgatcggcggcagcccttgcaatgacctgagcatcgtgaacccagcccggaagggcctgtacgagggaaccggcagactgttcttcgagttttacagactgctgcacgacgcccggcctaaggaaggcgacgaccggcccttcttttggctgttcgagaatgtggtggccatgggagtcagcgacaagcgggatattagccggttcctggagagcaaccccgtgatgatcgatgccaaggaagtgagcgccgcccaccgggccagatacttctggggcaatctgcctggcatgaacagacccctggccagcaccgtgaacgacaagctggagctgcaggagtgcctggagcacggccggatcgccaagttcagcaaggtgagaaccatcaccacccgaagcaacagcatcaaacaaggcaaggaccagcactttcctgtgttcatgaacgagaaggaggacatcctgtggtgtaccgagatggagagagtgttcgggttcccagtccactacacagatgtcagcaacatgtctagactggccagacagagactgctgggaagaagctggtccgtccctgtgatcagacacctgttcgcccctctgaaggagtacttcgcctgcgtgagcagcggcaacagcaacgccaacagccggggccccagcttctctagcggcctggtgccactgtccctgagagggagccacatgggccccatggagatctacaaaaccgtgagcgcctggaagcggcagcctgtgcgcgtgctgagcctgtttcggaatatcgataaagtcctgaaaagcctgggattcctggagagcggctctggctccggcggtggcaccctgaagtacgtggaggatgtgacaaacgtggtcagacgggatgtggagaagtggggccccttcgatctggtgtacggcagcacccaacccctgggcagctcttgtgaccggtgccctggctggtacatgtttcagttccaccggatcctgcagtacgccctgccgagacaggagtcccagcggccattcttttggattttcatggacaacttgctgctgaccgaggatgaccaggaaactaccactcggttcctgcagaccgaagccgtgaccctgcaggacgtgagaggccgggactaccagaacgccatgcgggtgtggtccaacatccctggactgaaaagcaagcacgcacctctgacccctaaagaagaggagtacctgcaggcccaggtgcggagcagaagcaagctggacgcccctaaggtggatctgctggtgaagaattgcctcctgcccctgagagagtacttcaagtatttcagccagaatagtctgcccctgggcggcccaagcagcggcgcccctcctcccagcggcggcagcccagccggctccccaacctctaccgaggagggcacctctgagtccgccacccccgagagcggccctggcacctccaccgagcccagcgagggcagcgcacccggcagccctgccggcagccccacctccacagaggagggaaccagcaccgagcccagcgaaggcagcgccccaggcaccagcaccgagcctagtgagggcggctctggcggcggcagcgcccaggagattaaacggatcaacaagatcagaagaagacttgtgaaagacagcaacaccaagaaggccggcaagacaggccccatgaaaaccctgctggttagagtgatgacacccgatctgagagagcggctggaaaacctgagaaagaagcctgaaaatatcccccagcccatcagcaatacatctagagccaacctgaataagctgctgaccgattacaccgaaatgaagaaggcgatcctgcatgtgtactgggaagagttccagaaggaccctgtgggcctgatgagccgggtggcccagcctgccagcaagaagatcgatcagaacaagctgaaacctgagatggacgagaagggcaacctgaccaccgccggctttgcctgctctcagtgtggccagcccctgttcgtgtacaagctggagcaggtgtctgagaagggcaaggcttacaccaactacttcggacggtgcaatgtggccgagcacgaaaagctgatcctgctggcccagctgaagcccgagaaggatagcgacgaagccgtgacatatagcctgggaaagtttgggcagagggccctggatttctacagcattcatgtgaccaaggagtccacccaccccgtgaagcccctggcccagatcgccggaaacagatacgcctccggacctgtgggaaaggccctgagcgacgcatgtatgggcacaatcgcctccttcctgtctaagtaccaggacatcatcatcgaacaccagaaggtggtgaagggcaaccagaagagactggagagcctgcgggagctggccggcaaggaaaacctggaataccctagcgtgaccctgccacctcagcctcacaccaaggagggcgttgatgcctacaacgaagtgatcgcccgggtgcgaatgtgggtgaacctgaacctgtggcagaagctgaagctaagcagagatgatgccaagcctctgctgagactgaagggattcccttcctttcctctggtcgagagacaggccaacgaagtggactggtgggacatggtgtgtaacgtgaagaagctgatcaacgagaaaaaggaggatggcaaggtgttttggcagaatctggctggctacaagagacaggaagccctgagaccatacctgagcagcgaggaagatcggaagaagggaaagaaattcgctcggtaccagctgggcgacctgctgctgcacctggaaaagaagcacggcgaggactggggaaaggtgtacgacgaggcctgggagcggattgacaagaaagtggaaggcctgagcaagcacatcaagctggaagaggaacggagaagcgaggacgcccagagcaaggccgccctgaccgactggctgcgggctaaggccagcttcgtgatcgagggcctgaaggaggccgacaaggacgagttctgcagatgcgagctgaagctgcagaagtggtacggggacctgcggggaaagcccttcgccatcgaagccgagaacagcatcctggacatcagcggcttcagcaagcagtacaactgtgccttcatctggcagaaggacggcgtgaagaagctgaacctgtacctgatcatcaactacttcaagggcggcaagctgcggttcaagaagatcaaacctgaagccttcgaagccaacagattctacaccgtgatcaacaaaaagagcggcgagatcgtgcccatggaggtgaacttcaacttcgacgaccccaacctgatcatcctgcctctggcctttggcaagagacagggcagagaattcatctggaacgacctgctgtccctggaaaccggcagcctgaagctggccaacggaagagtgatcgagaagacactgtacaacagaagaacccggcaggatgagcctgccctgttcgtggccctgaccttcgagcggcgggaggtcctggactcctccaatatcaaaccaatgaacctgatcggcgtggcaagaggcgaaaacatccccgccgtgatcgccctgaccgaccccgagggctgcccactgagccggtttaaggatagcctgggaaacccaacccacatcctgagaatcggcgagagctataaggagaagcagcggaccatccaggccaagaaggaggtggagcagcggagagccggcggctacagccggaagtacgccagcaaagccaagaatctggcagacgatatggtgagaaacaccgctagagatctgctgtactacgccgtgacccaggatgccatgctgatcttcgccaacctgagccggggcttcggccggcagggcaagcggaccttcatggccgagagacagtacacacggatggaggactggctgaccgccaagctggcctacgagggcctgagcaagacctacctgtccaagacactggcccagtacacctccaagacatgcagcaactgtgggtttaccatcaccagcgccgactacgacagggtgctggagaagctgaagaagacagcaacaggctggatgaccacaattaacggcaaggagctgaaggtggagggccagattacctactacaacagatacaagagacagaacgtagtcaaggacctgtccgtcgagctggatagactgagcgaagaatctgtgaacaacgacatctcctcctggacaaagggcagaagcggagaagctctgagcctcctgaagaaaagattctcccatagacccgtgcaggagaagttcgtgtgcctgaactgcggcttcgagacacacgcagccgagcaagccgccctgaacatcgccagatcctggctgttcctgcggagccaggagtacaagaaataccagacaaacaagacaaccggcaacaccgataagagagccttcgtcgagacctggcagtccttttaccggaagaagcttaaggaggtgtggaaacctgccgtgcggtctggcggatctggcggaggctccacaagcaagagcatggtgaccttcgaggacgtggccgtgtacttcagccaggaggagtgggagctgctggacgccgcccagaggcacctgtaccacagcgtgatgctggagaacctggagctggtgaccagcctgggctgctggcacggcgtggagggcgaggaggcccaccccgagcagaacgtgagcgtggaggtgctgcaggtgaggatccccaacgccgaccccagcaccaagaaggccaacagcaccagccccaagaaaaagagaaaagtctaagctgccttctgcggggcttgccttctggccatgcccttcttctctcccttgcacctgtacctcttggtctttgaataaagcctgagtaggaaggctagcaaaaaaaaaaaaaaaaaaaaaaaaaaaaaaaaaaaaaaaaaaaaaaaaaaaaaaaaaaaaaaaaaaaaaaaaaaaaaaaa

SEQ ID NO: 3480 - RNA, 5419 nt, synthetic construct
  source 1..5419: mol_type = other RNA
aggaaataagagagaaaagaagagtaagaagaaatataagagccaccatggcccctaagaagaagcgtaaagtgagccgggtgaacggcagcggcagcggcggcggcatgaaccacgaccaggagttcgacccccctaaggtgtaccctcccgtccccgccgagaagagaaagcccatccgggtcctgagcctgttcgatggcatcgccaccggtctgctggtgctgaaggacctgggcatccaggtggataggtacattgcctccgaggtgtgcgaggactccatcaccgtgggaatggtgcgtcatcagggcaagatcatgtacgtgggcgacgtgcggagcgtgacacagaagcatatccaggagtggggccctttcgacctggtgatcggcggcagcccttgcaatgacctgagcatcgtgaacccagcccggaagggcctgtacgagggaaccggcagactgttcttcgagttttacagactgctgcacgacgcccggcctaaggaaggcgacgaccggcccttcttttggctgttcgagaatgtggtggccatgggagtcagcgacaagcgggatattagccggttcctggagagcaaccccgtgatgatcgatgccaaggaagtgagcgccgcccaccgggccagatacttctggggcaatctgcctggcatgaacagacccctggccagcaccgtgaacgacaagctggagctgcaggagtgcctggagcacggccggatcgccaagttcagcaaggtgagaaccatcaccacccgaagcaacagcatcaaacaaggcaaggaccagcactttcctgtgttcatgaacgagaaggaggacatcctgtggtgtaccgagatggagagagtgttcgggttcccagtccactacacagatgtcagcaacatgtctagactggccagacagagactgctgggaagaagctggtccgtccctgtgatcagacacctgttcgcccctctgaaggagtacttcgcctgcgtgagcagcggcaacagcaacgccaacagccggggccccagcttctctagcggcctggtgccactgtccctgagagggagccacatgggccccatggagatctacaaaaccgtgagcgcctggaagcggcagcctgtgcgcgtgctgagcctgtttcggaatatcgataaagtcctgaaaagcctgggattcctggagagcggctctggctccggcggtggcaccctgaagtacgtggaggatgtgacaaacgtggtcagacgggatgtggagaagtggggccccttcgatctggtgtacggcagcacccaacccctgggcagctcttgtgaccggtgccctggctggtacatgtttcagttccaccggatcctgcagtacgccctgccgagacaggagtcccagcggccattcttttggattttcatggacaacttgctgctgaccgaggatgaccaggaaactaccactcggttcctgcagaccgaagccgtgaccctgcaggacgtgagaggccgggactaccagaacgccatgcgggtgtggtccaacatccctggactgaaaagcaagcacgcacctctgacccctaaagaagaggagtacctgcaggcccaggtgcggagcagaagcaagctggacgcccctaaggtggatctgctggtgaagaattgcctcctgcccctgagagagtacttcaagtatttcagccagaatagtctgcccctgggcggcccaagcagcggcgcccctcctcccagcggcggcagcccagccggctccccaacctctaccgaggagggcacctctgagtccgccacccccgagagcggccctggcacctccaccgagcccagcgagggcagcgcacccggcagccctgccggcagccccacctccacagaggagggaaccagcaccgagcccagcgaaggcagcgccccaggcaccagcaccgagcctagtgagggcggctctggcggcggcagcgcccaggagattaaacggatcaacaagatcagaagaagacttgtgaaagacagcaacaccaagaaggccggcaagacaggccccatgaaaaccctgctggttagagtgatgacacccgatctgagagagcggctggaaaacctgagaaagaagcctgaaaatatcccccagcccatcagcaatacatctagagccaacctgaataagctgctgaccgattacaccgaaatgaagaaggcgatcctgcatgtgtactgggaagagttccagaaggaccctgtgggcctgatgagccgggtggcccagcctgccagcaagaagatcgatcagaacaagctgaaacctgagatggacgagaagggcaacctgaccaccgccggctttgcctgctctcagtgtggccagcccctgttcgtgtacaagctggagcaggtgtctgagaagggcaaggcttacaccaactacttcggacggtgcaatgtggccgagcacgaaaagctgatcctgctggcccagctgaagcccgagaaggatagcgacgaagccgtgacatatagcctgggaaagtttgggcagagggccctggatttctacagcattcatgtgaccaaggagtccacccaccccgtgaagcccctggcccagatcgccggaaacagatacgcctccggacctgtgggaaaggccctgagcgacgcatgtatgggcacaatcgcctccttcctgtctaagtaccaggacatcatcatcgaacaccagaaggtggtgaagggcaaccagaagagactggagagcctgcgggagctggccggcaaggaaaacctggaataccctagcgtgaccctgccacctcagcctcacaccaaggagggcgttgatgcctacaacgaagtgatcgcccgggtgcgaatgtgggtgaacctgaacctgtggcagaagctgaagctaagcagagatgatgccaagcctctgctgagactgaagggattcccttcctttcctctggtcgagagacaggccaacgaagtggactggtgggacatggtgtgtaacgtgaagaagctgatcaacgagaaaaaggaggatggcaaggtgttttggcagaatctggctggctacaagagacaggaagccctgagaccatacctgagcagcgaggaagatcggaagaagggaaagaaattcgctcggtaccagctgggcgacctgctgctgcacctggaaaagaagcacggcgaggactggggaaaggtgtacgacgaggcctgggagcggattgacaagaaagtggaaggcctgagcaagcacatcaagctggaagaggaacggagaagcgaggacgcccagagcaaggccgccctgaccgactggctgcgggctaaggccagcttcgtgatcgagggcctgaaggaggccgacaaggacgagttctgcagatgcgagctgaagctgcagaagtggtacggggacctgcggggaaagcccttcgccatcgaagccgagaacagcatcctggacatcagcggcttcagcaagcagtacaactgtgccttcatctggcagaaggacggcgtgaagaagctgaacctgtacctgatcatcaactacttcaagggcggcaagctgcggttcaagaagatcaaacctgaagccttcgaagccaacagattctacaccgtgatcaacaaaaagagcggcgagatcgtgcccatggaggtgaacttcaacttcgacgaccccaacctgatcatcctgcctctggcctttggcaagagacagggcagagaattcatctggaacgacctgctgtccctggaaaccggcagcctgaagctggccaacggaagagtgatcgagaagacactgtacaacagaagaacccggcaggatgagcctgccctgttcgtggccctgaccttcgagcggcgggaggtcctggactcctccaatatcaaaccaatgaacctgatcggcgtggcaagaggcgaaaacatccccgccgtgatcgccctgaccgaccccgagggctgcccactgagccggtttaaggatagcctgggaaacccaacccacatcctgagaatcggcgagagctataaggagaagcagcggaccatccaggccaagaaggaggtggagcagcggagagccggcggctacagccggaagtacgccagcaaagccaagaatctggcagacgatatggtgagaaacaccgctagagatctgctgtactacgccgtgacccaggatgccatgctgatcttcgccaacctgagccggggcttcggccggcagggcaagcggaccttcatggccgagagacagtacacacggatggaggactggctgaccgccaagctggcctacgagggcctgagcaagacctacctgtccaagacactggcccagtacacctccaagacatgcagcaactgtgggtttaccatcaccagcgccgactacgacagggtgctggagaagctgaagaagacagcaacaggctggatgaccacaattaacggcaaggagctgaaggtggagggccagattacctactacaacagatacaagagacagaacgtagtcaaggacctgtccgtcgagctggatagactgagcgaagaatctgtgaacaacgacatctcctcctggacaaagggcagaagcggagaagctctgagcctcctgaagaaaagattctcccatagacccgtgcaggagaagttcgtgtgcctgaactgcggcttcgagacacacgcagccgagcaagccgccctgaacatcgccagatcctggctgttcctgcggagccaggagtacaagaaataccagacaaacaagacaaccggcaacaccgataagagagccttcgtcgagacctggcagtccttttaccggaagaagcttaaggaggtgtggaaacctgccgtgcggtctggcggatctggcggaggctccacaagccccctgaagctggtgaccttcgaggacgtggccgtggacttcacccaggaggagtggagcctgctggacaagagccagaagaacctgttcaggaacgtgatgatggagaccatccaccacctggtgagcgtgggctaccagatcagcaagagcgacgtgatcagccagctggagcagggcaaggagctgtggagcaaggccgccggcggcttccagggccagaggcccggcgagcaccagggcaccagccccaagaaaaagagaaaagtctaagctgccttctgcggggcttgccttctggccatgcccttcttctctcccttgcacctgtacctcttggtctttgaataaagcctgagtaggaaggctagcaaaaaaaaaaaaaaaaaaaaaaaaaaaaaaaaaaaaaaaaaaaaaaaaaaaaaaaaaaaaaaaaaaaaaaaaaaaaaaaa

SEQ ID NO: 3481 - RNA, 5419 nt, synthetic construct
  source 1..5419: mol_type = other RNA
aggaaataagagagaaaagaagagtaagaagaaatataagagccaccatggcccctaagaagaagcgtaaagtgagccgggtgaacggcagcggcagcggcggcggcatgaaccacgaccaggagttcgacccccctaaggtgtaccctcccgtccccgccgagaagagaaagcccatccgggtcctgagcctgttcgatggcatcgccaccggtctgctggtgctgaaggacctgggcatccaggtggataggtacattgcctccgaggtgtgcgaggactccatcaccgtgggaatggtgcgtcatcagggcaagatcatgtacgtgggcgacgtgcggagcgtgacacagaagcatatccaggagtggggccctttcgacctggtgatcggcggcagcccttgcaatgacctgagcatcgtgaacccagcccggaagggcctgtacgagggaaccggcagactgttcttcgagttttacagactgctgcacgacgcccggcctaaggaaggcgacgaccggcccttcttttggctgttcgagaatgtggtggccatgggagtcagcgacaagcgggatattagccggttcctggagagcaaccccgtgatgatcgatgccaaggaagtgagcgccgcccaccgggccagatacttctggggcaatctgcctggcatgaacagacccctggccagcaccgtgaacgacaagctggagctgcaggagtgcctggagcacggccggatcgccaagttcagcaaggtgagaaccatcaccacccgaagcaacagcatcaaacaaggcaaggaccagcactttcctgtgttcatgaacgagaaggaggacatcctgtggtgtaccgagatggagagagtgttcgggttcccagtccactacacagatgtcagcaacatgtctagactggccagacagagactgctgggaagaagctggtccgtccctgtgatcagacacctgttcgcccctctgaaggagtacttcgcctgcgtgagcagcggcaacagcaacgccaacagccggggccccagcttctctagcggcctggtgccactgtccctgagagggagccacatgggccccatggagatctacaaaaccgtgagcgcctggaagcggcagcctgtgcgcgtgctgagcctgtttcggaatatcgataaagtcctgaaaagcctgggattcctggagagcggctctggctccggcggtggcaccctgaagtacgtggaggatgtgacaaacgtggtcagacgggatgtggagaagtggggccccttcgatctggtgtacggcagcacccaacccctgggcagctcttgtgaccggtgccctggctggtacatgtttcagttccaccggatcctgcagtacgccctgccgagacaggagtcccagcggccattcttttggattttcatggacaacttgctgctgaccgaggatgaccaggaaactaccactcggttcctgcagaccgaagccgtgaccctgcaggacgtgagaggccgggactaccagaacgccatgcgggtgtggtccaacatccctggactgaaaagcaagcacgcacctctgacccctaaagaagaggagtacctgcaggcccaggtgcggagcagaagcaagctggacgcccctaaggtggatctgctggtgaagaattgcctcctgcccctgagagagtacttcaagtatttcagccagaatagtctgcccctgggcggcccaagcagcggcgcccctcctcccagcggcggcagcccagccggctccccaacctctaccgaggagggcacctctgagtccgccacccccgagagcggccctggcacctccaccgagcccagcgagggcagcgcacccggcagccctgccggcagccccacctccacagaggagggaaccagcaccgagcccagcgaaggcagcgccccaggcaccagcaccgagcctagtgagggcggctctggcggcggcagcgcccaggagattaaacggatcaacaagatcagaagaagacttgtgaaagacagcaacaccaagaaggccggcaagacaggccccatgaaaaccctgctggttagagtgatgacacccgatctgagagagcggctggaaaacctgagaaagaagcctgaaaatatcccccagcccatcagcaatacatctagagccaacctgaataagctgctgaccgattacaccgaaatgaagaaggcgatcctgcatgtgtactgggaagagttccagaaggaccctgtgggcctgatgagccgggtggcccagcctgccagcaagaagatcgatcagaacaagctgaaacctgagatggacgagaagggcaacctgaccaccgccggctttgcctgctctcagtgtggccagcccctgttcgtgtacaagctggagcaggtgtctgagaagggcaaggcttacaccaactacttcggacggtgcaatgtggccgagcacgaaaagctgatcctgctggcccagctgaagcccgagaaggatagcgacgaagccgtgacatatagcctgggaaagtttgggcagagggccctggatttctacagcattcatgtgaccaaggagtccacccaccccgtgaagcccctggcccagatcgccggaaacagatacgcctccggacctgtgggaaaggccctgagcgacgcatgtatgggcacaatcgcctccttcctgtctaagtaccaggacatcatcatcgaacaccagaaggtggtgaagggcaaccagaagagactggagagcctgcgggagctggccggcaaggaaaacctggaataccctagcgtgaccctgccacctcagcctcacaccaaggagggcgttgatgcctacaacgaagtgatcgcccgggtgcgaatgtgggtgaacctgaacctgtggcagaagctgaagctaagcagagatgatgccaagcctctgctgagactgaagggattcccttcctttcctctggtcgagagacaggccaacgaagtggactggtgggacatggtgtgtaacgtgaagaagctgatcaacgagaaaaaggaggatggcaaggtgttttggcagaatctggctggctacaagagacaggaagccctgagaccatacctgagcagcgaggaagatcggaagaagggaaagaaattcgctcggtaccagctgggcgacctgctgctgcacctggaaaagaagcacggcgaggactggggaaaggtgtacgacgaggcctgggagcggattgacaagaaagtggaaggcctgagcaagcacatcaagctggaagaggaacggagaagcgaggacgcccagagcaaggccgccctgaccgactggctgcgggctaaggccagcttcgtgatcgagggcctgaaggaggccgacaaggacgagttctgcagatgcgagctgaagctgcagaagtggtacggggacctgcggggaaagcccttcgccatcgaagccgagaacagcatcctggacatcagcggcttcagcaagcagtacaactgtgccttcatctggcagaaggacggcgtgaagaagctgaacctgtacctgatcatcaactacttcaagggcggcaagctgcggttcaagaagatcaaacctgaagccttcgaagccaacagattctacaccgtgatcaacaaaaagagcggcgagatcgtgcccatggaggtgaacttcaacttcgacgaccccaacctgatcatcctgcctctggcctttggcaagagacagggcagagaattcatctggaacgacctgctgtccctggaaaccggcagcctgaagctggccaacggaagagtgatcgagaagacactgtacaacagaagaacccggcaggatgagcctgccctgttcgtggccctgaccttcgagcggcgggaggtcctggactcctccaatatcaaaccaatgaacctgatcggcgtggcaagaggcgaaaacatccccgccgtgatcgccctgaccgaccccgagggctgcccactgagccggtttaaggatagcctgggaaacccaacccacatcctgagaatcggcgagagctataaggagaagcagcggaccatccaggccaagaaggaggtggagcagcggagagccggcggctacagccggaagtacgccagcaaagccaagaatctggcagacgatatggtgagaaacaccgctagagatctgctgtactacgccgtgacccaggatgccatgctgatcttcgccaacctgagccggggcttcggccggcagggcaagcggaccttcatggccgagagacagtacacacggatggaggactggctgaccgccaagctggcctacgagggcctgagcaagacctacctgtccaagacactggcccagtacacctccaagacatgcagcaactgtgggtttaccatcaccagcgccgactacgacagggtgctggagaagctgaagaagacagcaacaggctggatgaccacaattaacggcaaggagctgaaggtggagggccagattacctactacaacagatacaagagacagaacgtagtcaaggacctgtccgtcgagctggatagactgagcgaagaatctgtgaacaacgacatctcctcctggacaaagggcagaagcggagaagctctgagcctcctgaagaaaagattctcccatagacccgtgcaggagaagttcgtgtgcctgaactgcggcttcgagacacacgcagccgagcaagccgccctgaacatcgccagatcctggctgttcctgcggagccaggagtacaagaaataccagacaaacaagacaaccggcaacaccgataagagagccttcgtcgagacctggcagtccttttaccggaagaagcttaaggaggtgtggaaacctgccgtgcggtctggcggatctggcggaggctccacaagcttcaaggaggccgtgaccttcaaggacgtggccgtgaccttcaccgaggaggagctgggcctgctggaccccgcccagagggagctgtacagggacgtgatgctggagaacttcaggaacctggtgagcgtgggccaccagtgcttcatccccgacgtgatcagccagctggagagggaggagaagctgtggatgctgaggaccgccgcccagagcaggtgcagcagcggcgacaagaacctgaccagccccaagaaaaagagaaaagtctaagctgccttctgcggggcttgccttctggccatgcccttcttctctcccttgcacctgtacctcttggtctttgaataaagcctgagtaggaaggctagcaaaaaaaaaaaaaaaaaaaaaaaaaaaaaaaaaaaaaaaaaaaaaaaaaaaaaaaaaaaaaaaaaaaaaaaaaaaaaaaa

SEQ ID NO: 3482 - RNA, 5419 nt, synthetic construct
  source 1..5419: mol_type = other RNA
aggaaataagagagaaaagaagagtaagaagaaatataagagccaccatggcccctaagaagaagcgtaaagtgagccgggtgaacggcagcggcagcggcggcggcatgaaccacgaccaggagttcgacccccctaaggtgtaccctcccgtccccgccgagaagagaaagcccatccgggtcctgagcctgttcgatggcatcgccaccggtctgctggtgctgaaggacctgggcatccaggtggataggtacattgcctccgaggtgtgcgaggactccatcaccgtgggaatggtgcgtcatcagggcaagatcatgtacgtgggcgacgtgcggagcgtgacacagaagcatatccaggagtggggccctttcgacctggtgatcggcggcagcccttgcaatgacctgagcatcgtgaacccagcccggaagggcctgtacgagggaaccggcagactgttcttcgagttttacagactgctgcacgacgcccggcctaaggaaggcgacgaccggcccttcttttggctgttcgagaatgtggtggccatgggagtcagcgacaagcgggatattagccggttcctggagagcaaccccgtgatgatcgatgccaaggaagtgagcgccgcccaccgggccagatacttctggggcaatctgcctggcatgaacagacccctggccagcaccgtgaacgacaagctggagctgcaggagtgcctggagcacggccggatcgccaagttcagcaaggtgagaaccatcaccacccgaagcaacagcatcaaacaaggcaaggaccagcactttcctgtgttcatgaacgagaaggaggacatcctgtggtgtaccgagatggagagagtgttcgggttcccagtccactacacagatgtcagcaacatgtctagactggccagacagagactgctgggaagaagctggtccgtccctgtgatcagacacctgttcgcccctctgaaggagtacttcgcctgcgtgagcagcggcaacagcaacgccaacagccggggccccagcttctctagcggcctggtgccactgtccctgagagggagccacatgggccccatggagatctacaaaaccgtgagcgcctggaagcggcagcctgtgcgcgtgctgagcctgtttcggaatatcgataaagtcctgaaaagcctgggattcctggagagcggctctggctccggcggtggcaccctgaagtacgtggaggatgtgacaaacgtggtcagacgggatgtggagaagtggggccccttcgatctggtgtacggcagcacccaacccctgggcagctcttgtgaccggtgccctggctggtacatgtttcagttccaccggatcctgcagtacgccctgccgagacaggagtcccagcggccattcttttggattttcatggacaacttgctgctgaccgaggatgaccaggaaactaccactcggttcctgcagaccgaagccgtgaccctgcaggacgtgagaggccgggactaccagaacgccatgcgggtgtggtccaacatccctggactgaaaagcaagcacgcacctctgacccctaaagaagaggagtacctgcaggcccaggtgcggagcagaagcaagctggacgcccctaaggtggatctgctggtgaagaattgcctcctgcccctgagagagtacttcaagtatttcagccagaatagtctgcccctgggcggcccaagcagcggcgcccctcctcccagcggcggcagcccagccggctccccaacctctaccgaggagggcacctctgagtccgccacccccgagagcggccctggcacctccaccgagcccagcgagggcagcgcacccggcagccctgccggcagccccacctccacagaggagggaaccagcaccgagcccagcgaaggcagcgccccaggcaccagcaccgagcctagtgagggcggctctggcggcggcagcgcccaggagattaaacggatcaacaagatcagaagaagacttgtgaaagacagcaacaccaagaaggccggcaagacaggccccatgaaaaccctgctggttagagtgatgacacccgatctgagagagcggctggaaaacctgagaaagaagcctgaaaatatcccccagcccatcagcaatacatctagagccaacctgaataagctgctgaccgattacaccgaaatgaagaaggcgatcctgcatgtgtactgggaagagttccagaaggaccctgtgggcctgatgagccgggtggcccagcctgccagcaagaagatcgatcagaacaagctgaaacctgagatggacgagaagggcaacctgaccaccgccggctttgcctgctctcagtgtggccagcccctgttcgtgtacaagctggagcaggtgtctgagaagggcaaggcttacaccaactacttcggacggtgcaatgtggccgagcacgaaaagctgatcctgctggcccagctgaagcccgagaaggatagcgacgaagccgtgacatatagcctgggaaagtttgggcagagggccctggatttctacagcattcatgtgaccaaggagtccacccaccccgtgaagcccctggcccagatcgccggaaacagatacgcctccggacctgtgggaaaggccctgagcgacgcatgtatgggcacaatcgcctccttcctgtctaagtaccaggacatcatcatcgaacaccagaaggtggtgaagggcaaccagaagagactggagagcctgcgggagctggccggcaaggaaaacctggaataccctagcgtgaccctgccacctcagcctcacaccaaggagggcgttgatgcctacaacgaagtgatcgcccgggtgcgaatgtgggtgaacctgaacctgtggcagaagctgaagctaagcagagatgatgccaagcctctgctgagactgaagggattcccttcctttcctctggtcgagagacaggccaacgaagtggactggtgggacatggtgtgtaacgtgaagaagctgatcaacgagaaaaaggaggatggcaaggtgttttggcagaatctggctggctacaagagacaggaagccctgagaccatacctgagcagcgaggaagatcggaagaagggaaagaaattcgctcggtaccagctgggcgacctgctgctgcacctggaaaagaagcacggcgaggactggggaaaggtgtacgacgaggcctgggagcggattgacaagaaagtggaaggcctgagcaagcacatcaagctggaagaggaacggagaagcgaggacgcccagagcaaggccgccctgaccgactggctgcgggctaaggccagcttcgtgatcgagggcctgaaggaggccgacaaggacgagttctgcagatgcgagctgaagctgcagaagtggtacggggacctgcggggaaagcccttcgccatcgaagccgagaacagcatcctggacatcagcggcttcagcaagcagtacaactgtgccttcatctggcagaaggacggcgtgaagaagctgaacctgtacctgatcatcaactacttcaagggcggcaagctgcggttcaagaagatcaaacctgaagccttcgaagccaacagattctacaccgtgatcaacaaaaagagcggcgagatcgtgcccatggaggtgaacttcaacttcgacgaccccaacctgatcatcctgcctctggcctttggcaagagacagggcagagaattcatctggaacgacctgctgtccctggaaaccggcagcctgaagctggccaacggaagagtgatcgagaagacactgtacaacagaagaacccggcaggatgagcctgccctgttcgtggccctgaccttcgagcggcgggaggtcctggactcctccaatatcaaaccaatgaacctgatcggcgtggcaagaggcgaaaacatccccgccgtgatcgccctgaccgaccccgagggctgcccactgagccggtttaaggatagcctgggaaacccaacccacatcctgagaatcggcgagagctataaggagaagcagcggaccatccaggccaagaaggaggtggagcagcggagagccggcggctacagccggaagtacgccagcaaagccaagaatctggcagacgatatggtgagaaacaccgctagagatctgctgtactacgccgtgacccaggatgccatgctgatcttcgccaacctgagccggggcttcggccggcagggcaagcggaccttcatggccgagagacagtacacacggatggaggactggctgaccgccaagctggcctacgagggcctgagcaagacctacctgtccaagacactggcccagtacacctccaagacatgcagcaactgtgggtttaccatcaccagcgccgactacgacagggtgctggagaagctgaagaagacagcaacaggctggatgaccacaattaacggcaaggagctgaaggtggagggccagattacctactacaacagatacaagagacagaacgtagtcaaggacctgtccgtcgagctggatagactgagcgaagaatctgtgaacaacgacatctcctcctggacaaagggcagaagcggagaagctctgagcctcctgaagaaaagattctcccatagacccgtgcaggagaagttcgtgtgcctgaactgcggcttcgagacacacgcagccgagcaagccgccctgaacatcgccagatcctggctgttcctgcggagccaggagtacaagaaataccagacaaacaagacaaccggcaacaccgataagagagccttcgtcgagacctggcagtccttttaccggaagaagcttaaggaggtgtggaaacctgccgtgcggtctggcggatctggcggaggctccacaagcgccagggccagcctgagcttcgaggacgtggccgtgggcttcagctgggaggagtggcagctgctggcccccagccagaaggacctgtacagggacgtgatgctggagaactacaggaacctggtgagcgtgggctacgaggccagcaagcccgacagcgtgttccagctggagcagggcgagcccccctggatggtggagggcgccgcccagagccagacctgccaggaggagatctgggagaccagccccaagaaaaagagaaaagtctaagctgccttctgcggggcttgccttctggccatgcccttcttctctcccttgcacctgtacctcttggtctttgaataaagcctgagtaggaaggctagcaaaaaaaaaaaaaaaaaaaaaaaaaaaaaaaaaaaaaaaaaaaaaaaaaaaaaaaaaaaaaaaaaaaaaaaaaaaaaaaa

SEQ ID NO: 3483 - RNA, 5419 nt, synthetic construct
  source 1..5419: mol_type = other RNA
aggaaataagagagaaaagaagagtaagaagaaatataagagccaccatggcccctaagaagaagcgtaaagtgagccgggtgaacggcagcggcagcggcggcggcatgaaccacgaccaggagttcgacccccctaaggtgtaccctcccgtccccgccgagaagagaaagcccatccgggtcctgagcctgttcgatggcatcgccaccggtctgctggtgctgaaggacctgggcatccaggtggataggtacattgcctccgaggtgtgcgaggactccatcaccgtgggaatggtgcgtcatcagggcaagatcatgtacgtgggcgacgtgcggagcgtgacacagaagcatatccaggagtggggccctttcgacctggtgatcggcggcagcccttgcaatgacctgagcatcgtgaacccagcccggaagggcctgtacgagggaaccggcagactgttcttcgagttttacagactgctgcacgacgcccggcctaaggaaggcgacgaccggcccttcttttggctgttcgagaatgtggtggccatgggagtcagcgacaagcgggatattagccggttcctggagagcaaccccgtgatgatcgatgccaaggaagtgagcgccgcccaccgggccagatacttctggggcaatctgcctggcatgaacagacccctggccagcaccgtgaacgacaagctggagctgcaggagtgcctggagcacggccggatcgccaagttcagcaaggtgagaaccatcaccacccgaagcaacagcatcaaacaaggcaaggaccagcactttcctgtgttcatgaacgagaaggaggacatcctgtggtgtaccgagatggagagagtgttcgggttcccagtccactacacagatgtcagcaacatgtctagactggccagacagagactgctgggaagaagctggtccgtccctgtgatcagacacctgttcgcccctctgaaggagtacttcgcctgcgtgagcagcggcaacagcaacgccaacagccggggccccagcttctctagcggcctggtgccactgtccctgagagggagccacatgggccccatggagatctacaaaaccgtgagcgcctggaagcggcagcctgtgcgcgtgctgagcctgtttcggaatatcgataaagtcctgaaaagcctgggattcctggagagcggctctggctccggcggtggcaccctgaagtacgtggaggatgtgacaaacgtggtcagacgggatgtggagaagtggggccccttcgatctggtgtacggcagcacccaacccctgggcagctcttgtgaccggtgccctggctggtacatgtttcagttccaccggatcctgcagtacgccctgccgagacaggagtcccagcggccattcttttggattttcatggacaacttgctgctgaccgaggatgaccaggaaactaccactcggttcctgcagaccgaagccgtgaccctgcaggacgtgagaggccgggactaccagaacgccatgcgggtgtggtccaacatccctggactgaaaagcaagcacgcacctctgacccctaaagaagaggagtacctgcaggcccaggtgcggagcagaagcaagctggacgcccctaaggtggatctgctggtgaagaattgcctcctgcccctgagagagtacttcaagtatttcagccagaatagtctgcccctgggcggcccaagcagcggcgcccctcctcccagcggcggcagcccagccggctccccaacctctaccgaggagggcacctctgagtccgccacccccgagagcggccctggcacctccaccgagcccagcgagggcagcgcacccggcagccctgccggcagccccacctccacagaggagggaaccagcaccgagcccagcgaaggcagcgccccaggcaccagcaccgagcctagtgagggcggctctggcggcggcagcgcccaggagattaaacggatcaacaagatcagaagaagacttgtgaaagacagcaacaccaagaaggccggcaagacaggccccatgaaaaccctgctggttagagtgatgacacccgatctgagagagcggctggaaaacctgagaaagaagcctgaaaatatcccccagcccatcagcaatacatctagagccaacctgaataagctgctgaccgattacaccgaaatgaagaaggcgatcctgcatgtgtactgggaagagttccagaaggaccctgtgggcctgatgagccgggtggcccagcctgccagcaagaagatcgatcagaacaagctgaaacctgagatggacgagaagggcaacctgaccaccgccggctttgcctgctctcagtgtggccagcccctgttcgtgtacaagctggagcaggtgtctgagaagggcaaggcttacaccaactacttcggacggtgcaatgtggccgagcacgaaaagctgatcctgctggcccagctgaagcccgagaaggatagcgacgaagccgtgacatatagcctgggaaagtttgggcagagggccctggatttctacagcattcatgtgaccaaggagtccacccaccccgtgaagcccctggcccagatcgccggaaacagatacgcctccggacctgtgggaaaggccctgagcgacgcatgtatgggcacaatcgcctccttcctgtctaagtaccaggacatcatcatcgaacaccagaaggtggtgaagggcaaccagaagagactggagagcctgcgggagctggccggcaaggaaaacctggaataccctagcgtgaccctgccacctcagcctcacaccaaggagggcgttgatgcctacaacgaagtgatcgcccgggtgcgaatgtgggtgaacctgaacctgtggcagaagctgaagctaagcagagatgatgccaagcctctgctgagactgaagggattcccttcctttcctctggtcgagagacaggccaacgaagtggactggtgggacatggtgtgtaacgtgaagaagctgatcaacgagaaaaaggaggatggcaaggtgttttggcagaatctggctggctacaagagacaggaagccctgagaccatacctgagcagcgaggaagatcggaagaagggaaagaaattcgctcggtaccagctgggcgacctgctgctgcacctggaaaagaagcacggcgaggactggggaaaggtgtacgacgaggcctgggagcggattgacaagaaagtggaaggcctgagcaagcacatcaagctggaagaggaacggagaagcgaggacgcccagagcaaggccgccctgaccgactggctgcgggctaaggccagcttcgtgatcgagggcctgaaggaggccgacaaggacgagttctgcagatgcgagctgaagctgcagaagtggtacggggacctgcggggaaagcccttcgccatcgaagccgagaacagcatcctggacatcagcggcttcagcaagcagtacaactgtgccttcatctggcagaaggacggcgtgaagaagctgaacctgtacctgatcatcaactacttcaagggcggcaagctgcggttcaagaagatcaaacctgaagccttcgaagccaacagattctacaccgtgatcaacaaaaagagcggcgagatcgtgcccatggaggtgaacttcaacttcgacgaccccaacctgatcatcctgcctctggcctttggcaagagacagggcagagaattcatctggaacgacctgctgtccctggaaaccggcagcctgaagctggccaacggaagagtgatcgagaagacactgtacaacagaagaacccggcaggatgagcctgccctgttcgtggccctgaccttcgagcggcgggaggtcctggactcctccaatatcaaaccaatgaacctgatcggcgtggcaagaggcgaaaacatccccgccgtgatcgccctgaccgaccccgagggctgcccactgagccggtttaaggatagcctgggaaacccaacccacatcctgagaatcggcgagagctataaggagaagcagcggaccatccaggccaagaaggaggtggagcagcggagagccggcggctacagccggaagtacgccagcaaagccaagaatctggcagacgatatggtgagaaacaccgctagagatctgctgtactacgccgtgacccaggatgccatgctgatcttcgccaacctgagccggggcttcggccggcagggcaagcggaccttcatggccgagagacagtacacacggatggaggactggctgaccgccaagctggcctacgagggcctgagcaagacctacctgtccaagacactggcccagtacacctccaagacatgcagcaactgtgggtttaccatcaccagcgccgactacgacagggtgctggagaagctgaagaagacagcaacaggctggatgaccacaattaacggcaaggagctgaaggtggagggccagattacctactacaacagatacaagagacagaacgtagtcaaggacctgtccgtcgagctggatagactgagcgaagaatctgtgaacaacgacatctcctcctggacaaagggcagaagcggagaagctctgagcctcctgaagaaaagattctcccatagacccgtgcaggagaagttcgtgtgcctgaactgcggcttcgagacacacgcagccgagcaagccgccctgaacatcgccagatcctggctgttcctgcggagccaggagtacaagaaataccagacaaacaagacaaccggcaacaccgataagagagccttcgtcgagacctggcagtccttttaccggaagaagcttaaggaggtgtggaaacctgccgtgcggtctggcggatctggcggaggctccacaagcatggcccacatggccttcagggacgtggccgtggacttcacccaggacgagtggaggctgctgagccccgcccagaggaccctgtacagggaggtgatgctggagaactacagcaacctggtgagcctgggcatcagcttcagcaagcccgagctgatcacccagctggagcagggcaaggagacctggagggaggagaagaactgcagccccgccacctgccccgccgaccccgagcccgagaccagccccaagaaaaagagaaaagtctaagctgccttctgcggggcttgccttctggccatgcccttcttctctcccttgcacctgtacctcttggtctttgaataaagcctgagtaggaaggctagcaaaaaaaaaaaaaaaaaaaaaaaaaaaaaaaaaaaaaaaaaaaaaaaaaaaaaaaaaaaaaaaaaaaaaaaaaaaaaaaa

SEQ ID NO: 3484 - RNA, 5419 nt, synthetic construct
  source 1..5419: mol_type = other RNA
aggaaataagagagaaaagaagagtaagaagaaatataagagccaccatggcccctaagaagaagcgtaaagtgagccgggtgaacggcagcggcagcggcggcggcatgaaccacgaccaggagttcgacccccctaaggtgtaccctcccgtccccgccgagaagagaaagcccatccgggtcctgagcctgttcgatggcatcgccaccggtctgctggtgctgaaggacctgggcatccaggtggataggtacattgcctccgaggtgtgcgaggactccatcaccgtgggaatggtgcgtcatcagggcaagatcatgtacgtgggcgacgtgcggagcgtgacacagaagcatatccaggagtggggccctttcgacctggtgatcggcggcagcccttgcaatgacctgagcatcgtgaacccagcccggaagggcctgtacgagggaaccggcagactgttcttcgagttttacagactgctgcacgacgcccggcctaaggaaggcgacgaccggcccttcttttggctgttcgagaatgtggtggccatgggagtcagcgacaagcgggatattagccggttcctggagagcaaccccgtgatgatcgatgccaaggaagtgagcgccgcccaccgggccagatacttctggggcaatctgcctggcatgaacagacccctggccagcaccgtgaacgacaagctggagctgcaggagtgcctggagcacggccggatcgccaagttcagcaaggtgagaaccatcaccacccgaagcaacagcatcaaacaaggcaaggaccagcactttcctgtgttcatgaacgagaaggaggacatcctgtggtgtaccgagatggagagagtgttcgggttcccagtccactacacagatgtcagcaacatgtctagactggccagacagagactgctgggaagaagctggtccgtccctgtgatcagacacctgttcgcccctctgaaggagtacttcgcctgcgtgagcagcggcaacagcaacgccaacagccggggccccagcttctctagcggcctggtgccactgtccctgagagggagccacatgggccccatggagatctacaaaaccgtgagcgcctggaagcggcagcctgtgcgcgtgctgagcctgtttcggaatatcgataaagtcctgaaaagcctgggattcctggagagcggctctggctccggcggtggcaccctgaagtacgtggaggatgtgacaaacgtggtcagacgggatgtggagaagtggggccccttcgatctggtgtacggcagcacccaacccctgggcagctcttgtgaccggtgccctggctggtacatgtttcagttccaccggatcctgcagtacgccctgccgagacaggagtcccagcggccattcttttggattttcatggacaacttgctgctgaccgaggatgaccaggaaactaccactcggttcctgcagaccgaagccgtgaccctgcaggacgtgagaggccgggactaccagaacgccatgcgggtgtggtccaacatccctggactgaaaagcaagcacgcacctctgacccctaaagaagaggagtacctgcaggcccaggtgcggagcagaagcaagctggacgcccctaaggtggatctgctggtgaagaattgcctcctgcccctgagagagtacttcaagtatttcagccagaatagtctgcccctgggcggcccaagcagcggcgcccctcctcccagcggcggcagcccagccggctccccaacctctaccgaggagggcacctctgagtccgccacccccgagagcggccctggcacctccaccgagcccagcgagggcagcgcacccggcagccctgccggcagccccacctccacagaggagggaaccagcaccgagcccagcgaaggcagcgccccaggcaccagcaccgagcctagtgagggcggctctggcggcggcagcgcccaggagattaaacggatcaacaagatcagaagaagacttgtgaaagacagcaacaccaagaaggccggcaagacaggccccatgaaaaccctgctggttagagtgatgacacccgatctgagagagcggctggaaaacctgagaaagaagcctgaaaatatcccccagcccatcagcaatacatctagagccaacctgaataagctgctgaccgattacaccgaaatgaagaaggcgatcctgcatgtgtactgggaagagttccagaaggaccctgtgggcctgatgagccgggtggcccagcctgccagcaagaagatcgatcagaacaagctgaaacctgagatggacgagaagggcaacctgaccaccgccggctttgcctgctctcagtgtggccagcccctgttcgtgtacaagctggagcaggtgtctgagaagggcaaggcttacaccaactacttcggacggtgcaatgtggccgagcacgaaaagctgatcctgctggcccagctgaagcccgagaaggatagcgacgaagccgtgacatatagcctgggaaagtttgggcagagggccctggatttctacagcattcatgtgaccaaggagtccacccaccccgtgaagcccctggcccagatcgccggaaacagatacgcctccggacctgtgggaaaggccctgagcgacgcatgtatgggcacaatcgcctccttcctgtctaagtaccaggacatcatcatcgaacaccagaaggtggtgaagggcaaccagaagagactggagagcctgcgggagctggccggcaaggaaaacctggaataccctagcgtgaccctgccacctcagcctcacaccaaggagggcgttgatgcctacaacgaagtgatcgcccgggtgcgaatgtgggtgaacctgaacctgtggcagaagctgaagctaagcagagatgatgccaagcctctgctgagactgaagggattcccttcctttcctctggtcgagagacaggccaacgaagtggactggtgggacatggtgtgtaacgtgaagaagctgatcaacgagaaaaaggaggatggcaaggtgttttggcagaatctggctggctacaagagacaggaagccctgagaccatacctgagcagcgaggaagatcggaagaagggaaagaaattcgctcggtaccagctgggcgacctgctgctgcacctggaaaagaagcacggcgaggactggggaaaggtgtacgacgaggcctgggagcggattgacaagaaagtggaaggcctgagcaagcacatcaagctggaagaggaacggagaagcgaggacgcccagagcaaggccgccctgaccgactggctgcgggctaaggccagcttcgtgatcgagggcctgaaggaggccgacaaggacgagttctgcagatgcgagctgaagctgcagaagtggtacggggacctgcggggaaagcccttcgccatcgaagccgagaacagcatcctggacatcagcggcttcagcaagcagtacaactgtgccttcatctggcagaaggacggcgtgaagaagctgaacctgtacctgatcatcaactacttcaagggcggcaagctgcggttcaagaagatcaaacctgaagccttcgaagccaacagattctacaccgtgatcaacaaaaagagcggcgagatcgtgcccatggaggtgaacttcaacttcgacgaccccaacctgatcatcctgcctctggcctttggcaagagacagggcagagaattcatctggaacgacctgctgtccctggaaaccggcagcctgaagctggccaacggaagagtgatcgagaagacactgtacaacagaagaacccggcaggatgagcctgccctgttcgtggccctgaccttcgagcggcgggaggtcctggactcctccaatatcaaaccaatgaacctgatcggcgtggcaagaggcgaaaacatccccgccgtgatcgccctgaccgaccccgagggctgcccactgagccggtttaaggatagcctgggaaacccaacccacatcctgagaatcggcgagagctataaggagaagcagcggaccatccaggccaagaaggaggtggagcagcggagagccggcggctacagccggaagtacgccagcaaagccaagaatctggcagacgatatggtgagaaacaccgctagagatctgctgtactacgccgtgacccaggatgccatgctgatcttcgccaacctgagccggggcttcggccggcagggcaagcggaccttcatggccgagagacagtacacacggatggaggactggctgaccgccaagctggcctacgagggcctgagcaagacctacctgtccaagacactggcccagtacacctccaagacatgcagcaactgtgggtttaccatcaccagcgccgactacgacagggtgctggagaagctgaagaagacagcaacaggctggatgaccacaattaacggcaaggagctgaaggtggagggccagattacctactacaacagatacaagagacagaacgtagtcaaggacctgtccgtcgagctggatagactgagcgaagaatctgtgaacaacgacatctcctcctggacaaagggcagaagcggagaagctctgagcctcctgaagaaaagattctcccatagacccgtgcaggagaagttcgtgtgcctgaactgcggcttcgagacacacgcagccgagcaagccgccctgaacatcgccagatcctggctgttcctgcggagccaggagtacaagaaataccagacaaacaagacaaccggcaacaccgataagagagccttcgtcgagacctggcagtccttttaccggaagaagcttaaggaggtgtggaaacctgccgtgcggtctggcggatctggcggaggctccacaagcatggcccacttccagggcagcgtgaccttcgaggacgtggccatcgccttcagccagcaggagtgggagagcctggacagcagccagaggggcctgtacagggacgtgatgctggagaactacaggaacctggtgagcatgggccacagcctgagcaagccccacgtgatcgccctgctggagaggtggaaggagcccaaggtgaccgagaggaaggacggcaggaggtggtgcaccgacctgaccagccccaagaaaaagagaaaagtctaagctgccttctgcggggcttgccttctggccatgcccttcttctctcccttgcacctgtacctcttggtctttgaataaagcctgagtaggaaggctagcaaaaaaaaaaaaaaaaaaaaaaaaaaaaaaaaaaaaaaaaaaaaaaaaaaaaaaaaaaaaaaaaaaaaaaaaaaaaaaaa

SEQ ID NO: 3485 - RNA, 5419 nt, synthetic construct
  source 1..5419: mol_type = other RNA
aggaaataagagagaaaagaagagtaagaagaaatataagagccaccatggcccctaagaagaagcgtaaagtgagccgggtgaacggcagcggcagcggcggcggcatgaaccacgaccaggagttcgacccccctaaggtgtaccctcccgtccccgccgagaagagaaagcccatccgggtcctgagcctgttcgatggcatcgccaccggtctgctggtgctgaaggacctgggcatccaggtggataggtacattgcctccgaggtgtgcgaggactccatcaccgtgggaatggtgcgtcatcagggcaagatcatgtacgtgggcgacgtgcggagcgtgacacagaagcatatccaggagtggggccctttcgacctggtgatcggcggcagcccttgcaatgacctgagcatcgtgaacccagcccggaagggcctgtacgagggaaccggcagactgttcttcgagttttacagactgctgcacgacgcccggcctaaggaaggcgacgaccggcccttcttttggctgttcgagaatgtggtggccatgggagtcagcgacaagcgggatattagccggttcctggagagcaaccccgtgatgatcgatgccaaggaagtgagcgccgcccaccgggccagatacttctggggcaatctgcctggcatgaacagacccctggccagcaccgtgaacgacaagctggagctgcaggagtgcctggagcacggccggatcgccaagttcagcaaggtgagaaccatcaccacccgaagcaacagcatcaaacaaggcaaggaccagcactttcctgtgttcatgaacgagaaggaggacatcctgtggtgtaccgagatggagagagtgttcgggttcccagtccactacacagatgtcagcaacatgtctagactggccagacagagactgctgggaagaagctggtccgtccctgtgatcagacacctgttcgcccctctgaaggagtacttcgcctgcgtgagcagcggcaacagcaacgccaacagccggggccccagcttctctagcggcctggtgccactgtccctgagagggagccacatgggccccatggagatctacaaaaccgtgagcgcctggaagcggcagcctgtgcgcgtgctgagcctgtttcggaatatcgataaagtcctgaaaagcctgggattcctggagagcggctctggctccggcggtggcaccctgaagtacgtggaggatgtgacaaacgtggtcagacgggatgtggagaagtggggccccttcgatctggtgtacggcagcacccaacccctgggcagctcttgtgaccggtgccctggctggtacatgtttcagttccaccggatcctgcagtacgccctgccgagacaggagtcccagcggccattcttttggattttcatggacaacttgctgctgaccgaggatgaccaggaaactaccactcggttcctgcagaccgaagccgtgaccctgcaggacgtgagaggccgggactaccagaacgccatgcgggtgtggtccaacatccctggactgaaaagcaagcacgcacctctgacccctaaagaagaggagtacctgcaggcccaggtgcggagcagaagcaagctggacgcccctaaggtggatctgctggtgaagaattgcctcctgcccctgagagagtacttcaagtatttcagccagaatagtctgcccctgggcggcccaagcagcggcgcccctcctcccagcggcggcagcccagccggctccccaacctctaccgaggagggcacctctgagtccgccacccccgagagcggccctggcacctccaccgagcccagcgagggcagcgcacccggcagccctgccggcagccccacctccacagaggagggaaccagcaccgagcccagcgaaggcagcgccccaggcaccagcaccgagcctagtgagggcggctctggcggcggcagcgcccaggagattaaacggatcaacaagatcagaagaagacttgtgaaagacagcaacaccaagaaggccggcaagacaggccccatgaaaaccctgctggttagagtgatgacacccgatctgagagagcggctggaaaacctgagaaagaagcctgaaaatatcccccagcccatcagcaatacatctagagccaacctgaataagctgctgaccgattacaccgaaatgaagaaggcgatcctgcatgtgtactgggaagagttccagaaggaccctgtgggcctgatgagccgggtggcccagcctgccagcaagaagatcgatcagaacaagctgaaacctgagatggacgagaagggcaacctgaccaccgccggctttgcctgctctcagtgtggccagcccctgttcgtgtacaagctggagcaggtgtctgagaagggcaaggcttacaccaactacttcggacggtgcaatgtggccgagcacgaaaagctgatcctgctggcccagctgaagcccgagaaggatagcgacgaagccgtgacatatagcctgggaaagtttgggcagagggccctggatttctacagcattcatgtgaccaaggagtccacccaccccgtgaagcccctggcccagatcgccggaaacagatacgcctccggacctgtgggaaaggccctgagcgacgcatgtatgggcacaatcgcctccttcctgtctaagtaccaggacatcatcatcgaacaccagaaggtggtgaagggcaaccagaagagactggagagcctgcgggagctggccggcaaggaaaacctggaataccctagcgtgaccctgccacctcagcctcacaccaaggagggcgttgatgcctacaacgaagtgatcgcccgggtgcgaatgtgggtgaacctgaacctgtggcagaagctgaagctaagcagagatgatgccaagcctctgctgagactgaagggattcccttcctttcctctggtcgagagacaggccaacgaagtggactggtgggacatggtgtgtaacgtgaagaagctgatcaacgagaaaaaggaggatggcaaggtgttttggcagaatctggctggctacaagagacaggaagccctgagaccatacctgagcagcgaggaagatcggaagaagggaaagaaattcgctcggtaccagctgggcgacctgctgctgcacctggaaaagaagcacggcgaggactggggaaaggtgtacgacgaggcctgggagcggattgacaagaaagtggaaggcctgagcaagcacatcaagctggaagaggaacggagaagcgaggacgcccagagcaaggccgccctgaccgactggctgcgggctaaggccagcttcgtgatcgagggcctgaaggaggccgacaaggacgagttctgcagatgcgagctgaagctgcagaagtggtacggggacctgcggggaaagcccttcgccatcgaagccgagaacagcatcctggacatcagcggcttcagcaagcagtacaactgtgccttcatctggcagaaggacggcgtgaagaagctgaacctgtacctgatcatcaactacttcaagggcggcaagctgcggttcaagaagatcaaacctgaagccttcgaagccaacagattctacaccgtgatcaacaaaaagagcggcgagatcgtgcccatggaggtgaacttcaacttcgacgaccccaacctgatcatcctgcctctggcctttggcaagagacagggcagagaattcatctggaacgacctgctgtccctggaaaccggcagcctgaagctggccaacggaagagtgatcgagaagacactgtacaacagaagaacccggcaggatgagcctgccctgttcgtggccctgaccttcgagcggcgggaggtcctggactcctccaatatcaaaccaatgaacctgatcggcgtggcaagaggcgaaaacatccccgccgtgatcgccctgaccgaccccgagggctgcccactgagccggtttaaggatagcctgggaaacccaacccacatcctgagaatcggcgagagctataaggagaagcagcggaccatccaggccaagaaggaggtggagcagcggagagccggcggctacagccggaagtacgccagcaaagccaagaatctggcagacgatatggtgagaaacaccgctagagatctgctgtactacgccgtgacccaggatgccatgctgatcttcgccaacctgagccggggcttcggccggcagggcaagcggaccttcatggccgagagacagtacacacggatggaggactggctgaccgccaagctggcctacgagggcctgagcaagacctacctgtccaagacactggcccagtacacctccaagacatgcagcaactgtgggtttaccatcaccagcgccgactacgacagggtgctggagaagctgaagaagacagcaacaggctggatgaccacaattaacggcaaggagctgaaggtggagggccagattacctactacaacagatacaagagacagaacgtagtcaaggacctgtccgtcgagctggatagactgagcgaagaatctgtgaacaacgacatctcctcctggacaaagggcagaagcggagaagctctgagcctcctgaagaaaagattctcccatagacccgtgcaggagaagttcgtgtgcctgaactgcggcttcgagacacacgcagccgagcaagccgccctgaacatcgccagatcctggctgttcctgcggagccaggagtacaagaaataccagacaaacaagacaaccggcaacaccgataagagagccttcgtcgagacctggcagtccttttaccggaagaagcttaaggaggtgtggaaacctgccgtgcggtctggcggatctggcggaggctccacaagcttccaggagcccgtgaccttcgaggacgtggccgtgtacttcacccagaaccagtgggccagcctggacagcgcccagagggccctgtacagggaggtgatgctggagaactacgccaacgtggccagcctggtgagccccttccccaggcccgacctgatcagccagctggagaggggcgaggccccctgggaccccaacccctgggaggccgaggacctgaggggcatctgccccggcgagaccagccccaagaaaaagagaaaagtctaagctgccttctgcggggcttgccttctggccatgcccttcttctctcccttgcacctgtacctcttggtctttgaataaagcctgagtaggaaggctagcaaaaaaaaaaaaaaaaaaaaaaaaaaaaaaaaaaaaaaaaaaaaaaaaaaaaaaaaaaaaaaaaaaaaaaaaaaaaaaaa

SEQ ID NO: 3486 - RNA, 5419 nt, synthetic construct
  source 1..5419: mol_type = other RNA
aggaaataagagagaaaagaagagtaagaagaaatataagagccaccatggcccctaagaagaagcgtaaagtgagccgggtgaacggcagcggcagcggcggcggcatgaaccacgaccaggagttcgacccccctaaggtgtaccctcccgtccccgccgagaagagaaagcccatccgggtcctgagcctgttcgatggcatcgccaccggtctgctggtgctgaaggacctgggcatccaggtggataggtacattgcctccgaggtgtgcgaggactccatcaccgtgggaatggtgcgtcatcagggcaagatcatgtacgtgggcgacgtgcggagcgtgacacagaagcatatccaggagtggggccctttcgacctggtgatcggcggcagcccttgcaatgacctgagcatcgtgaacccagcccggaagggcctgtacgagggaaccggcagactgttcttcgagttttacagactgctgcacgacgcccggcctaaggaaggcgacgaccggcccttcttttggctgttcgagaatgtggtggccatgggagtcagcgacaagcgggatattagccggttcctggagagcaaccccgtgatgatcgatgccaaggaagtgagcgccgcccaccgggccagatacttctggggcaatctgcctggcatgaacagacccctggccagcaccgtgaacgacaagctggagctgcaggagtgcctggagcacggccggatcgccaagttcagcaaggtgagaaccatcaccacccgaagcaacagcatcaaacaaggcaaggaccagcactttcctgtgttcatgaacgagaaggaggacatcctgtggtgtaccgagatggagagagtgttcgggttcccagtccactacacagatgtcagcaacatgtctagactggccagacagagactgctgggaagaagctggtccgtccctgtgatcagacacctgttcgcccctctgaaggagtacttcgcctgcgtgagcagcggcaacagcaacgccaacagccggggccccagcttctctagcggcctggtgccactgtccctgagagggagccacatgggccccatggagatctacaaaaccgtgagcgcctggaagcggcagcctgtgcgcgtgctgagcctgtttcggaatatcgataaagtcctgaaaagcctgggattcctggagagcggctctggctccggcggtggcaccctgaagtacgtggaggatgtgacaaacgtggtcagacgggatgtggagaagtggggccccttcgatctggtgtacggcagcacccaacccctgggcagctcttgtgaccggtgccctggctggtacatgtttcagttccaccggatcctgcagtacgccctgccgagacaggagtcccagcggccattcttttggattttcatggacaacttgctgctgaccgaggatgaccaggaaactaccactcggttcctgcagaccgaagccgtgaccctgcaggacgtgagaggccgggactaccagaacgccatgcgggtgtggtccaacatccctggactgaaaagcaagcacgcacctctgacccctaaagaagaggagtacctgcaggcccaggtgcggagcagaagcaagctggacgcccctaaggtggatctgctggtgaagaattgcctcctgcccctgagagagtacttcaagtatttcagccagaatagtctgcccctgggcggcccaagcagcggcgcccctcctcccagcggcggcagcccagccggctccccaacctctaccgaggagggcacctctgagtccgccacccccgagagcggccctggcacctccaccgagcccagcgagggcagcgcacccggcagccctgccggcagccccacctccacagaggagggaaccagcaccgagcccagcgaaggcagcgccccaggcaccagcaccgagcctagtgagggcggctctggcggcggcagcgcccaggagattaaacggatcaacaagatcagaagaagacttgtgaaagacagcaacaccaagaaggccggcaagacaggccccatgaaaaccctgctggttagagtgatgacacccgatctgagagagcggctggaaaacctgagaaagaagcctgaaaatatcccccagcccatcagcaatacatctagagccaacctgaataagctgctgaccgattacaccgaaatgaagaaggcgatcctgcatgtgtactgggaagagttccagaaggaccctgtgggcctgatgagccgggtggcccagcctgccagcaagaagatcgatcagaacaagctgaaacctgagatggacgagaagggcaacctgaccaccgccggctttgcctgctctcagtgtggccagcccctgttcgtgtacaagctggagcaggtgtctgagaagggcaaggcttacaccaactacttcggacggtgcaatgtggccgagcacgaaaagctgatcctgctggcccagctgaagcccgagaaggatagcgacgaagccgtgacatatagcctgggaaagtttgggcagagggccctggatttctacagcattcatgtgaccaaggagtccacccaccccgtgaagcccctggcccagatcgccggaaacagatacgcctccggacctgtgggaaaggccctgagcgacgcatgtatgggcacaatcgcctccttcctgtctaagtaccaggacatcatcatcgaacaccagaaggtggtgaagggcaaccagaagagactggagagcctgcgggagctggccggcaaggaaaacctggaataccctagcgtgaccctgccacctcagcctcacaccaaggagggcgttgatgcctacaacgaagtgatcgcccgggtgcgaatgtgggtgaacctgaacctgtggcagaagctgaagctaagcagagatgatgccaagcctctgctgagactgaagggattcccttcctttcctctggtcgagagacaggccaacgaagtggactggtgggacatggtgtgtaacgtgaagaagctgatcaacgagaaaaaggaggatggcaaggtgttttggcagaatctggctggctacaagagacaggaagccctgagaccatacctgagcagcgaggaagatcggaagaagggaaagaaattcgctcggtaccagctgggcgacctgctgctgcacctggaaaagaagcacggcgaggactggggaaaggtgtacgacgaggcctgggagcggattgacaagaaagtggaaggcctgagcaagcacatcaagctggaagaggaacggagaagcgaggacgcccagagcaaggccgccctgaccgactggctgcgggctaaggccagcttcgtgatcgagggcctgaaggaggccgacaaggacgagttctgcagatgcgagctgaagctgcagaagtggtacggggacctgcggggaaagcccttcgccatcgaagccgagaacagcatcctggacatcagcggcttcagcaagcagtacaactgtgccttcatctggcagaaggacggcgtgaagaagctgaacctgtacctgatcatcaactacttcaagggcggcaagctgcggttcaagaagatcaaacctgaagccttcgaagccaacagattctacaccgtgatcaacaaaaagagcggcgagatcgtgcccatggaggtgaacttcaacttcgacgaccccaacctgatcatcctgcctctggcctttggcaagagacagggcagagaattcatctggaacgacctgctgtccctggaaaccggcagcctgaagctggccaacggaagagtgatcgagaagacactgtacaacagaagaacccggcaggatgagcctgccctgttcgtggccctgaccttcgagcggcgggaggtcctggactcctccaatatcaaaccaatgaacctgatcggcgtggcaagaggcgaaaacatccccgccgtgatcgccctgaccgaccccgagggctgcccactgagccggtttaaggatagcctgggaaacccaacccacatcctgagaatcggcgagagctataaggagaagcagcggaccatccaggccaagaaggaggtggagcagcggagagccggcggctacagccggaagtacgccagcaaagccaagaatctggcagacgatatggtgagaaacaccgctagagatctgctgtactacgccgtgacccaggatgccatgctgatcttcgccaacctgagccggggcttcggccggcagggcaagcggaccttcatggccgagagacagtacacacggatggaggactggctgaccgccaagctggcctacgagggcctgagcaagacctacctgtccaagacactggcccagtacacctccaagacatgcagcaactgtgggtttaccatcaccagcgccgactacgacagggtgctggagaagctgaagaagacagcaacaggctggatgaccacaattaacggcaaggagctgaaggtggagggccagattacctactacaacagatacaagagacagaacgtagtcaaggacctgtccgtcgagctggatagactgagcgaagaatctgtgaacaacgacatctcctcctggacaaagggcagaagcggagaagctctgagcctcctgaagaaaagattctcccatagacccgtgcaggagaagttcgtgtgcctgaactgcggcttcgagacacacgcagccgagcaagccgccctgaacatcgccagatcctggctgttcctgcggagccaggagtacaagaaataccagacaaacaagacaaccggcaacaccgataagagagccttcgtcgagacctggcagtccttttaccggaagaagcttaaggaggtgtggaaacctgccgtgcggtctggcggatctggcggaggctccacaagcccccagaagagcgtgaccttcgaggacgtggccgtgtacttcacccaggccgagtgggacggcctgagccccgcccagaggaccctgtacagggacgtgatgctggagaactacggcaacgtggccagcctgggcttccccctgctgaagcccgccgtgatcagccagctggagggcggcggcgacctgggcggccccagccccctggccgccggcaccggcctgcagggcctgaggaccgtgaccagccccaagaaaaagagaaaagtctaagctgccttctgcggggcttgccttctggccatgcccttcttctctcccttgcacctgtacctcttggtctttgaataaagcctgagtaggaaggctagcaaaaaaaaaaaaaaaaaaaaaaaaaaaaaaaaaaaaaaaaaaaaaaaaaaaaaaaaaaaaaaaaaaaaaaaaaaaaaaaa

SEQ ID NO: 3487 - RNA, 5419 nt, synthetic construct
  source 1..5419: mol_type = other RNA
aggaaataagagagaaaagaagagtaagaagaaatataagagccaccatggcccctaagaagaagcgtaaagtgagccgggtgaacggcagcggcagcggcggcggcatgaaccacgaccaggagttcgacccccctaaggtgtaccctcccgtccccgccgagaagagaaagcccatccgggtcctgagcctgttcgatggcatcgccaccggtctgctggtgctgaaggacctgggcatccaggtggataggtacattgcctccgaggtgtgcgaggactccatcaccgtgggaatggtgcgtcatcagggcaagatcatgtacgtgggcgacgtgcggagcgtgacacagaagcatatccaggagtggggccctttcgacctggtgatcggcggcagcccttgcaatgacctgagcatcgtgaacccagcccggaagggcctgtacgagggaaccggcagactgttcttcgagttttacagactgctgcacgacgcccggcctaaggaaggcgacgaccggcccttcttttggctgttcgagaatgtggtggccatgggagtcagcgacaagcgggatattagccggttcctggagagcaaccccgtgatgatcgatgccaaggaagtgagcgccgcccaccgggccagatacttctggggcaatctgcctggcatgaacagacccctggccagcaccgtgaacgacaagctggagctgcaggagtgcctggagcacggccggatcgccaagttcagcaaggtgagaaccatcaccacccgaagcaacagcatcaaacaaggcaaggaccagcactttcctgtgttcatgaacgagaaggaggacatcctgtggtgtaccgagatggagagagtgttcgggttcccagtccactacacagatgtcagcaacatgtctagactggccagacagagactgctgggaagaagctggtccgtccctgtgatcagacacctgttcgcccctctgaaggagtacttcgcctgcgtgagcagcggcaacagcaacgccaacagccggggccccagcttctctagcggcctggtgccactgtccctgagagggagccacatgggccccatggagatctacaaaaccgtgagcgcctggaagcggcagcctgtgcgcgtgctgagcctgtttcggaatatcgataaagtcctgaaaagcctgggattcctggagagcggctctggctccggcggtggcaccctgaagtacgtggaggatgtgacaaacgtggtcagacgggatgtggagaagtggggccccttcgatctggtgtacggcagcacccaacccctgggcagctcttgtgaccggtgccctggctggtacatgtttcagttccaccggatcctgcagtacgccctgccgagacaggagtcccagcggccattcttttggattttcatggacaacttgctgctgaccgaggatgaccaggaaactaccactcggttcctgcagaccgaagccgtgaccctgcaggacgtgagaggccgggactaccagaacgccatgcgggtgtggtccaacatccctggactgaaaagcaagcacgcacctctgacccctaaagaagaggagtacctgcaggcccaggtgcggagcagaagcaagctggacgcccctaaggtggatctgctggtgaagaattgcctcctgcccctgagagagtacttcaagtatttcagccagaatagtctgcccctgggcggcccaagcagcggcgcccctcctcccagcggcggcagcccagccggctccccaacctctaccgaggagggcacctctgagtccgccacccccgagagcggccctggcacctccaccgagcccagcgagggcagcgcacccggcagccctgccggcagccccacctccacagaggagggaaccagcaccgagcccagcgaaggcagcgccccaggcaccagcaccgagcctagtgagggcggctctggcggcggcagcgcccaggagattaaacggatcaacaagatcagaagaagacttgtgaaagacagcaacaccaagaaggccggcaagacaggccccatgaaaaccctgctggttagagtgatgacacccgatctgagagagcggctggaaaacctgagaaagaagcctgaaaatatcccccagcccatcagcaatacatctagagccaacctgaataagctgctgaccgattacaccgaaatgaagaaggcgatcctgcatgtgtactgggaagagttccagaaggaccctgtgggcctgatgagccgggtggcccagcctgccagcaagaagatcgatcagaacaagctgaaacctgagatggacgagaagggcaacctgaccaccgccggctttgcctgctctcagtgtggccagcccctgttcgtgtacaagctggagcaggtgtctgagaagggcaaggcttacaccaactacttcggacggtgcaatgtggccgagcacgaaaagctgatcctgctggcccagctgaagcccgagaaggatagcgacgaagccgtgacatatagcctgggaaagtttgggcagagggccctggatttctacagcattcatgtgaccaaggagtccacccaccccgtgaagcccctggcccagatcgccggaaacagatacgcctccggacctgtgggaaaggccctgagcgacgcatgtatgggcacaatcgcctccttcctgtctaagtaccaggacatcatcatcgaacaccagaaggtggtgaagggcaaccagaagagactggagagcctgcgggagctggccggcaaggaaaacctggaataccctagcgtgaccctgccacctcagcctcacaccaaggagggcgttgatgcctacaacgaagtgatcgcccgggtgcgaatgtgggtgaacctgaacctgtggcagaagctgaagctaagcagagatgatgccaagcctctgctgagactgaagggattcccttcctttcctctggtcgagagacaggccaacgaagtggactggtgggacatggtgtgtaacgtgaagaagctgatcaacgagaaaaaggaggatggcaaggtgttttggcagaatctggctggctacaagagacaggaagccctgagaccatacctgagcagcgaggaagatcggaagaagggaaagaaattcgctcggtaccagctgggcgacctgctgctgcacctggaaaagaagcacggcgaggactggggaaaggtgtacgacgaggcctgggagcggattgacaagaaagtggaaggcctgagcaagcacatcaagctggaagaggaacggagaagcgaggacgcccagagcaaggccgccctgaccgactggctgcgggctaaggccagcttcgtgatcgagggcctgaaggaggccgacaaggacgagttctgcagatgcgagctgaagctgcagaagtggtacggggacctgcggggaaagcccttcgccatcgaagccgagaacagcatcctggacatcagcggcttcagcaagcagtacaactgtgccttcatctggcagaaggacggcgtgaagaagctgaacctgtacctgatcatcaactacttcaagggcggcaagctgcggttcaagaagatcaaacctgaagccttcgaagccaacagattctacaccgtgatcaacaaaaagagcggcgagatcgtgcccatggaggtgaacttcaacttcgacgaccccaacctgatcatcctgcctctggcctttggcaagagacagggcagagaattcatctggaacgacctgctgtccctggaaaccggcagcctgaagctggccaacggaagagtgatcgagaagacactgtacaacagaagaacccggcaggatgagcctgccctgttcgtggccctgaccttcgagcggcgggaggtcctggactcctccaatatcaaaccaatgaacctgatcggcgtggcaagaggcgaaaacatccccgccgtgatcgccctgaccgaccccgagggctgcccactgagccggtttaaggatagcctgggaaacccaacccacatcctgagaatcggcgagagctataaggagaagcagcggaccatccaggccaagaaggaggtggagcagcggagagccggcggctacagccggaagtacgccagcaaagccaagaatctggcagacgatatggtgagaaacaccgctagagatctgctgtactacgccgtgacccaggatgccatgctgatcttcgccaacctgagccggggcttcggccggcagggcaagcggaccttcatggccgagagacagtacacacggatggaggactggctgaccgccaagctggcctacgagggcctgagcaagacctacctgtccaagacactggcccagtacacctccaagacatgcagcaactgtgggtttaccatcaccagcgccgactacgacagggtgctggagaagctgaagaagacagcaacaggctggatgaccacaattaacggcaaggagctgaaggtggagggccagattacctactacaacagatacaagagacagaacgtagtcaaggacctgtccgtcgagctggatagactgagcgaagaatctgtgaacaacgacatctcctcctggacaaagggcagaagcggagaagctctgagcctcctgaagaaaagattctcccatagacccgtgcaggagaagttcgtgtgcctgaactgcggcttcgagacacacgcagccgagcaagccgccctgaacatcgccagatcctggctgttcctgcggagccaggagtacaagaaataccagacaaacaagacaaccggcaacaccgataagagagccttcgtcgagacctggcagtccttttaccggaagaagcttaaggaggtgtggaaacctgccgtgcggtctggcggatctggcggaggctccacaagcgagaagcagttcagcttccagagcctgctgaccttcgaggacgtggccatcaacttcagcaagaaggagtgggagtgcctggacaccagccagagggacctgtacaggttcgtgatgctggagaactacagcaacctggtgagcgtgggcctgagcgtgagcaagcccgagctggtgacctgcctggagcagaacaaggagccctggatggtgaacatcgaggagagcgaggtgctggagcccaccagccccaagaaaaagagaaaagtctaagctgccttctgcggggcttgccttctggccatgcccttcttctctcccttgcacctgtacctcttggtctttgaataaagcctgagtaggaaggctagcaaaaaaaaaaaaaaaaaaaaaaaaaaaaaaaaaaaaaaaaaaaaaaaaaaaaaaaaaaaaaaaaaaaaaaaaaaaaaaaa

SEQ ID NO: 3488 - RNA, 5419 nt, synthetic construct
  source 1..5419: mol_type = other RNA
aggaaataagagagaaaagaagagtaagaagaaatataagagccaccatggcccctaagaagaagcgtaaagtgagccgggtgaacggcagcggcagcggcggcggcatgaaccacgaccaggagttcgacccccctaaggtgtaccctcccgtccccgccgagaagagaaagcccatccgggtcctgagcctgttcgatggcatcgccaccggtctgctggtgctgaaggacctgggcatccaggtggataggtacattgcctccgaggtgtgcgaggactccatcaccgtgggaatggtgcgtcatcagggcaagatcatgtacgtgggcgacgtgcggagcgtgacacagaagcatatccaggagtggggccctttcgacctggtgatcggcggcagcccttgcaatgacctgagcatcgtgaacccagcccggaagggcctgtacgagggaaccggcagactgttcttcgagttttacagactgctgcacgacgcccggcctaaggaaggcgacgaccggcccttcttttggctgttcgagaatgtggtggccatgggagtcagcgacaagcgggatattagccggttcctggagagcaaccccgtgatgatcgatgccaaggaagtgagcgccgcccaccgggccagatacttctggggcaatctgcctggcatgaacagacccctggccagcaccgtgaacgacaagctggagctgcaggagtgcctggagcacggccggatcgccaagttcagcaaggtgagaaccatcaccacccgaagcaacagcatcaaacaaggcaaggaccagcactttcctgtgttcatgaacgagaaggaggacatcctgtggtgtaccgagatggagagagtgttcgggttcccagtccactacacagatgtcagcaacatgtctagactggccagacagagactgctgggaagaagctggtccgtccctgtgatcagacacctgttcgcccctctgaaggagtacttcgcctgcgtgagcagcggcaacagcaacgccaacagccggggccccagcttctctagcggcctggtgccactgtccctgagagggagccacatgggccccatggagatctacaaaaccgtgagcgcctggaagcggcagcctgtgcgcgtgctgagcctgtttcggaatatcgataaagtcctgaaaagcctgggattcctggagagcggctctggctccggcggtggcaccctgaagtacgtggaggatgtgacaaacgtggtcagacgggatgtggagaagtggggccccttcgatctggtgtacggcagcacccaacccctgggcagctcttgtgaccggtgccctggctggtacatgtttcagttccaccggatcctgcagtacgccctgccgagacaggagtcccagcggccattcttttggattttcatggacaacttgctgctgaccgaggatgaccaggaaactaccactcggttcctgcagaccgaagccgtgaccctgcaggacgtgagaggccgggactaccagaacgccatgcgggtgtggtccaacatccctggactgaaaagcaagcacgcacctctgacccctaaagaagaggagtacctgcaggcccaggtgcggagcagaagcaagctggacgcccctaaggtggatctgctggtgaagaattgcctcctgcccctgagagagtacttcaagtatttcagccagaatagtctgcccctgggcggcccaagcagcggcgcccctcctcccagcggcggcagcccagccggctccccaacctctaccgaggagggcacctctgagtccgccacccccgagagcggccctggcacctccaccgagcccagcgagggcagcgcacccggcagccctgccggcagccccacctccacagaggagggaaccagcaccgagcccagcgaaggcagcgccccaggcaccagcaccgagcctagtgagggcggctctggcggcggcagcgcccaggagattaaacggatcaacaagatcagaagaagacttgtgaaagacagcaacaccaagaaggccggcaagacaggccccatgaaaaccctgctggttagagtgatgacacccgatctgagagagcggctggaaaacctgagaaagaagcctgaaaatatcccccagcccatcagcaatacatctagagccaacctgaataagctgctgaccgattacaccgaaatgaagaaggcgatcctgcatgtgtactgggaagagttccagaaggaccctgtgggcctgatgagccgggtggcccagcctgccagcaagaagatcgatcagaacaagctgaaacctgagatggacgagaagggcaacctgaccaccgccggctttgcctgctctcagtgtggccagcccctgttcgtgtacaagctggagcaggtgtctgagaagggcaaggcttacaccaactacttcggacggtgcaatgtggccgagcacgaaaagctgatcctgctggcccagctgaagcccgagaaggatagcgacgaagccgtgacatatagcctgggaaagtttgggcagagggccctggatttctacagcattcatgtgaccaaggagtccacccaccccgtgaagcccctggcccagatcgccggaaacagatacgcctccggacctgtgggaaaggccctgagcgacgcatgtatgggcacaatcgcctccttcctgtctaagtaccaggacatcatcatcgaacaccagaaggtggtgaagggcaaccagaagagactggagagcctgcgggagctggccggcaaggaaaacctggaataccctagcgtgaccctgccacctcagcctcacaccaaggagggcgttgatgcctacaacgaagtgatcgcccgggtgcgaatgtgggtgaacctgaacctgtggcagaagctgaagctaagcagagatgatgccaagcctctgctgagactgaagggattcccttcctttcctctggtcgagagacaggccaacgaagtggactggtgggacatggtgtgtaacgtgaagaagctgatcaacgagaaaaaggaggatggcaaggtgttttggcagaatctggctggctacaagagacaggaagccctgagaccatacctgagcagcgaggaagatcggaagaagggaaagaaattcgctcggtaccagctgggcgacctgctgctgcacctggaaaagaagcacggcgaggactggggaaaggtgtacgacgaggcctgggagcggattgacaagaaagtggaaggcctgagcaagcacatcaagctggaagaggaacggagaagcgaggacgcccagagcaaggccgccctgaccgactggctgcgggctaaggccagcttcgtgatcgagggcctgaaggaggccgacaaggacgagttctgcagatgcgagctgaagctgcagaagtggtacggggacctgcggggaaagcccttcgccatcgaagccgagaacagcatcctggacatcagcggcttcagcaagcagtacaactgtgccttcatctggcagaaggacggcgtgaagaagctgaacctgtacctgatcatcaactacttcaagggcggcaagctgcggttcaagaagatcaaacctgaagccttcgaagccaacagattctacaccgtgatcaacaaaaagagcggcgagatcgtgcccatggaggtgaacttcaacttcgacgaccccaacctgatcatcctgcctctggcctttggcaagagacagggcagagaattcatctggaacgacctgctgtccctggaaaccggcagcctgaagctggccaacggaagagtgatcgagaagacactgtacaacagaagaacccggcaggatgagcctgccctgttcgtggccctgaccttcgagcggcgggaggtcctggactcctccaatatcaaaccaatgaacctgatcggcgtggcaagaggcgaaaacatccccgccgtgatcgccctgaccgaccccgagggctgcccactgagccggtttaaggatagcctgggaaacccaacccacatcctgagaatcggcgagagctataaggagaagcagcggaccatccaggccaagaaggaggtggagcagcggagagccggcggctacagccggaagtacgccagcaaagccaagaatctggcagacgatatggtgagaaacaccgctagagatctgctgtactacgccgtgacccaggatgccatgctgatcttcgccaacctgagccggggcttcggccggcagggcaagcggaccttcatggccgagagacagtacacacggatggaggactggctgaccgccaagctggcctacgagggcctgagcaagacctacctgtccaagacactggcccagtacacctccaagacatgcagcaactgtgggtttaccatcaccagcgccgactacgacagggtgctggagaagctgaagaagacagcaacaggctggatgaccacaattaacggcaaggagctgaaggtggagggccagattacctactacaacagatacaagagacagaacgtagtcaaggacctgtccgtcgagctggatagactgagcgaagaatctgtgaacaacgacatctcctcctggacaaagggcagaagcggagaagctctgagcctcctgaagaaaagattctcccatagacccgtgcaggagaagttcgtgtgcctgaactgcggcttcgagacacacgcagccgagcaagccgccctgaacatcgccagatcctggctgttcctgcggagccaggagtacaagaaataccagacaaacaagacaaccggcaacaccgataagagagccttcgtcgagacctggcagtccttttaccggaagaagcttaaggaggtgtggaaacctgccgtgcggtctggcggatctggcggaggctccacaagccagcccagggaggccgtgaccttcaaggacgtggaggtgaccttcagccaggacgagtggggctggctggaccccgcccagaggaacctgtacagggacgtgatgctggagaactacggcaacgtggtgagcctggtgggccccttcaccaagcccgtgctgatcagctggctggaggccagggagccctggggcctgaacgtgcagggcgcccagcccaagggcaagcccggcgtggcccccaccagccccaagaaaaagagaaaagtctaagctgccttctgcggggcttgccttctggccatgcccttcttctctcccttgcacctgtacctcttggtctttgaataaagcctgagtaggaaggctagcaaaaaaaaaaaaaaaaaaaaaaaaaaaaaaaaaaaaaaaaaaaaaaaaaaaaaaaaaaaaaaaaaaaaaaaaaaaaaaaa

SEQ ID NO: 3489 - RNA, 5419 nt, synthetic construct
  source 1..5419: mol_type = other RNA
aggaaataagagagaaaagaagagtaagaagaaatataagagccaccatggcccctaagaagaagcgtaaagtgagccgggtgaacggcagcggcagcggcggcggcatgaaccacgaccaggagttcgacccccctaaggtgtaccctcccgtccccgccgagaagagaaagcccatccgggtcctgagcctgttcgatggcatcgccaccggtctgctggtgctgaaggacctgggcatccaggtggataggtacattgcctccgaggtgtgcgaggactccatcaccgtgggaatggtgcgtcatcagggcaagatcatgtacgtgggcgacgtgcggagcgtgacacagaagcatatccaggagtggggccctttcgacctggtgatcggcggcagcccttgcaatgacctgagcatcgtgaacccagcccggaagggcctgtacgagggaaccggcagactgttcttcgagttttacagactgctgcacgacgcccggcctaaggaaggcgacgaccggcccttcttttggctgttcgagaatgtggtggccatgggagtcagcgacaagcgggatattagccggttcctggagagcaaccccgtgatgatcgatgccaaggaagtgagcgccgcccaccgggccagatacttctggggcaatctgcctggcatgaacagacccctggccagcaccgtgaacgacaagctggagctgcaggagtgcctggagcacggccggatcgccaagttcagcaaggtgagaaccatcaccacccgaagcaacagcatcaaacaaggcaaggaccagcactttcctgtgttcatgaacgagaaggaggacatcctgtggtgtaccgagatggagagagtgttcgggttcccagtccactacacagatgtcagcaacatgtctagactggccagacagagactgctgggaagaagctggtccgtccctgtgatcagacacctgttcgcccctctgaaggagtacttcgcctgcgtgagcagcggcaacagcaacgccaacagccggggccccagcttctctagcggcctggtgccactgtccctgagagggagccacatgggccccatggagatctacaaaaccgtgagcgcctggaagcggcagcctgtgcgcgtgctgagcctgtttcggaatatcgataaagtcctgaaaagcctgggattcctggagagcggctctggctccggcggtggcaccctgaagtacgtggaggatgtgacaaacgtggtcagacgggatgtggagaagtggggccccttcgatctggtgtacggcagcacccaacccctgggcagctcttgtgaccggtgccctggctggtacatgtttcagttccaccggatcctgcagtacgccctgccgagacaggagtcccagcggccattcttttggattttcatggacaacttgctgctgaccgaggatgaccaggaaactaccactcggttcctgcagaccgaagccgtgaccctgcaggacgtgagaggccgggactaccagaacgccatgcgggtgtggtccaacatccctggactgaaaagcaagcacgcacctctgacccctaaagaagaggagtacctgcaggcccaggtgcggagcagaagcaagctggacgcccctaaggtggatctgctggtgaagaattgcctcctgcccctgagagagtacttcaagtatttcagccagaatagtctgcccctgggcggcccaagcagcggcgcccctcctcccagcggcggcagcccagccggctccccaacctctaccgaggagggcacctctgagtccgccacccccgagagcggccctggcacctccaccgagcccagcgagggcagcgcacccggcagccctgccggcagccccacctccacagaggagggaaccagcaccgagcccagcgaaggcagcgccccaggcaccagcaccgagcctagtgagggcggctctggcggcggcagcgcccaggagattaaacggatcaacaagatcagaagaagacttgtgaaagacagcaacaccaagaaggccggcaagacaggccccatgaaaaccctgctggttagagtgatgacacccgatctgagagagcggctggaaaacctgagaaagaagcctgaaaatatcccccagcccatcagcaatacatctagagccaacctgaataagctgctgaccgattacaccgaaatgaagaaggcgatcctgcatgtgtactgggaagagttccagaaggaccctgtgggcctgatgagccgggtggcccagcctgccagcaagaagatcgatcagaacaagctgaaacctgagatggacgagaagggcaacctgaccaccgccggctttgcctgctctcagtgtggccagcccctgttcgtgtacaagctggagcaggtgtctgagaagggcaaggcttacaccaactacttcggacggtgcaatgtggccgagcacgaaaagctgatcctgctggcccagctgaagcccgagaaggatagcgacgaagccgtgacatatagcctgggaaagtttgggcagagggccctggatttctacagcattcatgtgaccaaggagtccacccaccccgtgaagcccctggcccagatcgccggaaacagatacgcctccggacctgtgggaaaggccctgagcgacgcatgtatgggcacaatcgcctccttcctgtctaagtaccaggacatcatcatcgaacaccagaaggtggtgaagggcaaccagaagagactggagagcctgcgggagctggccggcaaggaaaacctggaataccctagcgtgaccctgccacctcagcctcacaccaaggagggcgttgatgcctacaacgaagtgatcgcccgggtgcgaatgtgggtgaacctgaacctgtggcagaagctgaagctaagcagagatgatgccaagcctctgctgagactgaagggattcccttcctttcctctggtcgagagacaggccaacgaagtggactggtgggacatggtgtgtaacgtgaagaagctgatcaacgagaaaaaggaggatggcaaggtgttttggcagaatctggctggctacaagagacaggaagccctgagaccatacctgagcagcgaggaagatcggaagaagggaaagaaattcgctcggtaccagctgggcgacctgctgctgcacctggaaaagaagcacggcgaggactggggaaaggtgtacgacgaggcctgggagcggattgacaagaaagtggaaggcctgagcaagcacatcaagctggaagaggaacggagaagcgaggacgcccagagcaaggccgccctgaccgactggctgcgggctaaggccagcttcgtgatcgagggcctgaaggaggccgacaaggacgagttctgcagatgcgagctgaagctgcagaagtggtacggggacctgcggggaaagcccttcgccatcgaagccgagaacagcatcctggacatcagcggcttcagcaagcagtacaactgtgccttcatctggcagaaggacggcgtgaagaagctgaacctgtacctgatcatcaactacttcaagggcggcaagctgcggttcaagaagatcaaacctgaagccttcgaagccaacagattctacaccgtgatcaacaaaaagagcggcgagatcgtgcccatggaggtgaacttcaacttcgacgaccccaacctgatcatcctgcctctggcctttggcaagagacagggcagagaattcatctggaacgacctgctgtccctggaaaccggcagcctgaagctggccaacggaagagtgatcgagaagacactgtacaacagaagaacccggcaggatgagcctgccctgttcgtggccctgaccttcgagcggcgggaggtcctggactcctccaatatcaaaccaatgaacctgatcggcgtggcaagaggcgaaaacatccccgccgtgatcgccctgaccgaccccgagggctgcccactgagccggtttaaggatagcctgggaaacccaacccacatcctgagaatcggcgagagctataaggagaagcagcggaccatccaggccaagaaggaggtggagcagcggagagccggcggctacagccggaagtacgccagcaaagccaagaatctggcagacgatatggtgagaaacaccgctagagatctgctgtactacgccgtgacccaggatgccatgctgatcttcgccaacctgagccggggcttcggccggcagggcaagcggaccttcatggccgagagacagtacacacggatggaggactggctgaccgccaagctggcctacgagggcctgagcaagacctacctgtccaagacactggcccagtacacctccaagacatgcagcaactgtgggtttaccatcaccagcgccgactacgacagggtgctggagaagctgaagaagacagcaacaggctggatgaccacaattaacggcaaggagctgaaggtggagggccagattacctactacaacagatacaagagacagaacgtagtcaaggacctgtccgtcgagctggatagactgagcgaagaatctgtgaacaacgacatctcctcctggacaaagggcagaagcggagaagctctgagcctcctgaagaaaagattctcccatagacccgtgcaggagaagttcgtgtgcctgaactgcggcttcgagacacacgcagccgagcaagccgccctgaacatcgccagatcctggctgttcctgcggagccaggagtacaagaaataccagacaaacaagacaaccggcaacaccgataagagagccttcgtcgagacctggcagtccttttaccggaagaagcttaaggaggtgtggaaacctgccgtgcggtctggcggatctggcggaggctccacaagcgccgagctgcccgtggtgttcgaggacgtggccgtgtacttcaccagggaggagtggggcatgctggacaagaggcagaaggagctgtacagggacgtgatgaggatgaactacgagctgatggccagcctgggccccgccgccgccaagcccgacctgatcagcaagctggagaggagggccgccccctggatcaaggaccccaacggccccaagtggggcaagggcaggccccccggcaacaccagccccaagaaaaagagaaaagtctaagctgccttctgcggggcttgccttctggccatgcccttcttctctcccttgcacctgtacctcttggtctttgaataaagcctgagtaggaaggctagcaaaaaaaaaaaaaaaaaaaaaaaaaaaaaaaaaaaaaaaaaaaaaaaaaaaaaaaaaaaaaaaaaaaaaaaaaaaaaaaa

SEQ ID NO: 3490 - RNA, 5419 nt, synthetic construct
  source 1..5419: mol_type = other RNA
aggaaataagagagaaaagaagagtaagaagaaatataagagccaccatggcccctaagaagaagcgtaaagtgagccgggtgaacggcagcggcagcggcggcggcatgaaccacgaccaggagttcgacccccctaaggtgtaccctcccgtccccgccgagaagagaaagcccatccgggtcctgagcctgttcgatggcatcgccaccggtctgctggtgctgaaggacctgggcatccaggtggataggtacattgcctccgaggtgtgcgaggactccatcaccgtgggaatggtgcgtcatcagggcaagatcatgtacgtgggcgacgtgcggagcgtgacacagaagcatatccaggagtggggccctttcgacctggtgatcggcggcagcccttgcaatgacctgagcatcgtgaacccagcccggaagggcctgtacgagggaaccggcagactgttcttcgagttttacagactgctgcacgacgcccggcctaaggaaggcgacgaccggcccttcttttggctgttcgagaatgtggtggccatgggagtcagcgacaagcgggatattagccggttcctggagagcaaccccgtgatgatcgatgccaaggaagtgagcgccgcccaccgggccagatacttctggggcaatctgcctggcatgaacagacccctggccagcaccgtgaacgacaagctggagctgcaggagtgcctggagcacggccggatcgccaagttcagcaaggtgagaaccatcaccacccgaagcaacagcatcaaacaaggcaaggaccagcactttcctgtgttcatgaacgagaaggaggacatcctgtggtgtaccgagatggagagagtgttcgggttcccagtccactacacagatgtcagcaacatgtctagactggccagacagagactgctgggaagaagctggtccgtccctgtgatcagacacctgttcgcccctctgaaggagtacttcgcctgcgtgagcagcggcaacagcaacgccaacagccggggccccagcttctctagcggcctggtgccactgtccctgagagggagccacatgggccccatggagatctacaaaaccgtgagcgcctggaagcggcagcctgtgcgcgtgctgagcctgtttcggaatatcgataaagtcctgaaaagcctgggattcctggagagcggctctggctccggcggtggcaccctgaagtacgtggaggatgtgacaaacgtggtcagacgggatgtggagaagtggggccccttcgatctggtgtacggcagcacccaacccctgggcagctcttgtgaccggtgccctggctggtacatgtttcagttccaccggatcctgcagtacgccctgccgagacaggagtcccagcggccattcttttggattttcatggacaacttgctgctgaccgaggatgaccaggaaactaccactcggttcctgcagaccgaagccgtgaccctgcaggacgtgagaggccgggactaccagaacgccatgcgggtgtggtccaacatccctggactgaaaagcaagcacgcacctctgacccctaaagaagaggagtacctgcaggcccaggtgcggagcagaagcaagctggacgcccctaaggtggatctgctggtgaagaattgcctcctgcccctgagagagtacttcaagtatttcagccagaatagtctgcccctgggcggcccaagcagcggcgcccctcctcccagcggcggcagcccagccggctccccaacctctaccgaggagggcacctctgagtccgccacccccgagagcggccctggcacctccaccgagcccagcgagggcagcgcacccggcagccctgccggcagccccacctccacagaggagggaaccagcaccgagcccagcgaaggcagcgccccaggcaccagcaccgagcctagtgagggcggctctggcggcggcagcgcccaggagattaaacggatcaacaagatcagaagaagacttgtgaaagacagcaacaccaagaaggccggcaagacaggccccatgaaaaccctgctggttagagtgatgacacccgatctgagagagcggctggaaaacctgagaaagaagcctgaaaatatcccccagcccatcagcaatacatctagagccaacctgaataagctgctgaccgattacaccgaaatgaagaaggcgatcctgcatgtgtactgggaagagttccagaaggaccctgtgggcctgatgagccgggtggcccagcctgccagcaagaagatcgatcagaacaagctgaaacctgagatggacgagaagggcaacctgaccaccgccggctttgcctgctctcagtgtggccagcccctgttcgtgtacaagctggagcaggtgtctgagaagggcaaggcttacaccaactacttcggacggtgcaatgtggccgagcacgaaaagctgatcctgctggcccagctgaagcccgagaaggatagcgacgaagccgtgacatatagcctgggaaagtttgggcagagggccctggatttctacagcattcatgtgaccaaggagtccacccaccccgtgaagcccctggcccagatcgccggaaacagatacgcctccggacctgtgggaaaggccctgagcgacgcatgtatgggcacaatcgcctccttcctgtctaagtaccaggacatcatcatcgaacaccagaaggtggtgaagggcaaccagaagagactggagagcctgcgggagctggccggcaaggaaaacctggaataccctagcgtgaccctgccacctcagcctcacaccaaggagggcgttgatgcctacaacgaagtgatcgcccgggtgcgaatgtgggtgaacctgaacctgtggcagaagctgaagctaagcagagatgatgccaagcctctgctgagactgaagggattcccttcctttcctctggtcgagagacaggccaacgaagtggactggtgggacatggtgtgtaacgtgaagaagctgatcaacgagaaaaaggaggatggcaaggtgttttggcagaatctggctggctacaagagacaggaagccctgagaccatacctgagcagcgaggaagatcggaagaagggaaagaaattcgctcggtaccagctgggcgacctgctgctgcacctggaaaagaagcacggcgaggactggggaaaggtgtacgacgaggcctgggagcggattgacaagaaagtggaaggcctgagcaagcacatcaagctggaagaggaacggagaagcgaggacgcccagagcaaggccgccctgaccgactggctgcgggctaaggccagcttcgtgatcgagggcctgaaggaggccgacaaggacgagttctgcagatgcgagctgaagctgcagaagtggtacggggacctgcggggaaagcccttcgccatcgaagccgagaacagcatcctggacatcagcggcttcagcaagcagtacaactgtgccttcatctggcagaaggacggcgtgaagaagctgaacctgtacctgatcatcaactacttcaagggcggcaagctgcggttcaagaagatcaaacctgaagccttcgaagccaacagattctacaccgtgatcaacaaaaagagcggcgagatcgtgcccatggaggtgaacttcaacttcgacgaccccaacctgatcatcctgcctctggcctttggcaagagacagggcagagaattcatctggaacgacctgctgtccctggaaaccggcagcctgaagctggccaacggaagagtgatcgagaagacactgtacaacagaagaacccggcaggatgagcctgccctgttcgtggccctgaccttcgagcggcgggaggtcctggactcctccaatatcaaaccaatgaacctgatcggcgtggcaagaggcgaaaacatccccgccgtgatcgccctgaccgaccccgagggctgcccactgagccggtttaaggatagcctgggaaacccaacccacatcctgagaatcggcgagagctataaggagaagcagcggaccatccaggccaagaaggaggtggagcagcggagagccggcggctacagccggaagtacgccagcaaagccaagaatctggcagacgatatggtgagaaacaccgctagagatctgctgtactacgccgtgacccaggatgccatgctgatcttcgccaacctgagccggggcttcggccggcagggcaagcggaccttcatggccgagagacagtacacacggatggaggactggctgaccgccaagctggcctacgagggcctgagcaagacctacctgtccaagacactggcccagtacacctccaagacatgcagcaactgtgggtttaccatcaccagcgccgactacgacagggtgctggagaagctgaagaagacagcaacaggctggatgaccacaattaacggcaaggagctgaaggtggagggccagattacctactacaacagatacaagagacagaacgtagtcaaggacctgtccgtcgagctggatagactgagcgaagaatctgtgaacaacgacatctcctcctggacaaagggcagaagcggagaagctctgagcctcctgaagaaaagattctcccatagacccgtgcaggagaagttcgtgtgcctgaactgcggcttcgagacacacgcagccgagcaagccgccctgaacatcgccagatcctggctgttcctgcggagccaggagtacaagaaataccagacaaacaagacaaccggcaacaccgataagagagccttcgtcgagacctggcagtccttttaccggaagaagcttaaggaggtgtggaaacctgccgtgcggtctggcggatctggcggaggctccacaagctgccaggagcccgtgagcttcgccgaggtggccgtgtacttcagcagggaggagtgggccctgctggaccccgcccagagggccctgtacagggacgtgatgctggagacctaccagtgcgtggcctggctggccagcctgcccgcccccaagcccggcctgatcagcctgctggagggcggcgaggacccctggatccccggcgtgaggagccccgaggccatgcccggcgacctgagccccaccagccccaagaaaaagagaaaagtctaagctgccttctgcggggcttgccttctggccatgcccttcttctctcccttgcacctgtacctcttggtctttgaataaagcctgagtaggaaggctagcaaaaaaaaaaaaaaaaaaaaaaaaaaaaaaaaaaaaaaaaaaaaaaaaaaaaaaaaaaaaaaaaaaaaaaaaaaaaaaaa

SEQ ID NO: 3491 - RNA, 5419 nt, synthetic construct
  source 1..5419: mol_type = other RNA
aggaaataagagagaaaagaagagtaagaagaaatataagagccaccatggcccctaagaagaagcgtaaagtgagccgggtgaacggcagcggcagcggcggcggcatgaaccacgaccaggagttcgacccccctaaggtgtaccctcccgtccccgccgagaagagaaagcccatccgggtcctgagcctgttcgatggcatcgccaccggtctgctggtgctgaaggacctgggcatccaggtggataggtacattgcctccgaggtgtgcgaggactccatcaccgtgggaatggtgcgtcatcagggcaagatcatgtacgtgggcgacgtgcggagcgtgacacagaagcatatccaggagtggggccctttcgacctggtgatcggcggcagcccttgcaatgacctgagcatcgtgaacccagcccggaagggcctgtacgagggaaccggcagactgttcttcgagttttacagactgctgcacgacgcccggcctaaggaaggcgacgaccggcccttcttttggctgttcgagaatgtggtggccatgggagtcagcgacaagcgggatattagccggttcctggagagcaaccccgtgatgatcgatgccaaggaagtgagcgccgcccaccgggccagatacttctggggcaatctgcctggcatgaacagacccctggccagcaccgtgaacgacaagctggagctgcaggagtgcctggagcacggccggatcgccaagttcagcaaggtgagaaccatcaccacccgaagcaacagcatcaaacaaggcaaggaccagcactttcctgtgttcatgaacgagaaggaggacatcctgtggtgtaccgagatggagagagtgttcgggttcccagtccactacacagatgtcagcaacatgtctagactggccagacagagactgctgggaagaagctggtccgtccctgtgatcagacacctgttcgcccctctgaaggagtacttcgcctgcgtgagcagcggcaacagcaacgccaacagccggggccccagcttctctagcggcctggtgccactgtccctgagagggagccacatgggccccatggagatctacaaaaccgtgagcgcctggaagcggcagcctgtgcgcgtgctgagcctgtttcggaatatcgataaagtcctgaaaagcctgggattcctggagagcggctctggctccggcggtggcaccctgaagtacgtggaggatgtgacaaacgtggtcagacgggatgtggagaagtggggccccttcgatctggtgtacggcagcacccaacccctgggcagctcttgtgaccggtgccctggctggtacatgtttcagttccaccggatcctgcagtacgccctgccgagacaggagtcccagcggccattcttttggattttcatggacaacttgctgctgaccgaggatgaccaggaaactaccactcggttcctgcagaccgaagccgtgaccctgcaggacgtgagaggccgggactaccagaacgccatgcgggtgtggtccaacatccctggactgaaaagcaagcacgcacctctgacccctaaagaagaggagtacctgcaggcccaggtgcggagcagaagcaagctggacgcccctaaggtggatctgctggtgaagaattgcctcctgcccctgagagagtacttcaagtatttcagccagaatagtctgcccctgggcggcccaagcagcggcgcccctcctcccagcggcggcagcccagccggctccccaacctctaccgaggagggcacctctgagtccgccacccccgagagcggccctggcacctccaccgagcccagcgagggcagcgcacccggcagccctgccggcagccccacctccacagaggagggaaccagcaccgagcccagcgaaggcagcgccccaggcaccagcaccgagcctagtgagggcggctctggcggcggcagcgcccaggagattaaacggatcaacaagatcagaagaagacttgtgaaagacagcaacaccaagaaggccggcaagacaggccccatgaaaaccctgctggttagagtgatgacacccgatctgagagagcggctggaaaacctgagaaagaagcctgaaaatatcccccagcccatcagcaatacatctagagccaacctgaataagctgctgaccgattacaccgaaatgaagaaggcgatcctgcatgtgtactgggaagagttccagaaggaccctgtgggcctgatgagccgggtggcccagcctgccagcaagaagatcgatcagaacaagctgaaacctgagatggacgagaagggcaacctgaccaccgccggctttgcctgctctcagtgtggccagcccctgttcgtgtacaagctggagcaggtgtctgagaagggcaaggcttacaccaactacttcggacggtgcaatgtggccgagcacgaaaagctgatcctgctggcccagctgaagcccgagaaggatagcgacgaagccgtgacatatagcctgggaaagtttgggcagagggccctggatttctacagcattcatgtgaccaaggagtccacccaccccgtgaagcccctggcccagatcgccggaaacagatacgcctccggacctgtgggaaaggccctgagcgacgcatgtatgggcacaatcgcctccttcctgtctaagtaccaggacatcatcatcgaacaccagaaggtggtgaagggcaaccagaagagactggagagcctgcgggagctggccggcaaggaaaacctggaataccctagcgtgaccctgccacctcagcctcacaccaaggagggcgttgatgcctacaacgaagtgatcgcccgggtgcgaatgtgggtgaacctgaacctgtggcagaagctgaagctaagcagagatgatgccaagcctctgctgagactgaagggattcccttcctttcctctggtcgagagacaggccaacgaagtggactggtgggacatggtgtgtaacgtgaagaagctgatcaacgagaaaaaggaggatggcaaggtgttttggcagaatctggctggctacaagagacaggaagccctgagaccatacctgagcagcgaggaagatcggaagaagggaaagaaattcgctcggtaccagctgggcgacctgctgctgcacctggaaaagaagcacggcgaggactggggaaaggtgtacgacgaggcctgggagcggattgacaagaaagtggaaggcctgagcaagcacatcaagctggaagaggaacggagaagcgaggacgcccagagcaaggccgccctgaccgactggctgcgggctaaggccagcttcgtgatcgagggcctgaaggaggccgacaaggacgagttctgcagatgcgagctgaagctgcagaagtggtacggggacctgcggggaaagcccttcgccatcgaagccgagaacagcatcctggacatcagcggcttcagcaagcagtacaactgtgccttcatctggcagaaggacggcgtgaagaagctgaacctgtacctgatcatcaactacttcaagggcggcaagctgcggttcaagaagatcaaacctgaagccttcgaagccaacagattctacaccgtgatcaacaaaaagagcggcgagatcgtgcccatggaggtgaacttcaacttcgacgaccccaacctgatcatcctgcctctggcctttggcaagagacagggcagagaattcatctggaacgacctgctgtccctggaaaccggcagcctgaagctggccaacggaagagtgatcgagaagacactgtacaacagaagaacccggcaggatgagcctgccctgttcgtggccctgaccttcgagcggcgggaggtcctggactcctccaatatcaaaccaatgaacctgatcggcgtggcaagaggcgaaaacatccccgccgtgatcgccctgaccgaccccgagggctgcccactgagccggtttaaggatagcctgggaaacccaacccacatcctgagaatcggcgagagctataaggagaagcagcggaccatccaggccaagaaggaggtggagcagcggagagccggcggctacagccggaagtacgccagcaaagccaagaatctggcagacgatatggtgagaaacaccgctagagatctgctgtactacgccgtgacccaggatgccatgctgatcttcgccaacctgagccggggcttcggccggcagggcaagcggaccttcatggccgagagacagtacacacggatggaggactggctgaccgccaagctggcctacgagggcctgagcaagacctacctgtccaagacactggcccagtacacctccaagacatgcagcaactgtgggtttaccatcaccagcgccgactacgacagggtgctggagaagctgaagaagacagcaacaggctggatgaccacaattaacggcaaggagctgaaggtggagggccagattacctactacaacagatacaagagacagaacgtagtcaaggacctgtccgtcgagctggatagactgagcgaagaatctgtgaacaacgacatctcctcctggacaaagggcagaagcggagaagctctgagcctcctgaagaaaagattctcccatagacccgtgcaggagaagttcgtgtgcctgaactgcggcttcgagacacacgcagccgagcaagccgccctgaacatcgccagatcctggctgttcctgcggagccaggagtacaagaaataccagacaaacaagacaaccggcaacaccgataagagagccttcgtcgagacctggcagtccttttaccggaagaagcttaaggaggtgtggaaacctgccgtgcggtctggcggatctggcggaggctccacaagcatgaacgccgtgacctacgaggacgtgcacgtgaacttcacccaggaggagtgggccctgctggaccccagccagaagaagctgtacaaggacgtgatggtggagacctacaggaacctgaacgccatcggcttcaactgggaggcccacaacatcgaggagtactgccagagcagcaggaggcacaggaggtgcgagaggagccagagcgccgagaagcccagcgagtacacccagtgcggcaccagccccaagaaaaagagaaaagtctaagctgccttctgcggggcttgccttctggccatgcccttcttctctcccttgcacctgtacctcttggtctttgaataaagcctgagtaggaaggctagcaaaaaaaaaaaaaaaaaaaaaaaaaaaaaaaaaaaaaaaaaaaaaaaaaaaaaaaaaaaaaaaaaaaaaaaaaaaaaaaa

SEQ ID NO: 3492 - RNA, 5419 nt, synthetic construct
  source 1..5419: mol_type = other RNA
aggaaataagagagaaaagaagagtaagaagaaatataagagccaccatggcccctaagaagaagcgtaaagtgagccgggtgaacggcagcggcagcggcggcggcatgaaccacgaccaggagttcgacccccctaaggtgtaccctcccgtccccgccgagaagagaaagcccatccgggtcctgagcctgttcgatggcatcgccaccggtctgctggtgctgaaggacctgggcatccaggtggataggtacattgcctccgaggtgtgcgaggactccatcaccgtgggaatggtgcgtcatcagggcaagatcatgtacgtgggcgacgtgcggagcgtgacacagaagcatatccaggagtggggccctttcgacctggtgatcggcggcagcccttgcaatgacctgagcatcgtgaacccagcccggaagggcctgtacgagggaaccggcagactgttcttcgagttttacagactgctgcacgacgcccggcctaaggaaggcgacgaccggcccttcttttggctgttcgagaatgtggtggccatgggagtcagcgacaagcgggatattagccggttcctggagagcaaccccgtgatgatcgatgccaaggaagtgagcgccgcccaccgggccagatacttctggggcaatctgcctggcatgaacagacccctggccagcaccgtgaacgacaagctggagctgcaggagtgcctggagcacggccggatcgccaagttcagcaaggtgagaaccatcaccacccgaagcaacagcatcaaacaaggcaaggaccagcactttcctgtgttcatgaacgagaaggaggacatcctgtggtgtaccgagatggagagagtgttcgggttcccagtccactacacagatgtcagcaacatgtctagactggccagacagagactgctgggaagaagctggtccgtccctgtgatcagacacctgttcgcccctctgaaggagtacttcgcctgcgtgagcagcggcaacagcaacgccaacagccggggccccagcttctctagcggcctggtgccactgtccctgagagggagccacatgggccccatggagatctacaaaaccgtgagcgcctggaagcggcagcctgtgcgcgtgctgagcctgtttcggaatatcgataaagtcctgaaaagcctgggattcctggagagcggctctggctccggcggtggcaccctgaagtacgtggaggatgtgacaaacgtggtcagacgggatgtggagaagtggggccccttcgatctggtgtacggcagcacccaacccctgggcagctcttgtgaccggtgccctggctggtacatgtttcagttccaccggatcctgcagtacgccctgccgagacaggagtcccagcggccattcttttggattttcatggacaacttgctgctgaccgaggatgaccaggaaactaccactcggttcctgcagaccgaagccgtgaccctgcaggacgtgagaggccgggactaccagaacgccatgcgggtgtggtccaacatccctggactgaaaagcaagcacgcacctctgacccctaaagaagaggagtacctgcaggcccaggtgcggagcagaagcaagctggacgcccctaaggtggatctgctggtgaagaattgcctcctgcccctgagagagtacttcaagtatttcagccagaatagtctgcccctgggcggcccaagcagcggcgcccctcctcccagcggcggcagcccagccggctccccaacctctaccgaggagggcacctctgagtccgccacccccgagagcggccctggcacctccaccgagcccagcgagggcagcgcacccggcagccctgccggcagccccacctccacagaggagggaaccagcaccgagcccagcgaaggcagcgccccaggcaccagcaccgagcctagtgagggcggctctggcggcggcagcgcccaggagattaaacggatcaacaagatcagaagaagacttgtgaaagacagcaacaccaagaaggccggcaagacaggccccatgaaaaccctgctggttagagtgatgacacccgatctgagagagcggctggaaaacctgagaaagaagcctgaaaatatcccccagcccatcagcaatacatctagagccaacctgaataagctgctgaccgattacaccgaaatgaagaaggcgatcctgcatgtgtactgggaagagttccagaaggaccctgtgggcctgatgagccgggtggcccagcctgccagcaagaagatcgatcagaacaagctgaaacctgagatggacgagaagggcaacctgaccaccgccggctttgcctgctctcagtgtggccagcccctgttcgtgtacaagctggagcaggtgtctgagaagggcaaggcttacaccaactacttcggacggtgcaatgtggccgagcacgaaaagctgatcctgctggcccagctgaagcccgagaaggatagcgacgaagccgtgacatatagcctgggaaagtttgggcagagggccctggatttctacagcattcatgtgaccaaggagtccacccaccccgtgaagcccctggcccagatcgccggaaacagatacgcctccggacctgtgggaaaggccctgagcgacgcatgtatgggcacaatcgcctccttcctgtctaagtaccaggacatcatcatcgaacaccagaaggtggtgaagggcaaccagaagagactggagagcctgcgggagctggccggcaaggaaaacctggaataccctagcgtgaccctgccacctcagcctcacaccaaggagggcgttgatgcctacaacgaagtgatcgcccgggtgcgaatgtgggtgaacctgaacctgtggcagaagctgaagctaagcagagatgatgccaagcctctgctgagactgaagggattcccttcctttcctctggtcgagagacaggccaacgaagtggactggtgggacatggtgtgtaacgtgaagaagctgatcaacgagaaaaaggaggatggcaaggtgttttggcagaatctggctggctacaagagacaggaagccctgagaccatacctgagcagcgaggaagatcggaagaagggaaagaaattcgctcggtaccagctgggcgacctgctgctgcacctggaaaagaagcacggcgaggactggggaaaggtgtacgacgaggcctgggagcggattgacaagaaagtggaaggcctgagcaagcacatcaagctggaagaggaacggagaagcgaggacgcccagagcaaggccgccctgaccgactggctgcgggctaaggccagcttcgtgatcgagggcctgaaggaggccgacaaggacgagttctgcagatgcgagctgaagctgcagaagtggtacggggacctgcggggaaagcccttcgccatcgaagccgagaacagcatcctggacatcagcggcttcagcaagcagtacaactgtgccttcatctggcagaaggacggcgtgaagaagctgaacctgtacctgatcatcaactacttcaagggcggcaagctgcggttcaagaagatcaaacctgaagccttcgaagccaacagattctacaccgtgatcaacaaaaagagcggcgagatcgtgcccatggaggtgaacttcaacttcgacgaccccaacctgatcatcctgcctctggcctttggcaagagacagggcagagaattcatctggaacgacctgctgtccctggaaaccggcagcctgaagctggccaacggaagagtgatcgagaagacactgtacaacagaagaacccggcaggatgagcctgccctgttcgtggccctgaccttcgagcggcgggaggtcctggactcctccaatatcaaaccaatgaacctgatcggcgtggcaagaggcgaaaacatccccgccgtgatcgccctgaccgaccccgagggctgcccactgagccggtttaaggatagcctgggaaacccaacccacatcctgagaatcggcgagagctataaggagaagcagcggaccatccaggccaagaaggaggtggagcagcggagagccggcggctacagccggaagtacgccagcaaagccaagaatctggcagacgatatggtgagaaacaccgctagagatctgctgtactacgccgtgacccaggatgccatgctgatcttcgccaacctgagccggggcttcggccggcagggcaagcggaccttcatggccgagagacagtacacacggatggaggactggctgaccgccaagctggcctacgagggcctgagcaagacctacctgtccaagacactggcccagtacacctccaagacatgcagcaactgtgggtttaccatcaccagcgccgactacgacagggtgctggagaagctgaagaagacagcaacaggctggatgaccacaattaacggcaaggagctgaaggtggagggccagattacctactacaacagatacaagagacagaacgtagtcaaggacctgtccgtcgagctggatagactgagcgaagaatctgtgaacaacgacatctcctcctggacaaagggcagaagcggagaagctctgagcctcctgaagaaaagattctcccatagacccgtgcaggagaagttcgtgtgcctgaactgcggcttcgagacacacgcagccgagcaagccgccctgaacatcgccagatcctggctgttcctgcggagccaggagtacaagaaataccagacaaacaagacaaccggcaacaccgataagagagccttcgtcgagacctggcagtccttttaccggaagaagcttaaggaggtgtggaaacctgccgtgcggtctggcggatctggcggaggctccacaagcttccaggaggtggtgaccttcgaggacgtggccgtgcacttcacccaggccgagtgggccggcctgagcagcgcccagagggccctgcacaggagcgtgatgctggagaactacggcaacctgaccagcctgggctacaccgtgcccaacagcgccctgatcagcctgctggagggcagggacctgccctggggcctggaggcccagaacgacccccccgccgagaggagcacccacgtgtgcaccagccccaagaaaaagagaaaagtctaagctgccttctgcggggcttgccttctggccatgcccttcttctctcccttgcacctgtacctcttggtctttgaataaagcctgagtaggaaggctagcaaaaaaaaaaaaaaaaaaaaaaaaaaaaaaaaaaaaaaaaaaaaaaaaaaaaaaaaaaaaaaaaaaaaaaaaaaaaaaaa

SEQ ID NO: 3493 - RNA, 5419 nt, synthetic construct
  source 1..5419: mol_type = other RNA
aggaaataagagagaaaagaagagtaagaagaaatataagagccaccatggcccctaagaagaagcgtaaagtgagccgggtgaacggcagcggcagcggcggcggcatgaaccacgaccaggagttcgacccccctaaggtgtaccctcccgtccccgccgagaagagaaagcccatccgggtcctgagcctgttcgatggcatcgccaccggtctgctggtgctgaaggacctgggcatccaggtggataggtacattgcctccgaggtgtgcgaggactccatcaccgtgggaatggtgcgtcatcagggcaagatcatgtacgtgggcgacgtgcggagcgtgacacagaagcatatccaggagtggggccctttcgacctggtgatcggcggcagcccttgcaatgacctgagcatcgtgaacccagcccggaagggcctgtacgagggaaccggcagactgttcttcgagttttacagactgctgcacgacgcccggcctaaggaaggcgacgaccggcccttcttttggctgttcgagaatgtggtggccatgggagtcagcgacaagcgggatattagccggttcctggagagcaaccccgtgatgatcgatgccaaggaagtgagcgccgcccaccgggccagatacttctggggcaatctgcctggcatgaacagacccctggccagcaccgtgaacgacaagctggagctgcaggagtgcctggagcacggccggatcgccaagttcagcaaggtgagaaccatcaccacccgaagcaacagcatcaaacaaggcaaggaccagcactttcctgtgttcatgaacgagaaggaggacatcctgtggtgtaccgagatggagagagtgttcgggttcccagtccactacacagatgtcagcaacatgtctagactggccagacagagactgctgggaagaagctggtccgtccctgtgatcagacacctgttcgcccctctgaaggagtacttcgcctgcgtgagcagcggcaacagcaacgccaacagccggggccccagcttctctagcggcctggtgccactgtccctgagagggagccacatgggccccatggagatctacaaaaccgtgagcgcctggaagcggcagcctgtgcgcgtgctgagcctgtttcggaatatcgataaagtcctgaaaagcctgggattcctggagagcggctctggctccggcggtggcaccctgaagtacgtggaggatgtgacaaacgtggtcagacgggatgtggagaagtggggccccttcgatctggtgtacggcagcacccaacccctgggcagctcttgtgaccggtgccctggctggtacatgtttcagttccaccggatcctgcagtacgccctgccgagacaggagtcccagcggccattcttttggattttcatggacaacttgctgctgaccgaggatgaccaggaaactaccactcggttcctgcagaccgaagccgtgaccctgcaggacgtgagaggccgggactaccagaacgccatgcgggtgtggtccaacatccctggactgaaaagcaagcacgcacctctgacccctaaagaagaggagtacctgcaggcccaggtgcggagcagaagcaagctggacgcccctaaggtggatctgctggtgaagaattgcctcctgcccctgagagagtacttcaagtatttcagccagaatagtctgcccctgggcggcccaagcagcggcgcccctcctcccagcggcggcagcccagccggctccccaacctctaccgaggagggcacctctgagtccgccacccccgagagcggccctggcacctccaccgagcccagcgagggcagcgcacccggcagccctgccggcagccccacctccacagaggagggaaccagcaccgagcccagcgaaggcagcgccccaggcaccagcaccgagcctagtgagggcggctctggcggcggcagcgcccaggagattaaacggatcaacaagatcagaagaagacttgtgaaagacagcaacaccaagaaggccggcaagacaggccccatgaaaaccctgctggttagagtgatgacacccgatctgagagagcggctggaaaacctgagaaagaagcctgaaaatatcccccagcccatcagcaatacatctagagccaacctgaataagctgctgaccgattacaccgaaatgaagaaggcgatcctgcatgtgtactgggaagagttccagaaggaccctgtgggcctgatgagccgggtggcccagcctgccagcaagaagatcgatcagaacaagctgaaacctgagatggacgagaagggcaacctgaccaccgccggctttgcctgctctcagtgtggccagcccctgttcgtgtacaagctggagcaggtgtctgagaagggcaaggcttacaccaactacttcggacggtgcaatgtggccgagcacgaaaagctgatcctgctggcccagctgaagcccgagaaggatagcgacgaagccgtgacatatagcctgggaaagtttgggcagagggccctggatttctacagcattcatgtgaccaaggagtccacccaccccgtgaagcccctggcccagatcgccggaaacagatacgcctccggacctgtgggaaaggccctgagcgacgcatgtatgggcacaatcgcctccttcctgtctaagtaccaggacatcatcatcgaacaccagaaggtggtgaagggcaaccagaagagactggagagcctgcgggagctggccggcaaggaaaacctggaataccctagcgtgaccctgccacctcagcctcacaccaaggagggcgttgatgcctacaacgaagtgatcgcccgggtgcgaatgtgggtgaacctgaacctgtggcagaagctgaagctaagcagagatgatgccaagcctctgctgagactgaagggattcccttcctttcctctggtcgagagacaggccaacgaagtggactggtgggacatggtgtgtaacgtgaagaagctgatcaacgagaaaaaggaggatggcaaggtgttttggcagaatctggctggctacaagagacaggaagccctgagaccatacctgagcagcgaggaagatcggaagaagggaaagaaattcgctcggtaccagctgggcgacctgctgctgcacctggaaaagaagcacggcgaggactggggaaaggtgtacgacgaggcctgggagcggattgacaagaaagtggaaggcctgagcaagcacatcaagctggaagaggaacggagaagcgaggacgcccagagcaaggccgccctgaccgactggctgcgggctaaggccagcttcgtgatcgagggcctgaaggaggccgacaaggacgagttctgcagatgcgagctgaagctgcagaagtggtacggggacctgcggggaaagcccttcgccatcgaagccgagaacagcatcctggacatcagcggcttcagcaagcagtacaactgtgccttcatctggcagaaggacggcgtgaagaagctgaacctgtacctgatcatcaactacttcaagggcggcaagctgcggttcaagaagatcaaacctgaagccttcgaagccaacagattctacaccgtgatcaacaaaaagagcggcgagatcgtgcccatggaggtgaacttcaacttcgacgaccccaacctgatcatcctgcctctggcctttggcaagagacagggcagagaattcatctggaacgacctgctgtccctggaaaccggcagcctgaagctggccaacggaagagtgatcgagaagacactgtacaacagaagaacccggcaggatgagcctgccctgttcgtggccctgaccttcgagcggcgggaggtcctggactcctccaatatcaaaccaatgaacctgatcggcgtggcaagaggcgaaaacatccccgccgtgatcgccctgaccgaccccgagggctgcccactgagccggtttaaggatagcctgggaaacccaacccacatcctgagaatcggcgagagctataaggagaagcagcggaccatccaggccaagaaggaggtggagcagcggagagccggcggctacagccggaagtacgccagcaaagccaagaatctggcagacgatatggtgagaaacaccgctagagatctgctgtactacgccgtgacccaggatgccatgctgatcttcgccaacctgagccggggcttcggccggcagggcaagcggaccttcatggccgagagacagtacacacggatggaggactggctgaccgccaagctggcctacgagggcctgagcaagacctacctgtccaagacactggcccagtacacctccaagacatgcagcaactgtgggtttaccatcaccagcgccgactacgacagggtgctggagaagctgaagaagacagcaacaggctggatgaccacaattaacggcaaggagctgaaggtggagggccagattacctactacaacagatacaagagacagaacgtagtcaaggacctgtccgtcgagctggatagactgagcgaagaatctgtgaacaacgacatctcctcctggacaaagggcagaagcggagaagctctgagcctcctgaagaaaagattctcccatagacccgtgcaggagaagttcgtgtgcctgaactgcggcttcgagacacacgcagccgagcaagccgccctgaacatcgccagatcctggctgttcctgcggagccaggagtacaagaaataccagacaaacaagacaaccggcaacaccgataagagagccttcgtcgagacctggcagtccttttaccggaagaagcttaaggaggtgtggaaacctgccgtgcggtctggcggatctggcggaggctccacaagcgtgcaggtgcccatcaagttcgaggacgtggccgtgtacttcagcgagcccgagtggaagaacctggaccagtggcagaaggagctgtacaagcacgtgatgaccgccaactacgagatcctgttcagcctggacagcgccatccccaagcccgacctgatcagccacatcgagaggggcgaggagcccttcctgagggaccacggcaacctgatgaagagggacaagaccatcggctacggcaccagccccaagaaaaagagaaaagtctaagctgccttctgcggggcttgccttctggccatgcccttcttctctcccttgcacctgtacctcttggtctttgaataaagcctgagtaggaaggctagcaaaaaaaaaaaaaaaaaaaaaaaaaaaaaaaaaaaaaaaaaaaaaaaaaaaaaaaaaaaaaaaaaaaaaaaaaaaaaaaa

SEQ ID NO: 3494 - RNA, 5419 nt, synthetic construct
  source 1..5419: mol_type = other RNA
aggaaataagagagaaaagaagagtaagaagaaatataagagccaccatggcccctaagaagaagcgtaaagtgagccgggtgaacggcagcggcagcggcggcggcatgaaccacgaccaggagttcgacccccctaaggtgtaccctcccgtccccgccgagaagagaaagcccatccgggtcctgagcctgttcgatggcatcgccaccggtctgctggtgctgaaggacctgggcatccaggtggataggtacattgcctccgaggtgtgcgaggactccatcaccgtgggaatggtgcgtcatcagggcaagatcatgtacgtgggcgacgtgcggagcgtgacacagaagcatatccaggagtggggccctttcgacctggtgatcggcggcagcccttgcaatgacctgagcatcgtgaacccagcccggaagggcctgtacgagggaaccggcagactgttcttcgagttttacagactgctgcacgacgcccggcctaaggaaggcgacgaccggcccttcttttggctgttcgagaatgtggtggccatgggagtcagcgacaagcgggatattagccggttcctggagagcaaccccgtgatgatcgatgccaaggaagtgagcgccgcccaccgggccagatacttctggggcaatctgcctggcatgaacagacccctggccagcaccgtgaacgacaagctggagctgcaggagtgcctggagcacggccggatcgccaagttcagcaaggtgagaaccatcaccacccgaagcaacagcatcaaacaaggcaaggaccagcactttcctgtgttcatgaacgagaaggaggacatcctgtggtgtaccgagatggagagagtgttcgggttcccagtccactacacagatgtcagcaacatgtctagactggccagacagagactgctgggaagaagctggtccgtccctgtgatcagacacctgttcgcccctctgaaggagtacttcgcctgcgtgagcagcggcaacagcaacgccaacagccggggccccagcttctctagcggcctggtgccactgtccctgagagggagccacatgggccccatggagatctacaaaaccgtgagcgcctggaagcggcagcctgtgcgcgtgctgagcctgtttcggaatatcgataaagtcctgaaaagcctgggattcctggagagcggctctggctccggcggtggcaccctgaagtacgtggaggatgtgacaaacgtggtcagacgggatgtggagaagtggggccccttcgatctggtgtacggcagcacccaacccctgggcagctcttgtgaccggtgccctggctggtacatgtttcagttccaccggatcctgcagtacgccctgccgagacaggagtcccagcggccattcttttggattttcatggacaacttgctgctgaccgaggatgaccaggaaactaccactcggttcctgcagaccgaagccgtgaccctgcaggacgtgagaggccgggactaccagaacgccatgcgggtgtggtccaacatccctggactgaaaagcaagcacgcacctctgacccctaaagaagaggagtacctgcaggcccaggtgcggagcagaagcaagctggacgcccctaaggtggatctgctggtgaagaattgcctcctgcccctgagagagtacttcaagtatttcagccagaatagtctgcccctgggcggcccaagcagcggcgcccctcctcccagcggcggcagcccagccggctccccaacctctaccgaggagggcacctctgagtccgccacccccgagagcggccctggcacctccaccgagcccagcgagggcagcgcacccggcagccctgccggcagccccacctccacagaggagggaaccagcaccgagcccagcgaaggcagcgccccaggcaccagcaccgagcctagtgagggcggctctggcggcggcagcgcccaggagattaaacggatcaacaagatcagaagaagacttgtgaaagacagcaacaccaagaaggccggcaagacaggccccatgaaaaccctgctggttagagtgatgacacccgatctgagagagcggctggaaaacctgagaaagaagcctgaaaatatcccccagcccatcagcaatacatctagagccaacctgaataagctgctgaccgattacaccgaaatgaagaaggcgatcctgcatgtgtactgggaagagttccagaaggaccctgtgggcctgatgagccgggtggcccagcctgccagcaagaagatcgatcagaacaagctgaaacctgagatggacgagaagggcaacctgaccaccgccggctttgcctgctctcagtgtggccagcccctgttcgtgtacaagctggagcaggtgtctgagaagggcaaggcttacaccaactacttcggacggtgcaatgtggccgagcacgaaaagctgatcctgctggcccagctgaagcccgagaaggatagcgacgaagccgtgacatatagcctgggaaagtttgggcagagggccctggatttctacagcattcatgtgaccaaggagtccacccaccccgtgaagcccctggcccagatcgccggaaacagatacgcctccggacctgtgggaaaggccctgagcgacgcatgtatgggcacaatcgcctccttcctgtctaagtaccaggacatcatcatcgaacaccagaaggtggtgaagggcaaccagaagagactggagagcctgcgggagctggccggcaaggaaaacctggaataccctagcgtgaccctgccacctcagcctcacaccaaggagggcgttgatgcctacaacgaagtgatcgcccgggtgcgaatgtgggtgaacctgaacctgtggcagaagctgaagctaagcagagatgatgccaagcctctgctgagactgaagggattcccttcctttcctctggtcgagagacaggccaacgaagtggactggtgggacatggtgtgtaacgtgaagaagctgatcaacgagaaaaaggaggatggcaaggtgttttggcagaatctggctggctacaagagacaggaagccctgagaccatacctgagcagcgaggaagatcggaagaagggaaagaaattcgctcggtaccagctgggcgacctgctgctgcacctggaaaagaagcacggcgaggactggggaaaggtgtacgacgaggcctgggagcggattgacaagaaagtggaaggcctgagcaagcacatcaagctggaagaggaacggagaagcgaggacgcccagagcaaggccgccctgaccgactggctgcgggctaaggccagcttcgtgatcgagggcctgaaggaggccgacaaggacgagttctgcagatgcgagctgaagctgcagaagtggtacggggacctgcggggaaagcccttcgccatcgaagccgagaacagcatcctggacatcagcggcttcagcaagcagtacaactgtgccttcatctggcagaaggacggcgtgaagaagctgaacctgtacctgatcatcaactacttcaagggcggcaagctgcggttcaagaagatcaaacctgaagccttcgaagccaacagattctacaccgtgatcaacaaaaagagcggcgagatcgtgcccatggaggtgaacttcaacttcgacgaccccaacctgatcatcctgcctctggcctttggcaagagacagggcagagaattcatctggaacgacctgctgtccctggaaaccggcagcctgaagctggccaacggaagagtgatcgagaagacactgtacaacagaagaacccggcaggatgagcctgccctgttcgtggccctgaccttcgagcggcgggaggtcctggactcctccaatatcaaaccaatgaacctgatcggcgtggcaagaggcgaaaacatccccgccgtgatcgccctgaccgaccccgagggctgcccactgagccggtttaaggatagcctgggaaacccaacccacatcctgagaatcggcgagagctataaggagaagcagcggaccatccaggccaagaaggaggtggagcagcggagagccggcggctacagccggaagtacgccagcaaagccaagaatctggcagacgatatggtgagaaacaccgctagagatctgctgtactacgccgtgacccaggatgccatgctgatcttcgccaacctgagccggggcttcggccggcagggcaagcggaccttcatggccgagagacagtacacacggatggaggactggctgaccgccaagctggcctacgagggcctgagcaagacctacctgtccaagacactggcccagtacacctccaagacatgcagcaactgtgggtttaccatcaccagcgccgactacgacagggtgctggagaagctgaagaagacagcaacaggctggatgaccacaattaacggcaaggagctgaaggtggagggccagattacctactacaacagatacaagagacagaacgtagtcaaggacctgtccgtcgagctggatagactgagcgaagaatctgtgaacaacgacatctcctcctggacaaagggcagaagcggagaagctctgagcctcctgaagaaaagattctcccatagacccgtgcaggagaagttcgtgtgcctgaactgcggcttcgagacacacgcagccgagcaagccgccctgaacatcgccagatcctggctgttcctgcggagccaggagtacaagaaataccagacaaacaagacaaccggcaacaccgataagagagccttcgtcgagacctggcagtccttttaccggaagaagcttaaggaggtgtggaaacctgccgtgcggtctggcggatctggcggaggctccacaagcaggcccagggccgtgaagttcggcgacgtggccctgtacttcagcagggaggagtggggctgcctgaggcccgcccagagggccctgtacagggacgtgatgcaggagacctacggccacctgggcgccctgggctgcgccggccccaagcccgccctgatcagctggctggagaggaacaccgacgactgggagcccgccgccctggacccccaggagtgccccaagggcgtggccgtgcagaccagccccaagaaaaagagaaaagtctaagctgccttctgcggggcttgccttctggccatgcccttcttctctcccttgcacctgtacctcttggtctttgaataaagcctgagtaggaaggctagcaaaaaaaaaaaaaaaaaaaaaaaaaaaaaaaaaaaaaaaaaaaaaaaaaaaaaaaaaaaaaaaaaaaaaaaaaaaaaaaa

SEQ ID NO: 3495 - RNA, 5419 nt, synthetic construct
  source 1..5419: mol_type = other RNA
aggaaataagagagaaaagaagagtaagaagaaatataagagccaccatggcccctaagaagaagcgtaaagtgagccgggtgaacggcagcggcagcggcggcggcatgaaccacgaccaggagttcgacccccctaaggtgtaccctcccgtccccgccgagaagagaaagcccatccgggtcctgagcctgttcgatggcatcgccaccggtctgctggtgctgaaggacctgggcatccaggtggataggtacattgcctccgaggtgtgcgaggactccatcaccgtgggaatggtgcgtcatcagggcaagatcatgtacgtgggcgacgtgcggagcgtgacacagaagcatatccaggagtggggccctttcgacctggtgatcggcggcagcccttgcaatgacctgagcatcgtgaacccagcccggaagggcctgtacgagggaaccggcagactgttcttcgagttttacagactgctgcacgacgcccggcctaaggaaggcgacgaccggcccttcttttggctgttcgagaatgtggtggccatgggagtcagcgacaagcgggatattagccggttcctggagagcaaccccgtgatgatcgatgccaaggaagtgagcgccgcccaccgggccagatacttctggggcaatctgcctggcatgaacagacccctggccagcaccgtgaacgacaagctggagctgcaggagtgcctggagcacggccggatcgccaagttcagcaaggtgagaaccatcaccacccgaagcaacagcatcaaacaaggcaaggaccagcactttcctgtgttcatgaacgagaaggaggacatcctgtggtgtaccgagatggagagagtgttcgggttcccagtccactacacagatgtcagcaacatgtctagactggccagacagagactgctgggaagaagctggtccgtccctgtgatcagacacctgttcgcccctctgaaggagtacttcgcctgcgtgagcagcggcaacagcaacgccaacagccggggccccagcttctctagcggcctggtgccactgtccctgagagggagccacatgggccccatggagatctacaaaaccgtgagcgcctggaagcggcagcctgtgcgcgtgctgagcctgtttcggaatatcgataaagtcctgaaaagcctgggattcctggagagcggctctggctccggcggtggcaccctgaagtacgtggaggatgtgacaaacgtggtcagacgggatgtggagaagtggggccccttcgatctggtgtacggcagcacccaacccctgggcagctcttgtgaccggtgccctggctggtacatgtttcagttccaccggatcctgcagtacgccctgccgagacaggagtcccagcggccattcttttggattttcatggacaacttgctgctgaccgaggatgaccaggaaactaccactcggttcctgcagaccgaagccgtgaccctgcaggacgtgagaggccgggactaccagaacgccatgcgggtgtggtccaacatccctggactgaaaagcaagcacgcacctctgacccctaaagaagaggagtacctgcaggcccaggtgcggagcagaagcaagctggacgcccctaaggtggatctgctggtgaagaattgcctcctgcccctgagagagtacttcaagtatttcagccagaatagtctgcccctgggcggcccaagcagcggcgcccctcctcccagcggcggcagcccagccggctccccaacctctaccgaggagggcacctctgagtccgccacccccgagagcggccctggcacctccaccgagcccagcgagggcagcgcacccggcagccctgccggcagccccacctccacagaggagggaaccagcaccgagcccagcgaaggcagcgccccaggcaccagcaccgagcctagtgagggcggctctggcggcggcagcgcccaggagattaaacggatcaacaagatcagaagaagacttgtgaaagacagcaacaccaagaaggccggcaagacaggccccatgaaaaccctgctggttagagtgatgacacccgatctgagagagcggctggaaaacctgagaaagaagcctgaaaatatcccccagcccatcagcaatacatctagagccaacctgaataagctgctgaccgattacaccgaaatgaagaaggcgatcctgcatgtgtactgggaagagttccagaaggaccctgtgggcctgatgagccgggtggcccagcctgccagcaagaagatcgatcagaacaagctgaaacctgagatggacgagaagggcaacctgaccaccgccggctttgcctgctctcagtgtggccagcccctgttcgtgtacaagctggagcaggtgtctgagaagggcaaggcttacaccaactacttcggacggtgcaatgtggccgagcacgaaaagctgatcctgctggcccagctgaagcccgagaaggatagcgacgaagccgtgacatatagcctgggaaagtttgggcagagggccctggatttctacagcattcatgtgaccaaggagtccacccaccccgtgaagcccctggcccagatcgccggaaacagatacgcctccggacctgtgggaaaggccctgagcgacgcatgtatgggcacaatcgcctccttcctgtctaagtaccaggacatcatcatcgaacaccagaaggtggtgaagggcaaccagaagagactggagagcctgcgggagctggccggcaaggaaaacctggaataccctagcgtgaccctgccacctcagcctcacaccaaggagggcgttgatgcctacaacgaagtgatcgcccgggtgcgaatgtgggtgaacctgaacctgtggcagaagctgaagctaagcagagatgatgccaagcctctgctgagactgaagggattcccttcctttcctctggtcgagagacaggccaacgaagtggactggtgggacatggtgtgtaacgtgaagaagctgatcaacgagaaaaaggaggatggcaaggtgttttggcagaatctggctggctacaagagacaggaagccctgagaccatacctgagcagcgaggaagatcggaagaagggaaagaaattcgctcggtaccagctgggcgacctgctgctgcacctggaaaagaagcacggcgaggactggggaaaggtgtacgacgaggcctgggagcggattgacaagaaagtggaaggcctgagcaagcacatcaagctggaagaggaacggagaagcgaggacgcccagagcaaggccgccctgaccgactggctgcgggctaaggccagcttcgtgatcgagggcctgaaggaggccgacaaggacgagttctgcagatgcgagctgaagctgcagaagtggtacggggacctgcggggaaagcccttcgccatcgaagccgagaacagcatcctggacatcagcggcttcagcaagcagtacaactgtgccttcatctggcagaaggacggcgtgaagaagctgaacctgtacctgatcatcaactacttcaagggcggcaagctgcggttcaagaagatcaaacctgaagccttcgaagccaacagattctacaccgtgatcaacaaaaagagcggcgagatcgtgcccatggaggtgaacttcaacttcgacgaccccaacctgatcatcctgcctctggcctttggcaagagacagggcagagaattcatctggaacgacctgctgtccctggaaaccggcagcctgaagctggccaacggaagagtgatcgagaagacactgtacaacagaagaacccggcaggatgagcctgccctgttcgtggccctgaccttcgagcggcgggaggtcctggactcctccaatatcaaaccaatgaacctgatcggcgtggcaagaggcgaaaacatccccgccgtgatcgccctgaccgaccccgagggctgcccactgagccggtttaaggatagcctgggaaacccaacccacatcctgagaatcggcgagagctataaggagaagcagcggaccatccaggccaagaaggaggtggagcagcggagagccggcggctacagccggaagtacgccagcaaagccaagaatctggcagacgatatggtgagaaacaccgctagagatctgctgtactacgccgtgacccaggatgccatgctgatcttcgccaacctgagccggggcttcggccggcagggcaagcggaccttcatggccgagagacagtacacacggatggaggactggctgaccgccaagctggcctacgagggcctgagcaagacctacctgtccaagacactggcccagtacacctccaagacatgcagcaactgtgggtttaccatcaccagcgccgactacgacagggtgctggagaagctgaagaagacagcaacaggctggatgaccacaattaacggcaaggagctgaaggtggagggccagattacctactacaacagatacaagagacagaacgtagtcaaggacctgtccgtcgagctggatagactgagcgaagaatctgtgaacaacgacatctcctcctggacaaagggcagaagcggagaagctctgagcctcctgaagaaaagattctcccatagacccgtgcaggagaagttcgtgtgcctgaactgcggcttcgagacacacgcagccgagcaagccgccctgaacatcgccagatcctggctgttcctgcggagccaggagtacaagaaataccagacaaacaagacaaccggcaacaccgataagagagccttcgtcgagacctggcagtccttttaccggaagaagcttaaggaggtgtggaaacctgccgtgcggtctggcggatctggcggaggctccacaagcccccccaggcaggagagggtgaccttcggcgacgtggccgtggacttcaccctggacgagtgggtgtgcctggacagcgcccagaaggccctgtacagggacgtgatgctggagaactacggccacctggtgtgcctgggcctggccggcgccaagcccgccgtgatccagaggctggagaggggcgaggccgcctggtgccccggcgtgcccggcagcaggctgcccggcctgttcttcttcaccagccccaagaaaaagagaaaagtctaagctgccttctgcggggcttgccttctggccatgcccttcttctctcccttgcacctgtacctcttggtctttgaataaagcctgagtaggaaggctagcaaaaaaaaaaaaaaaaaaaaaaaaaaaaaaaaaaaaaaaaaaaaaaaaaaaaaaaaaaaaaaaaaaaaaaaaaaaaaaaa

SEQ ID NO: 3496 - RNA, 5419 nt, synthetic construct
  source 1..5419: mol_type = other RNA
aggaaataagagagaaaagaagagtaagaagaaatataagagccaccatggcccctaagaagaagcgtaaagtgagccgggtgaacggcagcggcagcggcggcggcatgaaccacgaccaggagttcgacccccctaaggtgtaccctcccgtccccgccgagaagagaaagcccatccgggtcctgagcctgttcgatggcatcgccaccggtctgctggtgctgaaggacctgggcatccaggtggataggtacattgcctccgaggtgtgcgaggactccatcaccgtgggaatggtgcgtcatcagggcaagatcatgtacgtgggcgacgtgcggagcgtgacacagaagcatatccaggagtggggccctttcgacctggtgatcggcggcagcccttgcaatgacctgagcatcgtgaacccagcccggaagggcctgtacgagggaaccggcagactgttcttcgagttttacagactgctgcacgacgcccggcctaaggaaggcgacgaccggcccttcttttggctgttcgagaatgtggtggccatgggagtcagcgacaagcgggatattagccggttcctggagagcaaccccgtgatgatcgatgccaaggaagtgagcgccgcccaccgggccagatacttctggggcaatctgcctggcatgaacagacccctggccagcaccgtgaacgacaagctggagctgcaggagtgcctggagcacggccggatcgccaagttcagcaaggtgagaaccatcaccacccgaagcaacagcatcaaacaaggcaaggaccagcactttcctgtgttcatgaacgagaaggaggacatcctgtggtgtaccgagatggagagagtgttcgggttcccagtccactacacagatgtcagcaacatgtctagactggccagacagagactgctgggaagaagctggtccgtccctgtgatcagacacctgttcgcccctctgaaggagtacttcgcctgcgtgagcagcggcaacagcaacgccaacagccggggccccagcttctctagcggcctggtgccactgtccctgagagggagccacatgggccccatggagatctacaaaaccgtgagcgcctggaagcggcagcctgtgcgcgtgctgagcctgtttcggaatatcgataaagtcctgaaaagcctgggattcctggagagcggctctggctccggcggtggcaccctgaagtacgtggaggatgtgacaaacgtggtcagacgggatgtggagaagtggggccccttcgatctggtgtacggcagcacccaacccctgggcagctcttgtgaccggtgccctggctggtacatgtttcagttccaccggatcctgcagtacgccctgccgagacaggagtcccagcggccattcttttggattttcatggacaacttgctgctgaccgaggatgaccaggaaactaccactcggttcctgcagaccgaagccgtgaccctgcaggacgtgagaggccgggactaccagaacgccatgcgggtgtggtccaacatccctggactgaaaagcaagcacgcacctctgacccctaaagaagaggagtacctgcaggcccaggtgcggagcagaagcaagctggacgcccctaaggtggatctgctggtgaagaattgcctcctgcccctgagagagtacttcaagtatttcagccagaatagtctgcccctgggcggcccaagcagcggcgcccctcctcccagcggcggcagcccagccggctccccaacctctaccgaggagggcacctctgagtccgccacccccgagagcggccctggcacctccaccgagcccagcgagggcagcgcacccggcagccctgccggcagccccacctccacagaggagggaaccagcaccgagcccagcgaaggcagcgccccaggcaccagcaccgagcctagtgagggcggctctggcggcggcagcgcccaggagattaaacggatcaacaagatcagaagaagacttgtgaaagacagcaacaccaagaaggccggcaagacaggccccatgaaaaccctgctggttagagtgatgacacccgatctgagagagcggctggaaaacctgagaaagaagcctgaaaatatcccccagcccatcagcaatacatctagagccaacctgaataagctgctgaccgattacaccgaaatgaagaaggcgatcctgcatgtgtactgggaagagttccagaaggaccctgtgggcctgatgagccgggtggcccagcctgccagcaagaagatcgatcagaacaagctgaaacctgagatggacgagaagggcaacctgaccaccgccggctttgcctgctctcagtgtggccagcccctgttcgtgtacaagctggagcaggtgtctgagaagggcaaggcttacaccaactacttcggacggtgcaatgtggccgagcacgaaaagctgatcctgctggcccagctgaagcccgagaaggatagcgacgaagccgtgacatatagcctgggaaagtttgggcagagggccctggatttctacagcattcatgtgaccaaggagtccacccaccccgtgaagcccctggcccagatcgccggaaacagatacgcctccggacctgtgggaaaggccctgagcgacgcatgtatgggcacaatcgcctccttcctgtctaagtaccaggacatcatcatcgaacaccagaaggtggtgaagggcaaccagaagagactggagagcctgcgggagctggccggcaaggaaaacctggaataccctagcgtgaccctgccacctcagcctcacaccaaggagggcgttgatgcctacaacgaagtgatcgcccgggtgcgaatgtgggtgaacctgaacctgtggcagaagctgaagctaagcagagatgatgccaagcctctgctgagactgaagggattcccttcctttcctctggtcgagagacaggccaacgaagtggactggtgggacatggtgtgtaacgtgaagaagctgatcaacgagaaaaaggaggatggcaaggtgttttggcagaatctggctggctacaagagacaggaagccctgagaccatacctgagcagcgaggaagatcggaagaagggaaagaaattcgctcggtaccagctgggcgacctgctgctgcacctggaaaagaagcacggcgaggactggggaaaggtgtacgacgaggcctgggagcggattgacaagaaagtggaaggcctgagcaagcacatcaagctggaagaggaacggagaagcgaggacgcccagagcaaggccgccctgaccgactggctgcgggctaaggccagcttcgtgatcgagggcctgaaggaggccgacaaggacgagttctgcagatgcgagctgaagctgcagaagtggtacggggacctgcggggaaagcccttcgccatcgaagccgagaacagcatcctggacatcagcggcttcagcaagcagtacaactgtgccttcatctggcagaaggacggcgtgaagaagctgaacctgtacctgatcatcaactacttcaagggcggcaagctgcggttcaagaagatcaaacctgaagccttcgaagccaacagattctacaccgtgatcaacaaaaagagcggcgagatcgtgcccatggaggtgaacttcaacttcgacgaccccaacctgatcatcctgcctctggcctttggcaagagacagggcagagaattcatctggaacgacctgctgtccctggaaaccggcagcctgaagctggccaacggaagagtgatcgagaagacactgtacaacagaagaacccggcaggatgagcctgccctgttcgtggccctgaccttcgagcggcgggaggtcctggactcctccaatatcaaaccaatgaacctgatcggcgtggcaagaggcgaaaacatccccgccgtgatcgccctgaccgaccccgagggctgcccactgagccggtttaaggatagcctgggaaacccaacccacatcctgagaatcggcgagagctataaggagaagcagcggaccatccaggccaagaaggaggtggagcagcggagagccggcggctacagccggaagtacgccagcaaagccaagaatctggcagacgatatggtgagaaacaccgctagagatctgctgtactacgccgtgacccaggatgccatgctgatcttcgccaacctgagccggggcttcggccggcagggcaagcggaccttcatggccgagagacagtacacacggatggaggactggctgaccgccaagctggcctacgagggcctgagcaagacctacctgtccaagacactggcccagtacacctccaagacatgcagcaactgtgggtttaccatcaccagcgccgactacgacagggtgctggagaagctgaagaagacagcaacaggctggatgaccacaattaacggcaaggagctgaaggtggagggccagattacctactacaacagatacaagagacagaacgtagtcaaggacctgtccgtcgagctggatagactgagcgaagaatctgtgaacaacgacatctcctcctggacaaagggcagaagcggagaagctctgagcctcctgaagaaaagattctcccatagacccgtgcaggagaagttcgtgtgcctgaactgcggcttcgagacacacgcagccgagcaagccgccctgaacatcgccagatcctggctgttcctgcggagccaggagtacaagaaataccagacaaacaagacaaccggcaacaccgataagagagccttcgtcgagacctggcagtccttttaccggaagaagcttaaggaggtgtggaaacctgccgtgcggtctggcggatctggcggaggctccacaagcatggccgccgccgccctgaggctgcccgcccagggcaccgtgaccttcgaggacgtggccgtgaagttcagccaggaggagtggagcatcctgaccgaggcccagaggtgcctgtaccacgacgtgatgctggagaacctggccctgatcagcagcctgggctgctggtacggcgccaaggacgagacccccagcaagcagaccctgagcatccagcagcagagccccctgaggagccactggaccagccccaagaaaaagagaaaagtctaagctgccttctgcggggcttgccttctggccatgcccttcttctctcccttgcacctgtacctcttggtctttgaataaagcctgagtaggaaggctagcaaaaaaaaaaaaaaaaaaaaaaaaaaaaaaaaaaaaaaaaaaaaaaaaaaaaaaaaaaaaaaaaaaaaaaaaaaaaaaaa

SEQ ID NO: 3497 - RNA, 5419 nt, synthetic construct
  source 1..5419: mol_type = other RNA
aggaaataagagagaaaagaagagtaagaagaaatataagagccaccatggcccctaagaagaagcgtaaagtgagccgggtgaacggcagcggcagcggcggcggcatgaaccacgaccaggagttcgacccccctaaggtgtaccctcccgtccccgccgagaagagaaagcccatccgggtcctgagcctgttcgatggcatcgccaccggtctgctggtgctgaaggacctgggcatccaggtggataggtacattgcctccgaggtgtgcgaggactccatcaccgtgggaatggtgcgtcatcagggcaagatcatgtacgtgggcgacgtgcggagcgtgacacagaagcatatccaggagtggggccctttcgacctggtgatcggcggcagcccttgcaatgacctgagcatcgtgaacccagcccggaagggcctgtacgagggaaccggcagactgttcttcgagttttacagactgctgcacgacgcccggcctaaggaaggcgacgaccggcccttcttttggctgttcgagaatgtggtggccatgggagtcagcgacaagcgggatattagccggttcctggagagcaaccccgtgatgatcgatgccaaggaagtgagcgccgcccaccgggccagatacttctggggcaatctgcctggcatgaacagacccctggccagcaccgtgaacgacaagctggagctgcaggagtgcctggagcacggccggatcgccaagttcagcaaggtgagaaccatcaccacccgaagcaacagcatcaaacaaggcaaggaccagcactttcctgtgttcatgaacgagaaggaggacatcctgtggtgtaccgagatggagagagtgttcgggttcccagtccactacacagatgtcagcaacatgtctagactggccagacagagactgctgggaagaagctggtccgtccctgtgatcagacacctgttcgcccctctgaaggagtacttcgcctgcgtgagcagcggcaacagcaacgccaacagccggggccccagcttctctagcggcctggtgccactgtccctgagagggagccacatgggccccatggagatctacaaaaccgtgagcgcctggaagcggcagcctgtgcgcgtgctgagcctgtttcggaatatcgataaagtcctgaaaagcctgggattcctggagagcggctctggctccggcggtggcaccctgaagtacgtggaggatgtgacaaacgtggtcagacgggatgtggagaagtggggccccttcgatctggtgtacggcagcacccaacccctgggcagctcttgtgaccggtgccctggctggtacatgtttcagttccaccggatcctgcagtacgccctgccgagacaggagtcccagcggccattcttttggattttcatggacaacttgctgctgaccgaggatgaccaggaaactaccactcggttcctgcagaccgaagccgtgaccctgcaggacgtgagaggccgggactaccagaacgccatgcgggtgtggtccaacatccctggactgaaaagcaagcacgcacctctgacccctaaagaagaggagtacctgcaggcccaggtgcggagcagaagcaagctggacgcccctaaggtggatctgctggtgaagaattgcctcctgcccctgagagagtacttcaagtatttcagccagaatagtctgcccctgggcggcccaagcagcggcgcccctcctcccagcggcggcagcccagccggctccccaacctctaccgaggagggcacctctgagtccgccacccccgagagcggccctggcacctccaccgagcccagcgagggcagcgcacccggcagccctgccggcagccccacctccacagaggagggaaccagcaccgagcccagcgaaggcagcgccccaggcaccagcaccgagcctagtgagggcggctctggcggcggcagcgcccaggagattaaacggatcaacaagatcagaagaagacttgtgaaagacagcaacaccaagaaggccggcaagacaggccccatgaaaaccctgctggttagagtgatgacacccgatctgagagagcggctggaaaacctgagaaagaagcctgaaaatatcccccagcccatcagcaatacatctagagccaacctgaataagctgctgaccgattacaccgaaatgaagaaggcgatcctgcatgtgtactgggaagagttccagaaggaccctgtgggcctgatgagccgggtggcccagcctgccagcaagaagatcgatcagaacaagctgaaacctgagatggacgagaagggcaacctgaccaccgccggctttgcctgctctcagtgtggccagcccctgttcgtgtacaagctggagcaggtgtctgagaagggcaaggcttacaccaactacttcggacggtgcaatgtggccgagcacgaaaagctgatcctgctggcccagctgaagcccgagaaggatagcgacgaagccgtgacatatagcctgggaaagtttgggcagagggccctggatttctacagcattcatgtgaccaaggagtccacccaccccgtgaagcccctggcccagatcgccggaaacagatacgcctccggacctgtgggaaaggccctgagcgacgcatgtatgggcacaatcgcctccttcctgtctaagtaccaggacatcatcatcgaacaccagaaggtggtgaagggcaaccagaagagactggagagcctgcgggagctggccggcaaggaaaacctggaataccctagcgtgaccctgccacctcagcctcacaccaaggagggcgttgatgcctacaacgaagtgatcgcccgggtgcgaatgtgggtgaacctgaacctgtggcagaagctgaagctaagcagagatgatgccaagcctctgctgagactgaagggattcccttcctttcctctggtcgagagacaggccaacgaagtggactggtgggacatggtgtgtaacgtgaagaagctgatcaacgagaaaaaggaggatggcaaggtgttttggcagaatctggctggctacaagagacaggaagccctgagaccatacctgagcagcgaggaagatcggaagaagggaaagaaattcgctcggtaccagctgggcgacctgctgctgcacctggaaaagaagcacggcgaggactggggaaaggtgtacgacgaggcctgggagcggattgacaagaaagtggaaggcctgagcaagcacatcaagctggaagaggaacggagaagcgaggacgcccagagcaaggccgccctgaccgactggctgcgggctaaggccagcttcgtgatcgagggcctgaaggaggccgacaaggacgagttctgcagatgcgagctgaagctgcagaagtggtacggggacctgcggggaaagcccttcgccatcgaagccgagaacagcatcctggacatcagcggcttcagcaagcagtacaactgtgccttcatctggcagaaggacggcgtgaagaagctgaacctgtacctgatcatcaactacttcaagggcggcaagctgcggttcaagaagatcaaacctgaagccttcgaagccaacagattctacaccgtgatcaacaaaaagagcggcgagatcgtgcccatggaggtgaacttcaacttcgacgaccccaacctgatcatcctgcctctggcctttggcaagagacagggcagagaattcatctggaacgacctgctgtccctggaaaccggcagcctgaagctggccaacggaagagtgatcgagaagacactgtacaacagaagaacccggcaggatgagcctgccctgttcgtggccctgaccttcgagcggcgggaggtcctggactcctccaatatcaaaccaatgaacctgatcggcgtggcaagaggcgaaaacatccccgccgtgatcgccctgaccgaccccgagggctgcccactgagccggtttaaggatagcctgggaaacccaacccacatcctgagaatcggcgagagctataaggagaagcagcggaccatccaggccaagaaggaggtggagcagcggagagccggcggctacagccggaagtacgccagcaaagccaagaatctggcagacgatatggtgagaaacaccgctagagatctgctgtactacgccgtgacccaggatgccatgctgatcttcgccaacctgagccggggcttcggccggcagggcaagcggaccttcatggccgagagacagtacacacggatggaggactggctgaccgccaagctggcctacgagggcctgagcaagacctacctgtccaagacactggcccagtacacctccaagacatgcagcaactgtgggtttaccatcaccagcgccgactacgacagggtgctggagaagctgaagaagacagcaacaggctggatgaccacaattaacggcaaggagctgaaggtggagggccagattacctactacaacagatacaagagacagaacgtagtcaaggacctgtccgtcgagctggatagactgagcgaagaatctgtgaacaacgacatctcctcctggacaaagggcagaagcggagaagctctgagcctcctgaagaaaagattctcccatagacccgtgcaggagaagttcgtgtgcctgaactgcggcttcgagacacacgcagccgagcaagccgccctgaacatcgccagatcctggctgttcctgcggagccaggagtacaagaaataccagacaaacaagacaaccggcaacaccgataagagagccttcgtcgagacctggcagtccttttaccggaagaagcttaaggaggtgtggaaacctgccgtgcggtctggcggatctggcggaggctccacaagcatggcccacatggccttcagggacgtggccgtggacttcacccaggacgagtggaggctgctgagccccgcccagaggaccctgtacagggaggtgatgctggagaactacagcaacctggtgagcctgggcatcagcttcagcaagcccgagatcatcacccagctggagcagggcaaggagacctggagggaggagaagaagtgcccccccgccacctgccccgaccccgagcccgagctgaccagccccaagaaaaagagaaaagtctaagctgccttctgcggggcttgccttctggccatgcccttcttctctcccttgcacctgtacctcttggtctttgaataaagcctgagtaggaaggctagcaaaaaaaaaaaaaaaaaaaaaaaaaaaaaaaaaaaaaaaaaaaaaaaaaaaaaaaaaaaaaaaaaaaaaaaaaaaaaaaa

SEQ ID NO: 3498 - RNA, 5419 nt, synthetic construct
  source 1..5419: mol_type = other RNA
aggaaataagagagaaaagaagagtaagaagaaatataagagccaccatggcccctaagaagaagcgtaaagtgagccgggtgaacggcagcggcagcggcggcggcatgaaccacgaccaggagttcgacccccctaaggtgtaccctcccgtccccgccgagaagagaaagcccatccgggtcctgagcctgttcgatggcatcgccaccggtctgctggtgctgaaggacctgggcatccaggtggataggtacattgcctccgaggtgtgcgaggactccatcaccgtgggaatggtgcgtcatcagggcaagatcatgtacgtgggcgacgtgcggagcgtgacacagaagcatatccaggagtggggccctttcgacctggtgatcggcggcagcccttgcaatgacctgagcatcgtgaacccagcccggaagggcctgtacgagggaaccggcagactgttcttcgagttttacagactgctgcacgacgcccggcctaaggaaggcgacgaccggcccttcttttggctgttcgagaatgtggtggccatgggagtcagcgacaagcgggatattagccggttcctggagagcaaccccgtgatgatcgatgccaaggaagtgagcgccgcccaccgggccagatacttctggggcaatctgcctggcatgaacagacccctggccagcaccgtgaacgacaagctggagctgcaggagtgcctggagcacggccggatcgccaagttcagcaaggtgagaaccatcaccacccgaagcaacagcatcaaacaaggcaaggaccagcactttcctgtgttcatgaacgagaaggaggacatcctgtggtgtaccgagatggagagagtgttcgggttcccagtccactacacagatgtcagcaacatgtctagactggccagacagagactgctgggaagaagctggtccgtccctgtgatcagacacctgttcgcccctctgaaggagtacttcgcctgcgtgagcagcggcaacagcaacgccaacagccggggccccagcttctctagcggcctggtgccactgtccctgagagggagccacatgggccccatggagatctacaaaaccgtgagcgcctggaagcggcagcctgtgcgcgtgctgagcctgtttcggaatatcgataaagtcctgaaaagcctgggattcctggagagcggctctggctccggcggtggcaccctgaagtacgtggaggatgtgacaaacgtggtcagacgggatgtggagaagtggggccccttcgatctggtgtacggcagcacccaacccctgggcagctcttgtgaccggtgccctggctggtacatgtttcagttccaccggatcctgcagtacgccctgccgagacaggagtcccagcggccattcttttggattttcatggacaacttgctgctgaccgaggatgaccaggaaactaccactcggttcctgcagaccgaagccgtgaccctgcaggacgtgagaggccgggactaccagaacgccatgcgggtgtggtccaacatccctggactgaaaagcaagcacgcacctctgacccctaaagaagaggagtacctgcaggcccaggtgcggagcagaagcaagctggacgcccctaaggtggatctgctggtgaagaattgcctcctgcccctgagagagtacttcaagtatttcagccagaatagtctgcccctgggcggcccaagcagcggcgcccctcctcccagcggcggcagcccagccggctccccaacctctaccgaggagggcacctctgagtccgccacccccgagagcggccctggcacctccaccgagcccagcgagggcagcgcacccggcagccctgccggcagccccacctccacagaggagggaaccagcaccgagcccagcgaaggcagcgccccaggcaccagcaccgagcctagtgagggcggctctggcggcggcagcgcccaggagattaaacggatcaacaagatcagaagaagacttgtgaaagacagcaacaccaagaaggccggcaagacaggccccatgaaaaccctgctggttagagtgatgacacccgatctgagagagcggctggaaaacctgagaaagaagcctgaaaatatcccccagcccatcagcaatacatctagagccaacctgaataagctgctgaccgattacaccgaaatgaagaaggcgatcctgcatgtgtactgggaagagttccagaaggaccctgtgggcctgatgagccgggtggcccagcctgccagcaagaagatcgatcagaacaagctgaaacctgagatggacgagaagggcaacctgaccaccgccggctttgcctgctctcagtgtggccagcccctgttcgtgtacaagctggagcaggtgtctgagaagggcaaggcttacaccaactacttcggacggtgcaatgtggccgagcacgaaaagctgatcctgctggcccagctgaagcccgagaaggatagcgacgaagccgtgacatatagcctgggaaagtttgggcagagggccctggatttctacagcattcatgtgaccaaggagtccacccaccccgtgaagcccctggcccagatcgccggaaacagatacgcctccggacctgtgggaaaggccctgagcgacgcatgtatgggcacaatcgcctccttcctgtctaagtaccaggacatcatcatcgaacaccagaaggtggtgaagggcaaccagaagagactggagagcctgcgggagctggccggcaaggaaaacctggaataccctagcgtgaccctgccacctcagcctcacaccaaggagggcgttgatgcctacaacgaagtgatcgcccgggtgcgaatgtgggtgaacctgaacctgtggcagaagctgaagctaagcagagatgatgccaagcctctgctgagactgaagggattcccttcctttcctctggtcgagagacaggccaacgaagtggactggtgggacatggtgtgtaacgtgaagaagctgatcaacgagaaaaaggaggatggcaaggtgttttggcagaatctggctggctacaagagacaggaagccctgagaccatacctgagcagcgaggaagatcggaagaagggaaagaaattcgctcggtaccagctgggcgacctgctgctgcacctggaaaagaagcacggcgaggactggggaaaggtgtacgacgaggcctgggagcggattgacaagaaagtggaaggcctgagcaagcacatcaagctggaagaggaacggagaagcgaggacgcccagagcaaggccgccctgaccgactggctgcgggctaaggccagcttcgtgatcgagggcctgaaggaggccgacaaggacgagttctgcagatgcgagctgaagctgcagaagtggtacggggacctgcggggaaagcccttcgccatcgaagccgagaacagcatcctggacatcagcggcttcagcaagcagtacaactgtgccttcatctggcagaaggacggcgtgaagaagctgaacctgtacctgatcatcaactacttcaagggcggcaagctgcggttcaagaagatcaaacctgaagccttcgaagccaacagattctacaccgtgatcaacaaaaagagcggcgagatcgtgcccatggaggtgaacttcaacttcgacgaccccaacctgatcatcctgcctctggcctttggcaagagacagggcagagaattcatctggaacgacctgctgtccctggaaaccggcagcctgaagctggccaacggaagagtgatcgagaagacactgtacaacagaagaacccggcaggatgagcctgccctgttcgtggccctgaccttcgagcggcgggaggtcctggactcctccaatatcaaaccaatgaacctgatcggcgtggcaagaggcgaaaacatccccgccgtgatcgccctgaccgaccccgagggctgcccactgagccggtttaaggatagcctgggaaacccaacccacatcctgagaatcggcgagagctataaggagaagcagcggaccatccaggccaagaaggaggtggagcagcggagagccggcggctacagccggaagtacgccagcaaagccaagaatctggcagacgatatggtgagaaacaccgctagagatctgctgtactacgccgtgacccaggatgccatgctgatcttcgccaacctgagccggggcttcggccggcagggcaagcggaccttcatggccgagagacagtacacacggatggaggactggctgaccgccaagctggcctacgagggcctgagcaagacctacctgtccaagacactggcccagtacacctccaagacatgcagcaactgtgggtttaccatcaccagcgccgactacgacagggtgctggagaagctgaagaagacagcaacaggctggatgaccacaattaacggcaaggagctgaaggtggagggccagattacctactacaacagatacaagagacagaacgtagtcaaggacctgtccgtcgagctggatagactgagcgaagaatctgtgaacaacgacatctcctcctggacaaagggcagaagcggagaagctctgagcctcctgaagaaaagattctcccatagacccgtgcaggagaagttcgtgtgcctgaactgcggcttcgagacacacgcagccgagcaagccgccctgaacatcgccagatcctggctgttcctgcggagccaggagtacaagaaataccagacaaacaagacaaccggcaacaccgataagagagccttcgtcgagacctggcagtccttttaccggaagaagcttaaggaggtgtggaaacctgccgtgcggtctggcggatctggcggaggctccacaagccaggccgaggtgaccttcgaggacgtggccgtgctgctgagcagggaggagtggggcaggctgggccccgtgcagaagggcctgtacagggacgtgatgctggagacctacaggaacctggtgagcctgggcgccggccccgccggccccaagcccgaggtgatcacccagctggagaggggcgacgagccctgggtgcccgacgtgcagggcagggagaggcccaacatcgacggcagcgccaccagccccaagaaaaagagaaaagtctaagctgccttctgcggggcttgccttctggccatgcccttcttctctcccttgcacctgtacctcttggtctttgaataaagcctgagtaggaaggctagcaaaaaaaaaaaaaaaaaaaaaaaaaaaaaaaaaaaaaaaaaaaaaaaaaaaaaaaaaaaaaaaaaaaaaaaaaaaaaaaa

SEQ ID NO: 3499 - RNA, 5419 nt, synthetic construct
  source 1..5419: mol_type = other RNA
aggaaataagagagaaaagaagagtaagaagaaatataagagccaccatggcccctaagaagaagcgtaaagtgagccgggtgaacggcagcggcagcggcggcggcatgaaccacgaccaggagttcgacccccctaaggtgtaccctcccgtccccgccgagaagagaaagcccatccgggtcctgagcctgttcgatggcatcgccaccggtctgctggtgctgaaggacctgggcatccaggtggataggtacattgcctccgaggtgtgcgaggactccatcaccgtgggaatggtgcgtcatcagggcaagatcatgtacgtgggcgacgtgcggagcgtgacacagaagcatatccaggagtggggccctttcgacctggtgatcggcggcagcccttgcaatgacctgagcatcgtgaacccagcccggaagggcctgtacgagggaaccggcagactgttcttcgagttttacagactgctgcacgacgcccggcctaaggaaggcgacgaccggcccttcttttggctgttcgagaatgtggtggccatgggagtcagcgacaagcgggatattagccggttcctggagagcaaccccgtgatgatcgatgccaaggaagtgagcgccgcccaccgggccagatacttctggggcaatctgcctggcatgaacagacccctggccagcaccgtgaacgacaagctggagctgcaggagtgcctggagcacggccggatcgccaagttcagcaaggtgagaaccatcaccacccgaagcaacagcatcaaacaaggcaaggaccagcactttcctgtgttcatgaacgagaaggaggacatcctgtggtgtaccgagatggagagagtgttcgggttcccagtccactacacagatgtcagcaacatgtctagactggccagacagagactgctgggaagaagctggtccgtccctgtgatcagacacctgttcgcccctctgaaggagtacttcgcctgcgtgagcagcggcaacagcaacgccaacagccggggccccagcttctctagcggcctggtgccactgtccctgagagggagccacatgggccccatggagatctacaaaaccgtgagcgcctggaagcggcagcctgtgcgcgtgctgagcctgtttcggaatatcgataaagtcctgaaaagcctgggattcctggagagcggctctggctccggcggtggcaccctgaagtacgtggaggatgtgacaaacgtggtcagacgggatgtggagaagtggggccccttcgatctggtgtacggcagcacccaacccctgggcagctcttgtgaccggtgccctggctggtacatgtttcagttccaccggatcctgcagtacgccctgccgagacaggagtcccagcggccattcttttggattttcatggacaacttgctgctgaccgaggatgaccaggaaactaccactcggttcctgcagaccgaagccgtgaccctgcaggacgtgagaggccgggactaccagaacgccatgcgggtgtggtccaacatccctggactgaaaagcaagcacgcacctctgacccctaaagaagaggagtacctgcaggcccaggtgcggagcagaagcaagctggacgcccctaaggtggatctgctggtgaagaattgcctcctgcccctgagagagtacttcaagtatttcagccagaatagtctgcccctgggcggcccaagcagcggcgcccctcctcccagcggcggcagcccagccggctccccaacctctaccgaggagggcacctctgagtccgccacccccgagagcggccctggcacctccaccgagcccagcgagggcagcgcacccggcagccctgccggcagccccacctccacagaggagggaaccagcaccgagcccagcgaaggcagcgccccaggcaccagcaccgagcctagtgagggcggctctggcggcggcagcgcccaggagattaaacggatcaacaagatcagaagaagacttgtgaaagacagcaacaccaagaaggccggcaagacaggccccatgaaaaccctgctggttagagtgatgacacccgatctgagagagcggctggaaaacctgagaaagaagcctgaaaatatcccccagcccatcagcaatacatctagagccaacctgaataagctgctgaccgattacaccgaaatgaagaaggcgatcctgcatgtgtactgggaagagttccagaaggaccctgtgggcctgatgagccgggtggcccagcctgccagcaagaagatcgatcagaacaagctgaaacctgagatggacgagaagggcaacctgaccaccgccggctttgcctgctctcagtgtggccagcccctgttcgtgtacaagctggagcaggtgtctgagaagggcaaggcttacaccaactacttcggacggtgcaatgtggccgagcacgaaaagctgatcctgctggcccagctgaagcccgagaaggatagcgacgaagccgtgacatatagcctgggaaagtttgggcagagggccctggatttctacagcattcatgtgaccaaggagtccacccaccccgtgaagcccctggcccagatcgccggaaacagatacgcctccggacctgtgggaaaggccctgagcgacgcatgtatgggcacaatcgcctccttcctgtctaagtaccaggacatcatcatcgaacaccagaaggtggtgaagggcaaccagaagagactggagagcctgcgggagctggccggcaaggaaaacctggaataccctagcgtgaccctgccacctcagcctcacaccaaggagggcgttgatgcctacaacgaagtgatcgcccgggtgcgaatgtgggtgaacctgaacctgtggcagaagctgaagctaagcagagatgatgccaagcctctgctgagactgaagggattcccttcctttcctctggtcgagagacaggccaacgaagtggactggtgggacatggtgtgtaacgtgaagaagctgatcaacgagaaaaaggaggatggcaaggtgttttggcagaatctggctggctacaagagacaggaagccctgagaccatacctgagcagcgaggaagatcggaagaagggaaagaaattcgctcggtaccagctgggcgacctgctgctgcacctggaaaagaagcacggcgaggactggggaaaggtgtacgacgaggcctgggagcggattgacaagaaagtggaaggcctgagcaagcacatcaagctggaagaggaacggagaagcgaggacgcccagagcaaggccgccctgaccgactggctgcgggctaaggccagcttcgtgatcgagggcctgaaggaggccgacaaggacgagttctgcagatgcgagctgaagctgcagaagtggtacggggacctgcggggaaagcccttcgccatcgaagccgagaacagcatcctggacatcagcggcttcagcaagcagtacaactgtgccttcatctggcagaaggacggcgtgaagaagctgaacctgtacctgatcatcaactacttcaagggcggcaagctgcggttcaagaagatcaaacctgaagccttcgaagccaacagattctacaccgtgatcaacaaaaagagcggcgagatcgtgcccatggaggtgaacttcaacttcgacgaccccaacctgatcatcctgcctctggcctttggcaagagacagggcagagaattcatctggaacgacctgctgtccctggaaaccggcagcctgaagctggccaacggaagagtgatcgagaagacactgtacaacagaagaacccggcaggatgagcctgccctgttcgtggccctgaccttcgagcggcgggaggtcctggactcctccaatatcaaaccaatgaacctgatcggcgtggcaagaggcgaaaacatccccgccgtgatcgccctgaccgaccccgagggctgcccactgagccggtttaaggatagcctgggaaacccaacccacatcctgagaatcggcgagagctataaggagaagcagcggaccatccaggccaagaaggaggtggagcagcggagagccggcggctacagccggaagtacgccagcaaagccaagaatctggcagacgatatggtgagaaacaccgctagagatctgctgtactacgccgtgacccaggatgccatgctgatcttcgccaacctgagccggggcttcggccggcagggcaagcggaccttcatggccgagagacagtacacacggatggaggactggctgaccgccaagctggcctacgagggcctgagcaagacctacctgtccaagacactggcccagtacacctccaagacatgcagcaactgtgggtttaccatcaccagcgccgactacgacagggtgctggagaagctgaagaagacagcaacaggctggatgaccacaattaacggcaaggagctgaaggtggagggccagattacctactacaacagatacaagagacagaacgtagtcaaggacctgtccgtcgagctggatagactgagcgaagaatctgtgaacaacgacatctcctcctggacaaagggcagaagcggagaagctctgagcctcctgaagaaaagattctcccatagacccgtgcaggagaagttcgtgtgcctgaactgcggcttcgagacacacgcagccgagcaagccgccctgaacatcgccagatcctggctgttcctgcggagccaggagtacaagaaataccagacaaacaagacaaccggcaacaccgataagagagccttcgtcgagacctggcagtccttttaccggaagaagcttaaggaggtgtggaaacctgccgtgcggtctggcggatctggcggaggctccacaagcctgagggacctggtgaccttcgaggacgtggccgtggacttcacccaggaggagtgggccctgctggacgccagccagaggagcctgtacagggaggtgatgctggagaactgcaggaacctggccagcctgggctgccacgtggacaagcccagcctgatcagccagctggagcaggaggaccaggccatgaccgaggagaggggcaacctgcccggcacctgccccgacctggagaccgtgaccagccccaagaaaaagagaaaagtctaagctgccttctgcggggcttgccttctggccatgcccttcttctctcccttgcacctgtacctcttggtctttgaataaagcctgagtaggaaggctagcaaaaaaaaaaaaaaaaaaaaaaaaaaaaaaaaaaaaaaaaaaaaaaaaaaaaaaaaaaaaaaaaaaaaaaaaaaaaaaaa

SEQ ID NO: 3500 - RNA, 5419 nt, synthetic construct
  source 1..5419: mol_type = other RNA
aggaaataagagagaaaagaagagtaagaagaaatataagagccaccatggcccctaagaagaagcgtaaagtgagccgggtgaacggcagcggcagcggcggcggcatgaaccacgaccaggagttcgacccccctaaggtgtaccctcccgtccccgccgagaagagaaagcccatccgggtcctgagcctgttcgatggcatcgccaccggtctgctggtgctgaaggacctgggcatccaggtggataggtacattgcctccgaggtgtgcgaggactccatcaccgtgggaatggtgcgtcatcagggcaagatcatgtacgtgggcgacgtgcggagcgtgacacagaagcatatccaggagtggggccctttcgacctggtgatcggcggcagcccttgcaatgacctgagcatcgtgaacccagcccggaagggcctgtacgagggaaccggcagactgttcttcgagttttacagactgctgcacgacgcccggcctaaggaaggcgacgaccggcccttcttttggctgttcgagaatgtggtggccatgggagtcagcgacaagcgggatattagccggttcctggagagcaaccccgtgatgatcgatgccaaggaagtgagcgccgcccaccgggccagatacttctggggcaatctgcctggcatgaacagacccctggccagcaccgtgaacgacaagctggagctgcaggagtgcctggagcacggccggatcgccaagttcagcaaggtgagaaccatcaccacccgaagcaacagcatcaaacaaggcaaggaccagcactttcctgtgttcatgaacgagaaggaggacatcctgtggtgtaccgagatggagagagtgttcgggttcccagtccactacacagatgtcagcaacatgtctagactggccagacagagactgctgggaagaagctggtccgtccctgtgatcagacacctgttcgcccctctgaaggagtacttcgcctgcgtgagcagcggcaacagcaacgccaacagccggggccccagcttctctagcggcctggtgccactgtccctgagagggagccacatgggccccatggagatctacaaaaccgtgagcgcctggaagcggcagcctgtgcgcgtgctgagcctgtttcggaatatcgataaagtcctgaaaagcctgggattcctggagagcggctctggctccggcggtggcaccctgaagtacgtggaggatgtgacaaacgtggtcagacgggatgtggagaagtggggccccttcgatctggtgtacggcagcacccaacccctgggcagctcttgtgaccggtgccctggctggtacatgtttcagttccaccggatcctgcagtacgccctgccgagacaggagtcccagcggccattcttttggattttcatggacaacttgctgctgaccgaggatgaccaggaaactaccactcggttcctgcagaccgaagccgtgaccctgcaggacgtgagaggccgggactaccagaacgccatgcgggtgtggtccaacatccctggactgaaaagcaagcacgcacctctgacccctaaagaagaggagtacctgcaggcccaggtgcggagcagaagcaagctggacgcccctaaggtggatctgctggtgaagaattgcctcctgcccctgagagagtacttcaagtatttcagccagaatagtctgcccctgggcggcccaagcagcggcgcccctcctcccagcggcggcagcccagccggctccccaacctctaccgaggagggcacctctgagtccgccacccccgagagcggccctggcacctccaccgagcccagcgagggcagcgcacccggcagccctgccggcagccccacctccacagaggagggaaccagcaccgagcccagcgaaggcagcgccccaggcaccagcaccgagcctagtgagggcggctctggcggcggcagcgcccaggagattaaacggatcaacaagatcagaagaagacttgtgaaagacagcaacaccaagaaggccggcaagacaggccccatgaaaaccctgctggttagagtgatgacacccgatctgagagagcggctggaaaacctgagaaagaagcctgaaaatatcccccagcccatcagcaatacatctagagccaacctgaataagctgctgaccgattacaccgaaatgaagaaggcgatcctgcatgtgtactgggaagagttccagaaggaccctgtgggcctgatgagccgggtggcccagcctgccagcaagaagatcgatcagaacaagctgaaacctgagatggacgagaagggcaacctgaccaccgccggctttgcctgctctcagtgtggccagcccctgttcgtgtacaagctggagcaggtgtctgagaagggcaaggcttacaccaactacttcggacggtgcaatgtggccgagcacgaaaagctgatcctgctggcccagctgaagcccgagaaggatagcgacgaagccgtgacatatagcctgggaaagtttgggcagagggccctggatttctacagcattcatgtgaccaaggagtccacccaccccgtgaagcccctggcccagatcgccggaaacagatacgcctccggacctgtgggaaaggccctgagcgacgcatgtatgggcacaatcgcctccttcctgtctaagtaccaggacatcatcatcgaacaccagaaggtggtgaagggcaaccagaagagactggagagcctgcgggagctggccggcaaggaaaacctggaataccctagcgtgaccctgccacctcagcctcacaccaaggagggcgttgatgcctacaacgaagtgatcgcccgggtgcgaatgtgggtgaacctgaacctgtggcagaagctgaagctaagcagagatgatgccaagcctctgctgagactgaagggattcccttcctttcctctggtcgagagacaggccaacgaagtggactggtgggacatggtgtgtaacgtgaagaagctgatcaacgagaaaaaggaggatggcaaggtgttttggcagaatctggctggctacaagagacaggaagccctgagaccatacctgagcagcgaggaagatcggaagaagggaaagaaattcgctcggtaccagctgggcgacctgctgctgcacctggaaaagaagcacggcgaggactggggaaaggtgtacgacgaggcctgggagcggattgacaagaaagtggaaggcctgagcaagcacatcaagctggaagaggaacggagaagcgaggacgcccagagcaaggccgccctgaccgactggctgcgggctaaggccagcttcgtgatcgagggcctgaaggaggccgacaaggacgagttctgcagatgcgagctgaagctgcagaagtggtacggggacctgcggggaaagcccttcgccatcgaagccgagaacagcatcctggacatcagcggcttcagcaagcagtacaactgtgccttcatctggcagaaggacggcgtgaagaagctgaacctgtacctgatcatcaactacttcaagggcggcaagctgcggttcaagaagatcaaacctgaagccttcgaagccaacagattctacaccgtgatcaacaaaaagagcggcgagatcgtgcccatggaggtgaacttcaacttcgacgaccccaacctgatcatcctgcctctggcctttggcaagagacagggcagagaattcatctggaacgacctgctgtccctggaaaccggcagcctgaagctggccaacggaagagtgatcgagaagacactgtacaacagaagaacccggcaggatgagcctgccctgttcgtggccctgaccttcgagcggcgggaggtcctggactcctccaatatcaaaccaatgaacctgatcggcgtggcaagaggcgaaaacatccccgccgtgatcgccctgaccgaccccgagggctgcccactgagccggtttaaggatagcctgggaaacccaacccacatcctgagaatcggcgagagctataaggagaagcagcggaccatccaggccaagaaggaggtggagcagcggagagccggcggctacagccggaagtacgccagcaaagccaagaatctggcagacgatatggtgagaaacaccgctagagatctgctgtactacgccgtgacccaggatgccatgctgatcttcgccaacctgagccggggcttcggccggcagggcaagcggaccttcatggccgagagacagtacacacggatggaggactggctgaccgccaagctggcctacgagggcctgagcaagacctacctgtccaagacactggcccagtacacctccaagacatgcagcaactgtgggtttaccatcaccagcgccgactacgacagggtgctggagaagctgaagaagacagcaacaggctggatgaccacaattaacggcaaggagctgaaggtggagggccagattacctactacaacagatacaagagacagaacgtagtcaaggacctgtccgtcgagctggatagactgagcgaagaatctgtgaacaacgacatctcctcctggacaaagggcagaagcggagaagctctgagcctcctgaagaaaagattctcccatagacccgtgcaggagaagttcgtgtgcctgaactgcggcttcgagacacacgcagccgagcaagccgccctgaacatcgccagatcctggctgttcctgcggagccaggagtacaagaaataccagacaaacaagacaaccggcaacaccgataagagagccttcgtcgagacctggcagtccttttaccggaagaagcttaaggaggtgtggaaacctgccgtgcggtctggcggatctggcggaggctccacaagcgcccagaggcccgtgaccttcgaggacgtggccgtgtacttcagcgaggcccagggcaccctgctggaccccgaccagaaggccctgtacagggaggtgatgatggagaactacgagaacgtggccagcctgggcagcctgacccccaagcccgagctgatcatcaggctggagaggggcgaggagccctgggtgagcgaccccggcgacgcccccgtgagcggcgacttcaggaagagccacaccagccccaagaaaaagagaaaagtctaagctgccttctgcggggcttgccttctggccatgcccttcttctctcccttgcacctgtacctcttggtctttgaataaagcctgagtaggaaggctagcaaaaaaaaaaaaaaaaaaaaaaaaaaaaaaaaaaaaaaaaaaaaaaaaaaaaaaaaaaaaaaaaaaaaaaaaaaaaaaaa

SEQ ID NO: 3501 - RNA, 5419 nt, synthetic construct
  source 1..5419: mol_type = other RNA
aggaaataagagagaaaagaagagtaagaagaaatataagagccaccatggcccctaagaagaagcgtaaagtgagccgggtgaacggcagcggcagcggcggcggcatgaaccacgaccaggagttcgacccccctaaggtgtaccctcccgtccccgccgagaagagaaagcccatccgggtcctgagcctgttcgatggcatcgccaccggtctgctggtgctgaaggacctgggcatccaggtggataggtacattgcctccgaggtgtgcgaggactccatcaccgtgggaatggtgcgtcatcagggcaagatcatgtacgtgggcgacgtgcggagcgtgacacagaagcatatccaggagtggggccctttcgacctggtgatcggcggcagcccttgcaatgacctgagcatcgtgaacccagcccggaagggcctgtacgagggaaccggcagactgttcttcgagttttacagactgctgcacgacgcccggcctaaggaaggcgacgaccggcccttcttttggctgttcgagaatgtggtggccatgggagtcagcgacaagcgggatattagccggttcctggagagcaaccccgtgatgatcgatgccaaggaagtgagcgccgcccaccgggccagatacttctggggcaatctgcctggcatgaacagacccctggccagcaccgtgaacgacaagctggagctgcaggagtgcctggagcacggccggatcgccaagttcagcaaggtgagaaccatcaccacccgaagcaacagcatcaaacaaggcaaggaccagcactttcctgtgttcatgaacgagaaggaggacatcctgtggtgtaccgagatggagagagtgttcgggttcccagtccactacacagatgtcagcaacatgtctagactggccagacagagactgctgggaagaagctggtccgtccctgtgatcagacacctgttcgcccctctgaaggagtacttcgcctgcgtgagcagcggcaacagcaacgccaacagccggggccccagcttctctagcggcctggtgccactgtccctgagagggagccacatgggccccatggagatctacaaaaccgtgagcgcctggaagcggcagcctgtgcgcgtgctgagcctgtttcggaatatcgataaagtcctgaaaagcctgggattcctggagagcggctctggctccggcggtggcaccctgaagtacgtggaggatgtgacaaacgtggtcagacgggatgtggagaagtggggccccttcgatctggtgtacggcagcacccaacccctgggcagctcttgtgaccggtgccctggctggtacatgtttcagttccaccggatcctgcagtacgccctgccgagacaggagtcccagcggccattcttttggattttcatggacaacttgctgctgaccgaggatgaccaggaaactaccactcggttcctgcagaccgaagccgtgaccctgcaggacgtgagaggccgggactaccagaacgccatgcgggtgtggtccaacatccctggactgaaaagcaagcacgcacctctgacccctaaagaagaggagtacctgcaggcccaggtgcggagcagaagcaagctggacgcccctaaggtggatctgctggtgaagaattgcctcctgcccctgagagagtacttcaagtatttcagccagaatagtctgcccctgggcggcccaagcagcggcgcccctcctcccagcggcggcagcccagccggctccccaacctctaccgaggagggcacctctgagtccgccacccccgagagcggccctggcacctccaccgagcccagcgagggcagcgcacccggcagccctgccggcagccccacctccacagaggagggaaccagcaccgagcccagcgaaggcagcgccccaggcaccagcaccgagcctagtgagggcggctctggcggcggcagcgcccaggagattaaacggatcaacaagatcagaagaagacttgtgaaagacagcaacaccaagaaggccggcaagacaggccccatgaaaaccctgctggttagagtgatgacacccgatctgagagagcggctggaaaacctgagaaagaagcctgaaaatatcccccagcccatcagcaatacatctagagccaacctgaataagctgctgaccgattacaccgaaatgaagaaggcgatcctgcatgtgtactgggaagagttccagaaggaccctgtgggcctgatgagccgggtggcccagcctgccagcaagaagatcgatcagaacaagctgaaacctgagatggacgagaagggcaacctgaccaccgccggctttgcctgctctcagtgtggccagcccctgttcgtgtacaagctggagcaggtgtctgagaagggcaaggcttacaccaactacttcggacggtgcaatgtggccgagcacgaaaagctgatcctgctggcccagctgaagcccgagaaggatagcgacgaagccgtgacatatagcctgggaaagtttgggcagagggccctggatttctacagcattcatgtgaccaaggagtccacccaccccgtgaagcccctggcccagatcgccggaaacagatacgcctccggacctgtgggaaaggccctgagcgacgcatgtatgggcacaatcgcctccttcctgtctaagtaccaggacatcatcatcgaacaccagaaggtggtgaagggcaaccagaagagactggagagcctgcgggagctggccggcaaggaaaacctggaataccctagcgtgaccctgccacctcagcctcacaccaaggagggcgttgatgcctacaacgaagtgatcgcccgggtgcgaatgtgggtgaacctgaacctgtggcagaagctgaagctaagcagagatgatgccaagcctctgctgagactgaagggattcccttcctttcctctggtcgagagacaggccaacgaagtggactggtgggacatggtgtgtaacgtgaagaagctgatcaacgagaaaaaggaggatggcaaggtgttttggcagaatctggctggctacaagagacaggaagccctgagaccatacctgagcagcgaggaagatcggaagaagggaaagaaattcgctcggtaccagctgggcgacctgctgctgcacctggaaaagaagcacggcgaggactggggaaaggtgtacgacgaggcctgggagcggattgacaagaaagtggaaggcctgagcaagcacatcaagctggaagaggaacggagaagcgaggacgcccagagcaaggccgccctgaccgactggctgcgggctaaggccagcttcgtgatcgagggcctgaaggaggccgacaaggacgagttctgcagatgcgagctgaagctgcagaagtggtacggggacctgcggggaaagcccttcgccatcgaagccgagaacagcatcctggacatcagcggcttcagcaagcagtacaactgtgccttcatctggcagaaggacggcgtgaagaagctgaacctgtacctgatcatcaactacttcaagggcggcaagctgcggttcaagaagatcaaacctgaagccttcgaagccaacagattctacaccgtgatcaacaaaaagagcggcgagatcgtgcccatggaggtgaacttcaacttcgacgaccccaacctgatcatcctgcctctggcctttggcaagagacagggcagagaattcatctggaacgacctgctgtccctggaaaccggcagcctgaagctggccaacggaagagtgatcgagaagacactgtacaacagaagaacccggcaggatgagcctgccctgttcgtggccctgaccttcgagcggcgggaggtcctggactcctccaatatcaaaccaatgaacctgatcggcgtggcaagaggcgaaaacatccccgccgtgatcgccctgaccgaccccgagggctgcccactgagccggtttaaggatagcctgggaaacccaacccacatcctgagaatcggcgagagctataaggagaagcagcggaccatccaggccaagaaggaggtggagcagcggagagccggcggctacagccggaagtacgccagcaaagccaagaatctggcagacgatatggtgagaaacaccgctagagatctgctgtactacgccgtgacccaggatgccatgctgatcttcgccaacctgagccggggcttcggccggcagggcaagcggaccttcatggccgagagacagtacacacggatggaggactggctgaccgccaagctggcctacgagggcctgagcaagacctacctgtccaagacactggcccagtacacctccaagacatgcagcaactgtgggtttaccatcaccagcgccgactacgacagggtgctggagaagctgaagaagacagcaacaggctggatgaccacaattaacggcaaggagctgaaggtggagggccagattacctactacaacagatacaagagacagaacgtagtcaaggacctgtccgtcgagctggatagactgagcgaagaatctgtgaacaacgacatctcctcctggacaaagggcagaagcggagaagctctgagcctcctgaagaaaagattctcccatagacccgtgcaggagaagttcgtgtgcctgaactgcggcttcgagacacacgcagccgagcaagccgccctgaacatcgccagatcctggctgttcctgcggagccaggagtacaagaaataccagacaaacaagacaaccggcaacaccgataagagagccttcgtcgagacctggcagtccttttaccggaagaagcttaaggaggtgtggaaacctgccgtgcggtctggcggatctggcggaggctccacaagcgcccaggtgcccgtgaccttcgaggaggtggccgtgtacttcaccgccggccagggcgccctgctgggccccaaccagagggccctgtacagggacgtgatgcaggagaactacgagaccgtggccagcctgggcttcagcatccccaagcccgacctgatcacccagctggagaggggcgaggagccctgggtgcccgacctgcagcccagcaaggagatggagttcctgaggggcacctgcaccagccccaagaaaaagagaaaagtctaagctgccttctgcggggcttgccttctggccatgcccttcttctctcccttgcacctgtacctcttggtctttgaataaagcctgagtaggaaggctagcaaaaaaaaaaaaaaaaaaaaaaaaaaaaaaaaaaaaaaaaaaaaaaaaaaaaaaaaaaaaaaaaaaaaaaaaaaaaaaaa

SEQ ID NO: 3502 - RNA, 5419 nt, synthetic construct
  source 1..5419: mol_type = other RNA
aggaaataagagagaaaagaagagtaagaagaaatataagagccaccatggcccctaagaagaagcgtaaagtgagccgggtgaacggcagcggcagcggcggcggcatgaaccacgaccaggagttcgacccccctaaggtgtaccctcccgtccccgccgagaagagaaagcccatccgggtcctgagcctgttcgatggcatcgccaccggtctgctggtgctgaaggacctgggcatccaggtggataggtacattgcctccgaggtgtgcgaggactccatcaccgtgggaatggtgcgtcatcagggcaagatcatgtacgtgggcgacgtgcggagcgtgacacagaagcatatccaggagtggggccctttcgacctggtgatcggcggcagcccttgcaatgacctgagcatcgtgaacccagcccggaagggcctgtacgagggaaccggcagactgttcttcgagttttacagactgctgcacgacgcccggcctaaggaaggcgacgaccggcccttcttttggctgttcgagaatgtggtggccatgggagtcagcgacaagcgggatattagccggttcctggagagcaaccccgtgatgatcgatgccaaggaagtgagcgccgcccaccgggccagatacttctggggcaatctgcctggcatgaacagacccctggccagcaccgtgaacgacaagctggagctgcaggagtgcctggagcacggccggatcgccaagttcagcaaggtgagaaccatcaccacccgaagcaacagcatcaaacaaggcaaggaccagcactttcctgtgttcatgaacgagaaggaggacatcctgtggtgtaccgagatggagagagtgttcgggttcccagtccactacacagatgtcagcaacatgtctagactggccagacagagactgctgggaagaagctggtccgtccctgtgatcagacacctgttcgcccctctgaaggagtacttcgcctgcgtgagcagcggcaacagcaacgccaacagccggggccccagcttctctagcggcctggtgccactgtccctgagagggagccacatgggccccatggagatctacaaaaccgtgagcgcctggaagcggcagcctgtgcgcgtgctgagcctgtttcggaatatcgataaagtcctgaaaagcctgggattcctggagagcggctctggctccggcggtggcaccctgaagtacgtggaggatgtgacaaacgtggtcagacgggatgtggagaagtggggccccttcgatctggtgtacggcagcacccaacccctgggcagctcttgtgaccggtgccctggctggtacatgtttcagttccaccggatcctgcagtacgccctgccgagacaggagtcccagcggccattcttttggattttcatggacaacttgctgctgaccgaggatgaccaggaaactaccactcggttcctgcagaccgaagccgtgaccctgcaggacgtgagaggccgggactaccagaacgccatgcgggtgtggtccaacatccctggactgaaaagcaagcacgcacctctgacccctaaagaagaggagtacctgcaggcccaggtgcggagcagaagcaagctggacgcccctaaggtggatctgctggtgaagaattgcctcctgcccctgagagagtacttcaagtatttcagccagaatagtctgcccctgggcggcccaagcagcggcgcccctcctcccagcggcggcagcccagccggctccccaacctctaccgaggagggcacctctgagtccgccacccccgagagcggccctggcacctccaccgagcccagcgagggcagcgcacccggcagccctgccggcagccccacctccacagaggagggaaccagcaccgagcccagcgaaggcagcgccccaggcaccagcaccgagcctagtgagggcggctctggcggcggcagcgcccaggagattaaacggatcaacaagatcagaagaagacttgtgaaagacagcaacaccaagaaggccggcaagacaggccccatgaaaaccctgctggttagagtgatgacacccgatctgagagagcggctggaaaacctgagaaagaagcctgaaaatatcccccagcccatcagcaatacatctagagccaacctgaataagctgctgaccgattacaccgaaatgaagaaggcgatcctgcatgtgtactgggaagagttccagaaggaccctgtgggcctgatgagccgggtggcccagcctgccagcaagaagatcgatcagaacaagctgaaacctgagatggacgagaagggcaacctgaccaccgccggctttgcctgctctcagtgtggccagcccctgttcgtgtacaagctggagcaggtgtctgagaagggcaaggcttacaccaactacttcggacggtgcaatgtggccgagcacgaaaagctgatcctgctggcccagctgaagcccgagaaggatagcgacgaagccgtgacatatagcctgggaaagtttgggcagagggccctggatttctacagcattcatgtgaccaaggagtccacccaccccgtgaagcccctggcccagatcgccggaaacagatacgcctccggacctgtgggaaaggccctgagcgacgcatgtatgggcacaatcgcctccttcctgtctaagtaccaggacatcatcatcgaacaccagaaggtggtgaagggcaaccagaagagactggagagcctgcgggagctggccggcaaggaaaacctggaataccctagcgtgaccctgccacctcagcctcacaccaaggagggcgttgatgcctacaacgaagtgatcgcccgggtgcgaatgtgggtgaacctgaacctgtggcagaagctgaagctaagcagagatgatgccaagcctctgctgagactgaagggattcccttcctttcctctggtcgagagacaggccaacgaagtggactggtgggacatggtgtgtaacgtgaagaagctgatcaacgagaaaaaggaggatggcaaggtgttttggcagaatctggctggctacaagagacaggaagccctgagaccatacctgagcagcgaggaagatcggaagaagggaaagaaattcgctcggtaccagctgggcgacctgctgctgcacctggaaaagaagcacggcgaggactggggaaaggtgtacgacgaggcctgggagcggattgacaagaaagtggaaggcctgagcaagcacatcaagctggaagaggaacggagaagcgaggacgcccagagcaaggccgccctgaccgactggctgcgggctaaggccagcttcgtgatcgagggcctgaaggaggccgacaaggacgagttctgcagatgcgagctgaagctgcagaagtggtacggggacctgcggggaaagcccttcgccatcgaagccgagaacagcatcctggacatcagcggcttcagcaagcagtacaactgtgccttcatctggcagaaggacggcgtgaagaagctgaacctgtacctgatcatcaactacttcaagggcggcaagctgcggttcaagaagatcaaacctgaagccttcgaagccaacagattctacaccgtgatcaacaaaaagagcggcgagatcgtgcccatggaggtgaacttcaacttcgacgaccccaacctgatcatcctgcctctggcctttggcaagagacagggcagagaattcatctggaacgacctgctgtccctggaaaccggcagcctgaagctggccaacggaagagtgatcgagaagacactgtacaacagaagaacccggcaggatgagcctgccctgttcgtggccctgaccttcgagcggcgggaggtcctggactcctccaatatcaaaccaatgaacctgatcggcgtggcaagaggcgaaaacatccccgccgtgatcgccctgaccgaccccgagggctgcccactgagccggtttaaggatagcctgggaaacccaacccacatcctgagaatcggcgagagctataaggagaagcagcggaccatccaggccaagaaggaggtggagcagcggagagccggcggctacagccggaagtacgccagcaaagccaagaatctggcagacgatatggtgagaaacaccgctagagatctgctgtactacgccgtgacccaggatgccatgctgatcttcgccaacctgagccggggcttcggccggcagggcaagcggaccttcatggccgagagacagtacacacggatggaggactggctgaccgccaagctggcctacgagggcctgagcaagacctacctgtccaagacactggcccagtacacctccaagacatgcagcaactgtgggtttaccatcaccagcgccgactacgacagggtgctggagaagctgaagaagacagcaacaggctggatgaccacaattaacggcaaggagctgaaggtggagggccagattacctactacaacagatacaagagacagaacgtagtcaaggacctgtccgtcgagctggatagactgagcgaagaatctgtgaacaacgacatctcctcctggacaaagggcagaagcggagaagctctgagcctcctgaagaaaagattctcccatagacccgtgcaggagaagttcgtgtgcctgaactgcggcttcgagacacacgcagccgagcaagccgccctgaacatcgccagatcctggctgttcctgcggagccaggagtacaagaaataccagacaaacaagacaaccggcaacaccgataagagagccttcgtcgagacctggcagtccttttaccggaagaagcttaaggaggtgtggaaacctgccgtgcggtctggcggatctggcggaggctccacaagccccaacgccctggtgaccttccaggacgtgttcgtggacttcagccccgaggagctggccagcctgagcgccgcccagaggaggctgcacagggaggtgaccctggagaactacaggaacctggtgagcctgggctaccagttccccaggcccgacatcatcacccagctggaggaggaggagagcagcgccatggaggaggacagcaacaccaagaccggccccgactgggagaccggccccaccagccccaagaaaaagagaaaagtctaagctgccttctgcggggcttgccttctggccatgcccttcttctctcccttgcacctgtacctcttggtctttgaataaagcctgagtaggaaggctagcaaaaaaaaaaaaaaaaaaaaaaaaaaaaaaaaaaaaaaaaaaaaaaaaaaaaaaaaaaaaaaaaaaaaaaaaaaaaaaaa

SEQ ID NO: 3503 - RNA, 5419 nt, synthetic construct
  source 1..5419: mol_type = other RNA
aggaaataagagagaaaagaagagtaagaagaaatataagagccaccatggcccctaagaagaagcgtaaagtgagccgggtgaacggcagcggcagcggcggcggcatgaaccacgaccaggagttcgacccccctaaggtgtaccctcccgtccccgccgagaagagaaagcccatccgggtcctgagcctgttcgatggcatcgccaccggtctgctggtgctgaaggacctgggcatccaggtggataggtacattgcctccgaggtgtgcgaggactccatcaccgtgggaatggtgcgtcatcagggcaagatcatgtacgtgggcgacgtgcggagcgtgacacagaagcatatccaggagtggggccctttcgacctggtgatcggcggcagcccttgcaatgacctgagcatcgtgaacccagcccggaagggcctgtacgagggaaccggcagactgttcttcgagttttacagactgctgcacgacgcccggcctaaggaaggcgacgaccggcccttcttttggctgttcgagaatgtggtggccatgggagtcagcgacaagcgggatattagccggttcctggagagcaaccccgtgatgatcgatgccaaggaagtgagcgccgcccaccgggccagatacttctggggcaatctgcctggcatgaacagacccctggccagcaccgtgaacgacaagctggagctgcaggagtgcctggagcacggccggatcgccaagttcagcaaggtgagaaccatcaccacccgaagcaacagcatcaaacaaggcaaggaccagcactttcctgtgttcatgaacgagaaggaggacatcctgtggtgtaccgagatggagagagtgttcgggttcccagtccactacacagatgtcagcaacatgtctagactggccagacagagactgctgggaagaagctggtccgtccctgtgatcagacacctgttcgcccctctgaaggagtacttcgcctgcgtgagcagcggcaacagcaacgccaacagccggggccccagcttctctagcggcctggtgccactgtccctgagagggagccacatgggccccatggagatctacaaaaccgtgagcgcctggaagcggcagcctgtgcgcgtgctgagcctgtttcggaatatcgataaagtcctgaaaagcctgggattcctggagagcggctctggctccggcggtggcaccctgaagtacgtggaggatgtgacaaacgtggtcagacgggatgtggagaagtggggccccttcgatctggtgtacggcagcacccaacccctgggcagctcttgtgaccggtgccctggctggtacatgtttcagttccaccggatcctgcagtacgccctgccgagacaggagtcccagcggccattcttttggattttcatggacaacttgctgctgaccgaggatgaccaggaaactaccactcggttcctgcagaccgaagccgtgaccctgcaggacgtgagaggccgggactaccagaacgccatgcgggtgtggtccaacatccctggactgaaaagcaagcacgcacctctgacccctaaagaagaggagtacctgcaggcccaggtgcggagcagaagcaagctggacgcccctaaggtggatctgctggtgaagaattgcctcctgcccctgagagagtacttcaagtatttcagccagaatagtctgcccctgggcggcccaagcagcggcgcccctcctcccagcggcggcagcccagccggctccccaacctctaccgaggagggcacctctgagtccgccacccccgagagcggccctggcacctccaccgagcccagcgagggcagcgcacccggcagccctgccggcagccccacctccacagaggagggaaccagcaccgagcccagcgaaggcagcgccccaggcaccagcaccgagcctagtgagggcggctctggcggcggcagcgcccaggagattaaacggatcaacaagatcagaagaagacttgtgaaagacagcaacaccaagaaggccggcaagacaggccccatgaaaaccctgctggttagagtgatgacacccgatctgagagagcggctggaaaacctgagaaagaagcctgaaaatatcccccagcccatcagcaatacatctagagccaacctgaataagctgctgaccgattacaccgaaatgaagaaggcgatcctgcatgtgtactgggaagagttccagaaggaccctgtgggcctgatgagccgggtggcccagcctgccagcaagaagatcgatcagaacaagctgaaacctgagatggacgagaagggcaacctgaccaccgccggctttgcctgctctcagtgtggccagcccctgttcgtgtacaagctggagcaggtgtctgagaagggcaaggcttacaccaactacttcggacggtgcaatgtggccgagcacgaaaagctgatcctgctggcccagctgaagcccgagaaggatagcgacgaagccgtgacatatagcctgggaaagtttgggcagagggccctggatttctacagcattcatgtgaccaaggagtccacccaccccgtgaagcccctggcccagatcgccggaaacagatacgcctccggacctgtgggaaaggccctgagcgacgcatgtatgggcacaatcgcctccttcctgtctaagtaccaggacatcatcatcgaacaccagaaggtggtgaagggcaaccagaagagactggagagcctgcgggagctggccggcaaggaaaacctggaataccctagcgtgaccctgccacctcagcctcacaccaaggagggcgttgatgcctacaacgaagtgatcgcccgggtgcgaatgtgggtgaacctgaacctgtggcagaagctgaagctaagcagagatgatgccaagcctctgctgagactgaagggattcccttcctttcctctggtcgagagacaggccaacgaagtggactggtgggacatggtgtgtaacgtgaagaagctgatcaacgagaaaaaggaggatggcaaggtgttttggcagaatctggctggctacaagagacaggaagccctgagaccatacctgagcagcgaggaagatcggaagaagggaaagaaattcgctcggtaccagctgggcgacctgctgctgcacctggaaaagaagcacggcgaggactggggaaaggtgtacgacgaggcctgggagcggattgacaagaaagtggaaggcctgagcaagcacatcaagctggaagaggaacggagaagcgaggacgcccagagcaaggccgccctgaccgactggctgcgggctaaggccagcttcgtgatcgagggcctgaaggaggccgacaaggacgagttctgcagatgcgagctgaagctgcagaagtggtacggggacctgcggggaaagcccttcgccatcgaagccgagaacagcatcctggacatcagcggcttcagcaagcagtacaactgtgccttcatctggcagaaggacggcgtgaagaagctgaacctgtacctgatcatcaactacttcaagggcggcaagctgcggttcaagaagatcaaacctgaagccttcgaagccaacagattctacaccgtgatcaacaaaaagagcggcgagatcgtgcccatggaggtgaacttcaacttcgacgaccccaacctgatcatcctgcctctggcctttggcaagagacagggcagagaattcatctggaacgacctgctgtccctggaaaccggcagcctgaagctggccaacggaagagtgatcgagaagacactgtacaacagaagaacccggcaggatgagcctgccctgttcgtggccctgaccttcgagcggcgggaggtcctggactcctccaatatcaaaccaatgaacctgatcggcgtggcaagaggcgaaaacatccccgccgtgatcgccctgaccgaccccgagggctgcccactgagccggtttaaggatagcctgggaaacccaacccacatcctgagaatcggcgagagctataaggagaagcagcggaccatccaggccaagaaggaggtggagcagcggagagccggcggctacagccggaagtacgccagcaaagccaagaatctggcagacgatatggtgagaaacaccgctagagatctgctgtactacgccgtgacccaggatgccatgctgatcttcgccaacctgagccggggcttcggccggcagggcaagcggaccttcatggccgagagacagtacacacggatggaggactggctgaccgccaagctggcctacgagggcctgagcaagacctacctgtccaagacactggcccagtacacctccaagacatgcagcaactgtgggtttaccatcaccagcgccgactacgacagggtgctggagaagctgaagaagacagcaacaggctggatgaccacaattaacggcaaggagctgaaggtggagggccagattacctactacaacagatacaagagacagaacgtagtcaaggacctgtccgtcgagctggatagactgagcgaagaatctgtgaacaacgacatctcctcctggacaaagggcagaagcggagaagctctgagcctcctgaagaaaagattctcccatagacccgtgcaggagaagttcgtgtgcctgaactgcggcttcgagacacacgcagccgagcaagccgccctgaacatcgccagatcctggctgttcctgcggagccaggagtacaagaaataccagacaaacaagacaaccggcaacaccgataagagagccttcgtcgagacctggcagtccttttaccggaagaagcttaaggaggtgtggaaacctgccgtgcggtctggcggatctggcggaggctccacaagcgcccaggagagcgtgatgttcagcgacgtgagcatcgacttcagccaggaggagtgggagtgcctgaacgacgaccagagggacctgtacagggacgtgatgctggagaactacagcaacctggtgagcatgggccacagcatcagcaagcccaacgtgatcagctacctggagcagggcaaggagccctggctggtggacagggagctgaccaggggccagtggcccgtgctggagagcaggaccagccccaagaaaaagagaaaagtctaagctgccttctgcggggcttgccttctggccatgcccttcttctctcccttgcacctgtacctcttggtctttgaataaagcctgagtaggaaggctagcaaaaaaaaaaaaaaaaaaaaaaaaaaaaaaaaaaaaaaaaaaaaaaaaaaaaaaaaaaaaaaaaaaaaaaaaaaaaaaaa

SEQ ID NO: 3504 - RNA, 5419 nt, synthetic construct
  source 1..5419: mol_type = other RNA
aggaaataagagagaaaagaagagtaagaagaaatataagagccaccatggcccctaagaagaagcgtaaagtgagccgggtgaacggcagcggcagcggcggcggcatgaaccacgaccaggagttcgacccccctaaggtgtaccctcccgtccccgccgagaagagaaagcccatccgggtcctgagcctgttcgatggcatcgccaccggtctgctggtgctgaaggacctgggcatccaggtggataggtacattgcctccgaggtgtgcgaggactccatcaccgtgggaatggtgcgtcatcagggcaagatcatgtacgtgggcgacgtgcggagcgtgacacagaagcatatccaggagtggggccctttcgacctggtgatcggcggcagcccttgcaatgacctgagcatcgtgaacccagcccggaagggcctgtacgagggaaccggcagactgttcttcgagttttacagactgctgcacgacgcccggcctaaggaaggcgacgaccggcccttcttttggctgttcgagaatgtggtggccatgggagtcagcgacaagcgggatattagccggttcctggagagcaaccccgtgatgatcgatgccaaggaagtgagcgccgcccaccgggccagatacttctggggcaatctgcctggcatgaacagacccctggccagcaccgtgaacgacaagctggagctgcaggagtgcctggagcacggccggatcgccaagttcagcaaggtgagaaccatcaccacccgaagcaacagcatcaaacaaggcaaggaccagcactttcctgtgttcatgaacgagaaggaggacatcctgtggtgtaccgagatggagagagtgttcgggttcccagtccactacacagatgtcagcaacatgtctagactggccagacagagactgctgggaagaagctggtccgtccctgtgatcagacacctgttcgcccctctgaaggagtacttcgcctgcgtgagcagcggcaacagcaacgccaacagccggggccccagcttctctagcggcctggtgccactgtccctgagagggagccacatgggccccatggagatctacaaaaccgtgagcgcctggaagcggcagcctgtgcgcgtgctgagcctgtttcggaatatcgataaagtcctgaaaagcctgggattcctggagagcggctctggctccggcggtggcaccctgaagtacgtggaggatgtgacaaacgtggtcagacgggatgtggagaagtggggccccttcgatctggtgtacggcagcacccaacccctgggcagctcttgtgaccggtgccctggctggtacatgtttcagttccaccggatcctgcagtacgccctgccgagacaggagtcccagcggccattcttttggattttcatggacaacttgctgctgaccgaggatgaccaggaaactaccactcggttcctgcagaccgaagccgtgaccctgcaggacgtgagaggccgggactaccagaacgccatgcgggtgtggtccaacatccctggactgaaaagcaagcacgcacctctgacccctaaagaagaggagtacctgcaggcccaggtgcggagcagaagcaagctggacgcccctaaggtggatctgctggtgaagaattgcctcctgcccctgagagagtacttcaagtatttcagccagaatagtctgcccctgggcggcccaagcagcggcgcccctcctcccagcggcggcagcccagccggctccccaacctctaccgaggagggcacctctgagtccgccacccccgagagcggccctggcacctccaccgagcccagcgagggcagcgcacccggcagccctgccggcagccccacctccacagaggagggaaccagcaccgagcccagcgaaggcagcgccccaggcaccagcaccgagcctagtgagggcggctctggcggcggcagcgcccaggagattaaacggatcaacaagatcagaagaagacttgtgaaagacagcaacaccaagaaggccggcaagacaggccccatgaaaaccctgctggttagagtgatgacacccgatctgagagagcggctggaaaacctgagaaagaagcctgaaaatatcccccagcccatcagcaatacatctagagccaacctgaataagctgctgaccgattacaccgaaatgaagaaggcgatcctgcatgtgtactgggaagagttccagaaggaccctgtgggcctgatgagccgggtggcccagcctgccagcaagaagatcgatcagaacaagctgaaacctgagatggacgagaagggcaacctgaccaccgccggctttgcctgctctcagtgtggccagcccctgttcgtgtacaagctggagcaggtgtctgagaagggcaaggcttacaccaactacttcggacggtgcaatgtggccgagcacgaaaagctgatcctgctggcccagctgaagcccgagaaggatagcgacgaagccgtgacatatagcctgggaaagtttgggcagagggccctggatttctacagcattcatgtgaccaaggagtccacccaccccgtgaagcccctggcccagatcgccggaaacagatacgcctccggacctgtgggaaaggccctgagcgacgcatgtatgggcacaatcgcctccttcctgtctaagtaccaggacatcatcatcgaacaccagaaggtggtgaagggcaaccagaagagactggagagcctgcgggagctggccggcaaggaaaacctggaataccctagcgtgaccctgccacctcagcctcacaccaaggagggcgttgatgcctacaacgaagtgatcgcccgggtgcgaatgtgggtgaacctgaacctgtggcagaagctgaagctaagcagagatgatgccaagcctctgctgagactgaagggattcccttcctttcctctggtcgagagacaggccaacgaagtggactggtgggacatggtgtgtaacgtgaagaagctgatcaacgagaaaaaggaggatggcaaggtgttttggcagaatctggctggctacaagagacaggaagccctgagaccatacctgagcagcgaggaagatcggaagaagggaaagaaattcgctcggtaccagctgggcgacctgctgctgcacctggaaaagaagcacggcgaggactggggaaaggtgtacgacgaggcctgggagcggattgacaagaaagtggaaggcctgagcaagcacatcaagctggaagaggaacggagaagcgaggacgcccagagcaaggccgccctgaccgactggctgcgggctaaggccagcttcgtgatcgagggcctgaaggaggccgacaaggacgagttctgcagatgcgagctgaagctgcagaagtggtacggggacctgcggggaaagcccttcgccatcgaagccgagaacagcatcctggacatcagcggcttcagcaagcagtacaactgtgccttcatctggcagaaggacggcgtgaagaagctgaacctgtacctgatcatcaactacttcaagggcggcaagctgcggttcaagaagatcaaacctgaagccttcgaagccaacagattctacaccgtgatcaacaaaaagagcggcgagatcgtgcccatggaggtgaacttcaacttcgacgaccccaacctgatcatcctgcctctggcctttggcaagagacagggcagagaattcatctggaacgacctgctgtccctggaaaccggcagcctgaagctggccaacggaagagtgatcgagaagacactgtacaacagaagaacccggcaggatgagcctgccctgttcgtggccctgaccttcgagcggcgggaggtcctggactcctccaatatcaaaccaatgaacctgatcggcgtggcaagaggcgaaaacatccccgccgtgatcgccctgaccgaccccgagggctgcccactgagccggtttaaggatagcctgggaaacccaacccacatcctgagaatcggcgagagctataaggagaagcagcggaccatccaggccaagaaggaggtggagcagcggagagccggcggctacagccggaagtacgccagcaaagccaagaatctggcagacgatatggtgagaaacaccgctagagatctgctgtactacgccgtgacccaggatgccatgctgatcttcgccaacctgagccggggcttcggccggcagggcaagcggaccttcatggccgagagacagtacacacggatggaggactggctgaccgccaagctggcctacgagggcctgagcaagacctacctgtccaagacactggcccagtacacctccaagacatgcagcaactgtgggtttaccatcaccagcgccgactacgacagggtgctggagaagctgaagaagacagcaacaggctggatgaccacaattaacggcaaggagctgaaggtggagggccagattacctactacaacagatacaagagacagaacgtagtcaaggacctgtccgtcgagctggatagactgagcgaagaatctgtgaacaacgacatctcctcctggacaaagggcagaagcggagaagctctgagcctcctgaagaaaagattctcccatagacccgtgcaggagaagttcgtgtgcctgaactgcggcttcgagacacacgcagccgagcaagccgccctgaacatcgccagatcctggctgttcctgcggagccaggagtacaagaaataccagacaaacaagacaaccggcaacaccgataagagagccttcgtcgagacctggcagtccttttaccggaagaagcttaaggaggtgtggaaacctgccgtgcggtctggcggatctggcggaggctccacaagcaccatgagctgcagcagggccggcggcatcaccggctgcatcaagtacagcaccgccagcgtggccttcagggacgtggccgtggacttcacccaggaggagtggaggctgctgagccccgcccagaggaccctgcacagggaggtgatgctggagacctacaaccacctggtgagcctggagatccccagcagcaagcccaagctgatcgcccagctggagaggggcgaggagccctggaggaccagccccaagaaaaagagaaaagtctaagctgccttctgcggggcttgccttctggccatgcccttcttctctcccttgcacctgtacctcttggtctttgaataaagcctgagtaggaaggctagcaaaaaaaaaaaaaaaaaaaaaaaaaaaaaaaaaaaaaaaaaaaaaaaaaaaaaaaaaaaaaaaaaaaaaaaaaaaaaaaa

SEQ ID NO: 3505 - RNA, 5419 nt, synthetic construct
  source 1..5419: mol_type = other RNA
aggaaataagagagaaaagaagagtaagaagaaatataagagccaccatggcccctaagaagaagcgtaaagtgagccgggtgaacggcagcggcagcggcggcggcatgaaccacgaccaggagttcgacccccctaaggtgtaccctcccgtccccgccgagaagagaaagcccatccgggtcctgagcctgttcgatggcatcgccaccggtctgctggtgctgaaggacctgggcatccaggtggataggtacattgcctccgaggtgtgcgaggactccatcaccgtgggaatggtgcgtcatcagggcaagatcatgtacgtgggcgacgtgcggagcgtgacacagaagcatatccaggagtggggccctttcgacctggtgatcggcggcagcccttgcaatgacctgagcatcgtgaacccagcccggaagggcctgtacgagggaaccggcagactgttcttcgagttttacagactgctgcacgacgcccggcctaaggaaggcgacgaccggcccttcttttggctgttcgagaatgtggtggccatgggagtcagcgacaagcgggatattagccggttcctggagagcaaccccgtgatgatcgatgccaaggaagtgagcgccgcccaccgggccagatacttctggggcaatctgcctggcatgaacagacccctggccagcaccgtgaacgacaagctggagctgcaggagtgcctggagcacggccggatcgccaagttcagcaaggtgagaaccatcaccacccgaagcaacagcatcaaacaaggcaaggaccagcactttcctgtgttcatgaacgagaaggaggacatcctgtggtgtaccgagatggagagagtgttcgggttcccagtccactacacagatgtcagcaacatgtctagactggccagacagagactgctgggaagaagctggtccgtccctgtgatcagacacctgttcgcccctctgaaggagtacttcgcctgcgtgagcagcggcaacagcaacgccaacagccggggccccagcttctctagcggcctggtgccactgtccctgagagggagccacatgggccccatggagatctacaaaaccgtgagcgcctggaagcggcagcctgtgcgcgtgctgagcctgtttcggaatatcgataaagtcctgaaaagcctgggattcctggagagcggctctggctccggcggtggcaccctgaagtacgtggaggatgtgacaaacgtggtcagacgggatgtggagaagtggggccccttcgatctggtgtacggcagcacccaacccctgggcagctcttgtgaccggtgccctggctggtacatgtttcagttccaccggatcctgcagtacgccctgccgagacaggagtcccagcggccattcttttggattttcatggacaacttgctgctgaccgaggatgaccaggaaactaccactcggttcctgcagaccgaagccgtgaccctgcaggacgtgagaggccgggactaccagaacgccatgcgggtgtggtccaacatccctggactgaaaagcaagcacgcacctctgacccctaaagaagaggagtacctgcaggcccaggtgcggagcagaagcaagctggacgcccctaaggtggatctgctggtgaagaattgcctcctgcccctgagagagtacttcaagtatttcagccagaatagtctgcccctgggcggcccaagcagcggcgcccctcctcccagcggcggcagcccagccggctccccaacctctaccgaggagggcacctctgagtccgccacccccgagagcggccctggcacctccaccgagcccagcgagggcagcgcacccggcagccctgccggcagccccacctccacagaggagggaaccagcaccgagcccagcgaaggcagcgccccaggcaccagcaccgagcctagtgagggcggctctggcggcggcagcgcccaggagattaaacggatcaacaagatcagaagaagacttgtgaaagacagcaacaccaagaaggccggcaagacaggccccatgaaaaccctgctggttagagtgatgacacccgatctgagagagcggctggaaaacctgagaaagaagcctgaaaatatcccccagcccatcagcaatacatctagagccaacctgaataagctgctgaccgattacaccgaaatgaagaaggcgatcctgcatgtgtactgggaagagttccagaaggaccctgtgggcctgatgagccgggtggcccagcctgccagcaagaagatcgatcagaacaagctgaaacctgagatggacgagaagggcaacctgaccaccgccggctttgcctgctctcagtgtggccagcccctgttcgtgtacaagctggagcaggtgtctgagaagggcaaggcttacaccaactacttcggacggtgcaatgtggccgagcacgaaaagctgatcctgctggcccagctgaagcccgagaaggatagcgacgaagccgtgacatatagcctgggaaagtttgggcagagggccctggatttctacagcattcatgtgaccaaggagtccacccaccccgtgaagcccctggcccagatcgccggaaacagatacgcctccggacctgtgggaaaggccctgagcgacgcatgtatgggcacaatcgcctccttcctgtctaagtaccaggacatcatcatcgaacaccagaaggtggtgaagggcaaccagaagagactggagagcctgcgggagctggccggcaaggaaaacctggaataccctagcgtgaccctgccacctcagcctcacaccaaggagggcgttgatgcctacaacgaagtgatcgcccgggtgcgaatgtgggtgaacctgaacctgtggcagaagctgaagctaagcagagatgatgccaagcctctgctgagactgaagggattcccttcctttcctctggtcgagagacaggccaacgaagtggactggtgggacatggtgtgtaacgtgaagaagctgatcaacgagaaaaaggaggatggcaaggtgttttggcagaatctggctggctacaagagacaggaagccctgagaccatacctgagcagcgaggaagatcggaagaagggaaagaaattcgctcggtaccagctgggcgacctgctgctgcacctggaaaagaagcacggcgaggactggggaaaggtgtacgacgaggcctgggagcggattgacaagaaagtggaaggcctgagcaagcacatcaagctggaagaggaacggagaagcgaggacgcccagagcaaggccgccctgaccgactggctgcgggctaaggccagcttcgtgatcgagggcctgaaggaggccgacaaggacgagttctgcagatgcgagctgaagctgcagaagtggtacggggacctgcggggaaagcccttcgccatcgaagccgagaacagcatcctggacatcagcggcttcagcaagcagtacaactgtgccttcatctggcagaaggacggcgtgaagaagctgaacctgtacctgatcatcaactacttcaagggcggcaagctgcggttcaagaagatcaaacctgaagccttcgaagccaacagattctacaccgtgatcaacaaaaagagcggcgagatcgtgcccatggaggtgaacttcaacttcgacgaccccaacctgatcatcctgcctctggcctttggcaagagacagggcagagaattcatctggaacgacctgctgtccctggaaaccggcagcctgaagctggccaacggaagagtgatcgagaagacactgtacaacagaagaacccggcaggatgagcctgccctgttcgtggccctgaccttcgagcggcgggaggtcctggactcctccaatatcaaaccaatgaacctgatcggcgtggcaagaggcgaaaacatccccgccgtgatcgccctgaccgaccccgagggctgcccactgagccggtttaaggatagcctgggaaacccaacccacatcctgagaatcggcgagagctataaggagaagcagcggaccatccaggccaagaaggaggtggagcagcggagagccggcggctacagccggaagtacgccagcaaagccaagaatctggcagacgatatggtgagaaacaccgctagagatctgctgtactacgccgtgacccaggatgccatgctgatcttcgccaacctgagccggggcttcggccggcagggcaagcggaccttcatggccgagagacagtacacacggatggaggactggctgaccgccaagctggcctacgagggcctgagcaagacctacctgtccaagacactggcccagtacacctccaagacatgcagcaactgtgggtttaccatcaccagcgccgactacgacagggtgctggagaagctgaagaagacagcaacaggctggatgaccacaattaacggcaaggagctgaaggtggagggccagattacctactacaacagatacaagagacagaacgtagtcaaggacctgtccgtcgagctggatagactgagcgaagaatctgtgaacaacgacatctcctcctggacaaagggcagaagcggagaagctctgagcctcctgaagaaaagattctcccatagacccgtgcaggagaagttcgtgtgcctgaactgcggcttcgagacacacgcagccgagcaagccgccctgaacatcgccagatcctggctgttcctgcggagccaggagtacaagaaataccagacaaacaagacaaccggcaacaccgataagagagccttcgtcgagacctggcagtccttttaccggaagaagcttaaggaggtgtggaaacctgccgtgcggtctggcggatctggcggaggctccacaagcgacatgggcctggtgagcttcgaggacgtggccgtggacttcacctggcaggagtggcaggagctggacgccgcccagaggaccctgtacagggacgtgatgctggagaactacagcagcctggtgagcctgggcaactgcctggacaagcccgagctgatcagcaagctggagcagggcctggtgccctggagcggcgccgaggccaccgagcagtaccagcccgacgtgcacaagtggagcaccagccccaagaaaaagagaaaagtctaagctgccttctgcggggcttgccttctggccatgcccttcttctctcccttgcacctgtacctcttggtctttgaataaagcctgagtaggaaggctagcaaaaaaaaaaaaaaaaaaaaaaaaaaaaaaaaaaaaaaaaaaaaaaaaaaaaaaaaaaaaaaaaaaaaaaaaaaaaaaaa

SEQ ID NO: 3506 - RNA, 5419 nt, synthetic construct
  source 1..5419: mol_type = other RNA
aggaaataagagagaaaagaagagtaagaagaaatataagagccaccatggcccctaagaagaagcgtaaagtgagccgggtgaacggcagcggcagcggcggcggcatgaaccacgaccaggagttcgacccccctaaggtgtaccctcccgtccccgccgagaagagaaagcccatccgggtcctgagcctgttcgatggcatcgccaccggtctgctggtgctgaaggacctgggcatccaggtggataggtacattgcctccgaggtgtgcgaggactccatcaccgtgggaatggtgcgtcatcagggcaagatcatgtacgtgggcgacgtgcggagcgtgacacagaagcatatccaggagtggggccctttcgacctggtgatcggcggcagcccttgcaatgacctgagcatcgtgaacccagcccggaagggcctgtacgagggaaccggcagactgttcttcgagttttacagactgctgcacgacgcccggcctaaggaaggcgacgaccggcccttcttttggctgttcgagaatgtggtggccatgggagtcagcgacaagcgggatattagccggttcctggagagcaaccccgtgatgatcgatgccaaggaagtgagcgccgcccaccgggccagatacttctggggcaatctgcctggcatgaacagacccctggccagcaccgtgaacgacaagctggagctgcaggagtgcctggagcacggccggatcgccaagttcagcaaggtgagaaccatcaccacccgaagcaacagcatcaaacaaggcaaggaccagcactttcctgtgttcatgaacgagaaggaggacatcctgtggtgtaccgagatggagagagtgttcgggttcccagtccactacacagatgtcagcaacatgtctagactggccagacagagactgctgggaagaagctggtccgtccctgtgatcagacacctgttcgcccctctgaaggagtacttcgcctgcgtgagcagcggcaacagcaacgccaacagccggggccccagcttctctagcggcctggtgccactgtccctgagagggagccacatgggccccatggagatctacaaaaccgtgagcgcctggaagcggcagcctgtgcgcgtgctgagcctgtttcggaatatcgataaagtcctgaaaagcctgggattcctggagagcggctctggctccggcggtggcaccctgaagtacgtggaggatgtgacaaacgtggtcagacgggatgtggagaagtggggccccttcgatctggtgtacggcagcacccaacccctgggcagctcttgtgaccggtgccctggctggtacatgtttcagttccaccggatcctgcagtacgccctgccgagacaggagtcccagcggccattcttttggattttcatggacaacttgctgctgaccgaggatgaccaggaaactaccactcggttcctgcagaccgaagccgtgaccctgcaggacgtgagaggccgggactaccagaacgccatgcgggtgtggtccaacatccctggactgaaaagcaagcacgcacctctgacccctaaagaagaggagtacctgcaggcccaggtgcggagcagaagcaagctggacgcccctaaggtggatctgctggtgaagaattgcctcctgcccctgagagagtacttcaagtatttcagccagaatagtctgcccctgggcggcccaagcagcggcgcccctcctcccagcggcggcagcccagccggctccccaacctctaccgaggagggcacctctgagtccgccacccccgagagcggccctggcacctccaccgagcccagcgagggcagcgcacccggcagccctgccggcagccccacctccacagaggagggaaccagcaccgagcccagcgaaggcagcgccccaggcaccagcaccgagcctagtgagggcggctctggcggcggcagcgcccaggagattaaacggatcaacaagatcagaagaagacttgtgaaagacagcaacaccaagaaggccggcaagacaggccccatgaaaaccctgctggttagagtgatgacacccgatctgagagagcggctggaaaacctgagaaagaagcctgaaaatatcccccagcccatcagcaatacatctagagccaacctgaataagctgctgaccgattacaccgaaatgaagaaggcgatcctgcatgtgtactgggaagagttccagaaggaccctgtgggcctgatgagccgggtggcccagcctgccagcaagaagatcgatcagaacaagctgaaacctgagatggacgagaagggcaacctgaccaccgccggctttgcctgctctcagtgtggccagcccctgttcgtgtacaagctggagcaggtgtctgagaagggcaaggcttacaccaactacttcggacggtgcaatgtggccgagcacgaaaagctgatcctgctggcccagctgaagcccgagaaggatagcgacgaagccgtgacatatagcctgggaaagtttgggcagagggccctggatttctacagcattcatgtgaccaaggagtccacccaccccgtgaagcccctggcccagatcgccggaaacagatacgcctccggacctgtgggaaaggccctgagcgacgcatgtatgggcacaatcgcctccttcctgtctaagtaccaggacatcatcatcgaacaccagaaggtggtgaagggcaaccagaagagactggagagcctgcgggagctggccggcaaggaaaacctggaataccctagcgtgaccctgccacctcagcctcacaccaaggagggcgttgatgcctacaacgaagtgatcgcccgggtgcgaatgtgggtgaacctgaacctgtggcagaagctgaagctaagcagagatgatgccaagcctctgctgagactgaagggattcccttcctttcctctggtcgagagacaggccaacgaagtggactggtgggacatggtgtgtaacgtgaagaagctgatcaacgagaaaaaggaggatggcaaggtgttttggcagaatctggctggctacaagagacaggaagccctgagaccatacctgagcagcgaggaagatcggaagaagggaaagaaattcgctcggtaccagctgggcgacctgctgctgcacctggaaaagaagcacggcgaggactggggaaaggtgtacgacgaggcctgggagcggattgacaagaaagtggaaggcctgagcaagcacatcaagctggaagaggaacggagaagcgaggacgcccagagcaaggccgccctgaccgactggctgcgggctaaggccagcttcgtgatcgagggcctgaaggaggccgacaaggacgagttctgcagatgcgagctgaagctgcagaagtggtacggggacctgcggggaaagcccttcgccatcgaagccgagaacagcatcctggacatcagcggcttcagcaagcagtacaactgtgccttcatctggcagaaggacggcgtgaagaagctgaacctgtacctgatcatcaactacttcaagggcggcaagctgcggttcaagaagatcaaacctgaagccttcgaagccaacagattctacaccgtgatcaacaaaaagagcggcgagatcgtgcccatggaggtgaacttcaacttcgacgaccccaacctgatcatcctgcctctggcctttggcaagagacagggcagagaattcatctggaacgacctgctgtccctggaaaccggcagcctgaagctggccaacggaagagtgatcgagaagacactgtacaacagaagaacccggcaggatgagcctgccctgttcgtggccctgaccttcgagcggcgggaggtcctggactcctccaatatcaaaccaatgaacctgatcggcgtggcaagaggcgaaaacatccccgccgtgatcgccctgaccgaccccgagggctgcccactgagccggtttaaggatagcctgggaaacccaacccacatcctgagaatcggcgagagctataaggagaagcagcggaccatccaggccaagaaggaggtggagcagcggagagccggcggctacagccggaagtacgccagcaaagccaagaatctggcagacgatatggtgagaaacaccgctagagatctgctgtactacgccgtgacccaggatgccatgctgatcttcgccaacctgagccggggcttcggccggcagggcaagcggaccttcatggccgagagacagtacacacggatggaggactggctgaccgccaagctggcctacgagggcctgagcaagacctacctgtccaagacactggcccagtacacctccaagacatgcagcaactgtgggtttaccatcaccagcgccgactacgacagggtgctggagaagctgaagaagacagcaacaggctggatgaccacaattaacggcaaggagctgaaggtggagggccagattacctactacaacagatacaagagacagaacgtagtcaaggacctgtccgtcgagctggatagactgagcgaagaatctgtgaacaacgacatctcctcctggacaaagggcagaagcggagaagctctgagcctcctgaagaaaagattctcccatagacccgtgcaggagaagttcgtgtgcctgaactgcggcttcgagacacacgcagccgagcaagccgccctgaacatcgccagatcctggctgttcctgcggagccaggagtacaagaaataccagacaaacaagacaaccggcaacaccgataagagagccttcgtcgagacctggcagtccttttaccggaagaagcttaaggaggtgtggaaacctgccgtgcggtctggcggatctggcggaggctccacaagcagccaggtgagcgtgaccttcgaggacgtggccgtgctgttcaccagggacgagtggaagaagctggaccacagccagaggagcctgtacagggaggtgatgctggagaactacagcaacctggccagcctgggcttccccttcgccaagcccgagatgatcagcgtgctgcagcagggcgaggagccctggaaggtggagaagaggagcctgggcttcagcctgggctgcaacagcagcctgaccagccccaagaaaaagagaaaagtctaagctgccttctgcggggcttgccttctggccatgcccttcttctctcccttgcacctgtacctcttggtctttgaataaagcctgagtaggaaggctagcaaaaaaaaaaaaaaaaaaaaaaaaaaaaaaaaaaaaaaaaaaaaaaaaaaaaaaaaaaaaaaaaaaaaaaaaaaaaaaaa

SEQ ID NO: 3507 - RNA, 5419 nt, synthetic construct
  source 1..5419: mol_type = other RNA
aggaaataagagagaaaagaagagtaagaagaaatataagagccaccatggcccctaagaagaagcgtaaagtgagccgggtgaacggcagcggcagcggcggcggcatgaaccacgaccaggagttcgacccccctaaggtgtaccctcccgtccccgccgagaagagaaagcccatccgggtcctgagcctgttcgatggcatcgccaccggtctgctggtgctgaaggacctgggcatccaggtggataggtacattgcctccgaggtgtgcgaggactccatcaccgtgggaatggtgcgtcatcagggcaagatcatgtacgtgggcgacgtgcggagcgtgacacagaagcatatccaggagtggggccctttcgacctggtgatcggcggcagcccttgcaatgacctgagcatcgtgaacccagcccggaagggcctgtacgagggaaccggcagactgttcttcgagttttacagactgctgcacgacgcccggcctaaggaaggcgacgaccggcccttcttttggctgttcgagaatgtggtggccatgggagtcagcgacaagcgggatattagccggttcctggagagcaaccccgtgatgatcgatgccaaggaagtgagcgccgcccaccgggccagatacttctggggcaatctgcctggcatgaacagacccctggccagcaccgtgaacgacaagctggagctgcaggagtgcctggagcacggccggatcgccaagttcagcaaggtgagaaccatcaccacccgaagcaacagcatcaaacaaggcaaggaccagcactttcctgtgttcatgaacgagaaggaggacatcctgtggtgtaccgagatggagagagtgttcgggttcccagtccactacacagatgtcagcaacatgtctagactggccagacagagactgctgggaagaagctggtccgtccctgtgatcagacacctgttcgcccctctgaaggagtacttcgcctgcgtgagcagcggcaacagcaacgccaacagccggggccccagcttctctagcggcctggtgccactgtccctgagagggagccacatgggccccatggagatctacaaaaccgtgagcgcctggaagcggcagcctgtgcgcgtgctgagcctgtttcggaatatcgataaagtcctgaaaagcctgggattcctggagagcggctctggctccggcggtggcaccctgaagtacgtggaggatgtgacaaacgtggtcagacgggatgtggagaagtggggccccttcgatctggtgtacggcagcacccaacccctgggcagctcttgtgaccggtgccctggctggtacatgtttcagttccaccggatcctgcagtacgccctgccgagacaggagtcccagcggccattcttttggattttcatggacaacttgctgctgaccgaggatgaccaggaaactaccactcggttcctgcagaccgaagccgtgaccctgcaggacgtgagaggccgggactaccagaacgccatgcgggtgtggtccaacatccctggactgaaaagcaagcacgcacctctgacccctaaagaagaggagtacctgcaggcccaggtgcggagcagaagcaagctggacgcccctaaggtggatctgctggtgaagaattgcctcctgcccctgagagagtacttcaagtatttcagccagaatagtctgcccctgggcggcccaagcagcggcgcccctcctcccagcggcggcagcccagccggctccccaacctctaccgaggagggcacctctgagtccgccacccccgagagcggccctggcacctccaccgagcccagcgagggcagcgcacccggcagccctgccggcagccccacctccacagaggagggaaccagcaccgagcccagcgaaggcagcgccccaggcaccagcaccgagcctagtgagggcggctctggcggcggcagcgcccaggagattaaacggatcaacaagatcagaagaagacttgtgaaagacagcaacaccaagaaggccggcaagacaggccccatgaaaaccctgctggttagagtgatgacacccgatctgagagagcggctggaaaacctgagaaagaagcctgaaaatatcccccagcccatcagcaatacatctagagccaacctgaataagctgctgaccgattacaccgaaatgaagaaggcgatcctgcatgtgtactgggaagagttccagaaggaccctgtgggcctgatgagccgggtggcccagcctgccagcaagaagatcgatcagaacaagctgaaacctgagatggacgagaagggcaacctgaccaccgccggctttgcctgctctcagtgtggccagcccctgttcgtgtacaagctggagcaggtgtctgagaagggcaaggcttacaccaactacttcggacggtgcaatgtggccgagcacgaaaagctgatcctgctggcccagctgaagcccgagaaggatagcgacgaagccgtgacatatagcctgggaaagtttgggcagagggccctggatttctacagcattcatgtgaccaaggagtccacccaccccgtgaagcccctggcccagatcgccggaaacagatacgcctccggacctgtgggaaaggccctgagcgacgcatgtatgggcacaatcgcctccttcctgtctaagtaccaggacatcatcatcgaacaccagaaggtggtgaagggcaaccagaagagactggagagcctgcgggagctggccggcaaggaaaacctggaataccctagcgtgaccctgccacctcagcctcacaccaaggagggcgttgatgcctacaacgaagtgatcgcccgggtgcgaatgtgggtgaacctgaacctgtggcagaagctgaagctaagcagagatgatgccaagcctctgctgagactgaagggattcccttcctttcctctggtcgagagacaggccaacgaagtggactggtgggacatggtgtgtaacgtgaagaagctgatcaacgagaaaaaggaggatggcaaggtgttttggcagaatctggctggctacaagagacaggaagccctgagaccatacctgagcagcgaggaagatcggaagaagggaaagaaattcgctcggtaccagctgggcgacctgctgctgcacctggaaaagaagcacggcgaggactggggaaaggtgtacgacgaggcctgggagcggattgacaagaaagtggaaggcctgagcaagcacatcaagctggaagaggaacggagaagcgaggacgcccagagcaaggccgccctgaccgactggctgcgggctaaggccagcttcgtgatcgagggcctgaaggaggccgacaaggacgagttctgcagatgcgagctgaagctgcagaagtggtacggggacctgcggggaaagcccttcgccatcgaagccgagaacagcatcctggacatcagcggcttcagcaagcagtacaactgtgccttcatctggcagaaggacggcgtgaagaagctgaacctgtacctgatcatcaactacttcaagggcggcaagctgcggttcaagaagatcaaacctgaagccttcgaagccaacagattctacaccgtgatcaacaaaaagagcggcgagatcgtgcccatggaggtgaacttcaacttcgacgaccccaacctgatcatcctgcctctggcctttggcaagagacagggcagagaattcatctggaacgacctgctgtccctggaaaccggcagcctgaagctggccaacggaagagtgatcgagaagacactgtacaacagaagaacccggcaggatgagcctgccctgttcgtggccctgaccttcgagcggcgggaggtcctggactcctccaatatcaaaccaatgaacctgatcggcgtggcaagaggcgaaaacatccccgccgtgatcgccctgaccgaccccgagggctgcccactgagccggtttaaggatagcctgggaaacccaacccacatcctgagaatcggcgagagctataaggagaagcagcggaccatccaggccaagaaggaggtggagcagcggagagccggcggctacagccggaagtacgccagcaaagccaagaatctggcagacgatatggtgagaaacaccgctagagatctgctgtactacgccgtgacccaggatgccatgctgatcttcgccaacctgagccggggcttcggccggcagggcaagcggaccttcatggccgagagacagtacacacggatggaggactggctgaccgccaagctggcctacgagggcctgagcaagacctacctgtccaagacactggcccagtacacctccaagacatgcagcaactgtgggtttaccatcaccagcgccgactacgacagggtgctggagaagctgaagaagacagcaacaggctggatgaccacaattaacggcaaggagctgaaggtggagggccagattacctactacaacagatacaagagacagaacgtagtcaaggacctgtccgtcgagctggatagactgagcgaagaatctgtgaacaacgacatctcctcctggacaaagggcagaagcggagaagctctgagcctcctgaagaaaagattctcccatagacccgtgcaggagaagttcgtgtgcctgaactgcggcttcgagacacacgcagccgagcaagccgccctgaacatcgccagatcctggctgttcctgcggagccaggagtacaagaaataccagacaaacaagacaaccggcaacaccgataagagagccttcgtcgagacctggcagtccttttaccggaagaagcttaaggaggtgtggaaacctgccgtgcggtctggcggatctggcggaggctccacaagccaggaggaccccgtgaccttccaggacgtggccgtggtgttcacccaggagcagtggggctacctggaccccagccagaaggagctgtacagggacgtgatgctggagaactaccagaacctgctgtgcctgggcctggccgtgagcaagcccgaggtgatctgccagctggagcagggcgaggccccctggaggcccgagggcagggtgcccggcagcagccaccccgacggcgaggtgaggaccagccccaagaaaaagagaaaagtctaagctgccttctgcggggcttgccttctggccatgcccttcttctctcccttgcacctgtacctcttggtctttgaataaagcctgagtaggaaggctagcaaaaaaaaaaaaaaaaaaaaaaaaaaaaaaaaaaaaaaaaaaaaaaaaaaaaaaaaaaaaaaaaaaaaaaaaaaaaaaaa

SEQ ID NO: 3508 - RNA, 5419 nt, synthetic construct
  source 1..5419: mol_type = other RNA
aggaaataagagagaaaagaagagtaagaagaaatataagagccaccatggcccctaagaagaagcgtaaagtgagccgggtgaacggcagcggcagcggcggcggcatgaaccacgaccaggagttcgacccccctaaggtgtaccctcccgtccccgccgagaagagaaagcccatccgggtcctgagcctgttcgatggcatcgccaccggtctgctggtgctgaaggacctgggcatccaggtggataggtacattgcctccgaggtgtgcgaggactccatcaccgtgggaatggtgcgtcatcagggcaagatcatgtacgtgggcgacgtgcggagcgtgacacagaagcatatccaggagtggggccctttcgacctggtgatcggcggcagcccttgcaatgacctgagcatcgtgaacccagcccggaagggcctgtacgagggaaccggcagactgttcttcgagttttacagactgctgcacgacgcccggcctaaggaaggcgacgaccggcccttcttttggctgttcgagaatgtggtggccatgggagtcagcgacaagcgggatattagccggttcctggagagcaaccccgtgatgatcgatgccaaggaagtgagcgccgcccaccgggccagatacttctggggcaatctgcctggcatgaacagacccctggccagcaccgtgaacgacaagctggagctgcaggagtgcctggagcacggccggatcgccaagttcagcaaggtgagaaccatcaccacccgaagcaacagcatcaaacaaggcaaggaccagcactttcctgtgttcatgaacgagaaggaggacatcctgtggtgtaccgagatggagagagtgttcgggttcccagtccactacacagatgtcagcaacatgtctagactggccagacagagactgctgggaagaagctggtccgtccctgtgatcagacacctgttcgcccctctgaaggagtacttcgcctgcgtgagcagcggcaacagcaacgccaacagccggggccccagcttctctagcggcctggtgccactgtccctgagagggagccacatgggccccatggagatctacaaaaccgtgagcgcctggaagcggcagcctgtgcgcgtgctgagcctgtttcggaatatcgataaagtcctgaaaagcctgggattcctggagagcggctctggctccggcggtggcaccctgaagtacgtggaggatgtgacaaacgtggtcagacgggatgtggagaagtggggccccttcgatctggtgtacggcagcacccaacccctgggcagctcttgtgaccggtgccctggctggtacatgtttcagttccaccggatcctgcagtacgccctgccgagacaggagtcccagcggccattcttttggattttcatggacaacttgctgctgaccgaggatgaccaggaaactaccactcggttcctgcagaccgaagccgtgaccctgcaggacgtgagaggccgggactaccagaacgccatgcgggtgtggtccaacatccctggactgaaaagcaagcacgcacctctgacccctaaagaagaggagtacctgcaggcccaggtgcggagcagaagcaagctggacgcccctaaggtggatctgctggtgaagaattgcctcctgcccctgagagagtacttcaagtatttcagccagaatagtctgcccctgggcggcccaagcagcggcgcccctcctcccagcggcggcagcccagccggctccccaacctctaccgaggagggcacctctgagtccgccacccccgagagcggccctggcacctccaccgagcccagcgagggcagcgcacccggcagccctgccggcagccccacctccacagaggagggaaccagcaccgagcccagcgaaggcagcgccccaggcaccagcaccgagcctagtgagggcggctctggcggcggcagcgcccaggagattaaacggatcaacaagatcagaagaagacttgtgaaagacagcaacaccaagaaggccggcaagacaggccccatgaaaaccctgctggttagagtgatgacacccgatctgagagagcggctggaaaacctgagaaagaagcctgaaaatatcccccagcccatcagcaatacatctagagccaacctgaataagctgctgaccgattacaccgaaatgaagaaggcgatcctgcatgtgtactgggaagagttccagaaggaccctgtgggcctgatgagccgggtggcccagcctgccagcaagaagatcgatcagaacaagctgaaacctgagatggacgagaagggcaacctgaccaccgccggctttgcctgctctcagtgtggccagcccctgttcgtgtacaagctggagcaggtgtctgagaagggcaaggcttacaccaactacttcggacggtgcaatgtggccgagcacgaaaagctgatcctgctggcccagctgaagcccgagaaggatagcgacgaagccgtgacatatagcctgggaaagtttgggcagagggccctggatttctacagcattcatgtgaccaaggagtccacccaccccgtgaagcccctggcccagatcgccggaaacagatacgcctccggacctgtgggaaaggccctgagcgacgcatgtatgggcacaatcgcctccttcctgtctaagtaccaggacatcatcatcgaacaccagaaggtggtgaagggcaaccagaagagactggagagcctgcgggagctggccggcaaggaaaacctggaataccctagcgtgaccctgccacctcagcctcacaccaaggagggcgttgatgcctacaacgaagtgatcgcccgggtgcgaatgtgggtgaacctgaacctgtggcagaagctgaagctaagcagagatgatgccaagcctctgctgagactgaagggattcccttcctttcctctggtcgagagacaggccaacgaagtggactggtgggacatggtgtgtaacgtgaagaagctgatcaacgagaaaaaggaggatggcaaggtgttttggcagaatctggctggctacaagagacaggaagccctgagaccatacctgagcagcgaggaagatcggaagaagggaaagaaattcgctcggtaccagctgggcgacctgctgctgcacctggaaaagaagcacggcgaggactggggaaaggtgtacgacgaggcctgggagcggattgacaagaaagtggaaggcctgagcaagcacatcaagctggaagaggaacggagaagcgaggacgcccagagcaaggccgccctgaccgactggctgcgggctaaggccagcttcgtgatcgagggcctgaaggaggccgacaaggacgagttctgcagatgcgagctgaagctgcagaagtggtacggggacctgcggggaaagcccttcgccatcgaagccgagaacagcatcctggacatcagcggcttcagcaagcagtacaactgtgccttcatctggcagaaggacggcgtgaagaagctgaacctgtacctgatcatcaactacttcaagggcggcaagctgcggttcaagaagatcaaacctgaagccttcgaagccaacagattctacaccgtgatcaacaaaaagagcggcgagatcgtgcccatggaggtgaacttcaacttcgacgaccccaacctgatcatcctgcctctggcctttggcaagagacagggcagagaattcatctggaacgacctgctgtccctggaaaccggcagcctgaagctggccaacggaagagtgatcgagaagacactgtacaacagaagaacccggcaggatgagcctgccctgttcgtggccctgaccttcgagcggcgggaggtcctggactcctccaatatcaaaccaatgaacctgatcggcgtggcaagaggcgaaaacatccccgccgtgatcgccctgaccgaccccgagggctgcccactgagccggtttaaggatagcctgggaaacccaacccacatcctgagaatcggcgagagctataaggagaagcagcggaccatccaggccaagaaggaggtggagcagcggagagccggcggctacagccggaagtacgccagcaaagccaagaatctggcagacgatatggtgagaaacaccgctagagatctgctgtactacgccgtgacccaggatgccatgctgatcttcgccaacctgagccggggcttcggccggcagggcaagcggaccttcatggccgagagacagtacacacggatggaggactggctgaccgccaagctggcctacgagggcctgagcaagacctacctgtccaagacactggcccagtacacctccaagacatgcagcaactgtgggtttaccatcaccagcgccgactacgacagggtgctggagaagctgaagaagacagcaacaggctggatgaccacaattaacggcaaggagctgaaggtggagggccagattacctactacaacagatacaagagacagaacgtagtcaaggacctgtccgtcgagctggatagactgagcgaagaatctgtgaacaacgacatctcctcctggacaaagggcagaagcggagaagctctgagcctcctgaagaaaagattctcccatagacccgtgcaggagaagttcgtgtgcctgaactgcggcttcgagacacacgcagccgagcaagccgccctgaacatcgccagatcctggctgttcctgcggagccaggagtacaagaaataccagacaaacaagacaaccggcaacaccgataagagagccttcgtcgagacctggcagtccttttaccggaagaagcttaaggaggtgtggaaacctgccgtgcggtctggcggatctggcggaggctccacaagcatggacgccctgaccttcgacgacgtgcacgtgcacttcaccagggaggagtggagcctgctggaccccagccagaagaggctgtacaaggacgtgatgctggagatctacaagaacctgaccgccatcggctacaagtggaaggaccacaacgtgggcgagcacagccagaacgacaggaggtacggcaggcacgagaggagccccgccggcgagaaccacaacgagtacacccagtgcgacaccagccccaagaaaaagagaaaagtctaagctgccttctgcggggcttgccttctggccatgcccttcttctctcccttgcacctgtacctcttggtctttgaataaagcctgagtaggaaggctagcaaaaaaaaaaaaaaaaaaaaaaaaaaaaaaaaaaaaaaaaaaaaaaaaaaaaaaaaaaaaaaaaaaaaaaaaaaaaaaaa

SEQ ID NO: 3509 - RNA, 5419 nt, synthetic construct
  source 1..5419: mol_type = other RNA
aggaaataagagagaaaagaagagtaagaagaaatataagagccaccatggcccctaagaagaagcgtaaagtgagccgggtgaacggcagcggcagcggcggcggcatgaaccacgaccaggagttcgacccccctaaggtgtaccctcccgtccccgccgagaagagaaagcccatccgggtcctgagcctgttcgatggcatcgccaccggtctgctggtgctgaaggacctgggcatccaggtggataggtacattgcctccgaggtgtgcgaggactccatcaccgtgggaatggtgcgtcatcagggcaagatcatgtacgtgggcgacgtgcggagcgtgacacagaagcatatccaggagtggggccctttcgacctggtgatcggcggcagcccttgcaatgacctgagcatcgtgaacccagcccggaagggcctgtacgagggaaccggcagactgttcttcgagttttacagactgctgcacgacgcccggcctaaggaaggcgacgaccggcccttcttttggctgttcgagaatgtggtggccatgggagtcagcgacaagcgggatattagccggttcctggagagcaaccccgtgatgatcgatgccaaggaagtgagcgccgcccaccgggccagatacttctggggcaatctgcctggcatgaacagacccctggccagcaccgtgaacgacaagctggagctgcaggagtgcctggagcacggccggatcgccaagttcagcaaggtgagaaccatcaccacccgaagcaacagcatcaaacaaggcaaggaccagcactttcctgtgttcatgaacgagaaggaggacatcctgtggtgtaccgagatggagagagtgttcgggttcccagtccactacacagatgtcagcaacatgtctagactggccagacagagactgctgggaagaagctggtccgtccctgtgatcagacacctgttcgcccctctgaaggagtacttcgcctgcgtgagcagcggcaacagcaacgccaacagccggggccccagcttctctagcggcctggtgccactgtccctgagagggagccacatgggccccatggagatctacaaaaccgtgagcgcctggaagcggcagcctgtgcgcgtgctgagcctgtttcggaatatcgataaagtcctgaaaagcctgggattcctggagagcggctctggctccggcggtggcaccctgaagtacgtggaggatgtgacaaacgtggtcagacgggatgtggagaagtggggccccttcgatctggtgtacggcagcacccaacccctgggcagctcttgtgaccggtgccctggctggtacatgtttcagttccaccggatcctgcagtacgccctgccgagacaggagtcccagcggccattcttttggattttcatggacaacttgctgctgaccgaggatgaccaggaaactaccactcggttcctgcagaccgaagccgtgaccctgcaggacgtgagaggccgggactaccagaacgccatgcgggtgtggtccaacatccctggactgaaaagcaagcacgcacctctgacccctaaagaagaggagtacctgcaggcccaggtgcggagcagaagcaagctggacgcccctaaggtggatctgctggtgaagaattgcctcctgcccctgagagagtacttcaagtatttcagccagaatagtctgcccctgggcggcccaagcagcggcgcccctcctcccagcggcggcagcccagccggctccccaacctctaccgaggagggcacctctgagtccgccacccccgagagcggccctggcacctccaccgagcccagcgagggcagcgcacccggcagccctgccggcagccccacctccacagaggagggaaccagcaccgagcccagcgaaggcagcgccccaggcaccagcaccgagcctagtgagggcggctctggcggcggcagcgcccaggagattaaacggatcaacaagatcagaagaagacttgtgaaagacagcaacaccaagaaggccggcaagacaggccccatgaaaaccctgctggttagagtgatgacacccgatctgagagagcggctggaaaacctgagaaagaagcctgaaaatatcccccagcccatcagcaatacatctagagccaacctgaataagctgctgaccgattacaccgaaatgaagaaggcgatcctgcatgtgtactgggaagagttccagaaggaccctgtgggcctgatgagccgggtggcccagcctgccagcaagaagatcgatcagaacaagctgaaacctgagatggacgagaagggcaacctgaccaccgccggctttgcctgctctcagtgtggccagcccctgttcgtgtacaagctggagcaggtgtctgagaagggcaaggcttacaccaactacttcggacggtgcaatgtggccgagcacgaaaagctgatcctgctggcccagctgaagcccgagaaggatagcgacgaagccgtgacatatagcctgggaaagtttgggcagagggccctggatttctacagcattcatgtgaccaaggagtccacccaccccgtgaagcccctggcccagatcgccggaaacagatacgcctccggacctgtgggaaaggccctgagcgacgcatgtatgggcacaatcgcctccttcctgtctaagtaccaggacatcatcatcgaacaccagaaggtggtgaagggcaaccagaagagactggagagcctgcgggagctggccggcaaggaaaacctggaataccctagcgtgaccctgccacctcagcctcacaccaaggagggcgttgatgcctacaacgaagtgatcgcccgggtgcgaatgtgggtgaacctgaacctgtggcagaagctgaagctaagcagagatgatgccaagcctctgctgagactgaagggattcccttcctttcctctggtcgagagacaggccaacgaagtggactggtgggacatggtgtgtaacgtgaagaagctgatcaacgagaaaaaggaggatggcaaggtgttttggcagaatctggctggctacaagagacaggaagccctgagaccatacctgagcagcgaggaagatcggaagaagggaaagaaattcgctcggtaccagctgggcgacctgctgctgcacctggaaaagaagcacggcgaggactggggaaaggtgtacgacgaggcctgggagcggattgacaagaaagtggaaggcctgagcaagcacatcaagctggaagaggaacggagaagcgaggacgcccagagcaaggccgccctgaccgactggctgcgggctaaggccagcttcgtgatcgagggcctgaaggaggccgacaaggacgagttctgcagatgcgagctgaagctgcagaagtggtacggggacctgcggggaaagcccttcgccatcgaagccgagaacagcatcctggacatcagcggcttcagcaagcagtacaactgtgccttcatctggcagaaggacggcgtgaagaagctgaacctgtacctgatcatcaactacttcaagggcggcaagctgcggttcaagaagatcaaacctgaagccttcgaagccaacagattctacaccgtgatcaacaaaaagagcggcgagatcgtgcccatggaggtgaacttcaacttcgacgaccccaacctgatcatcctgcctctggcctttggcaagagacagggcagagaattcatctggaacgacctgctgtccctggaaaccggcagcctgaagctggccaacggaagagtgatcgagaagacactgtacaacagaagaacccggcaggatgagcctgccctgttcgtggccctgaccttcgagcggcgggaggtcctggactcctccaatatcaaaccaatgaacctgatcggcgtggcaagaggcgaaaacatccccgccgtgatcgccctgaccgaccccgagggctgcccactgagccggtttaaggatagcctgggaaacccaacccacatcctgagaatcggcgagagctataaggagaagcagcggaccatccaggccaagaaggaggtggagcagcggagagccggcggctacagccggaagtacgccagcaaagccaagaatctggcagacgatatggtgagaaacaccgctagagatctgctgtactacgccgtgacccaggatgccatgctgatcttcgccaacctgagccggggcttcggccggcagggcaagcggaccttcatggccgagagacagtacacacggatggaggactggctgaccgccaagctggcctacgagggcctgagcaagacctacctgtccaagacactggcccagtacacctccaagacatgcagcaactgtgggtttaccatcaccagcgccgactacgacagggtgctggagaagctgaagaagacagcaacaggctggatgaccacaattaacggcaaggagctgaaggtggagggccagattacctactacaacagatacaagagacagaacgtagtcaaggacctgtccgtcgagctggatagactgagcgaagaatctgtgaacaacgacatctcctcctggacaaagggcagaagcggagaagctctgagcctcctgaagaaaagattctcccatagacccgtgcaggagaagttcgtgtgcctgaactgcggcttcgagacacacgcagccgagcaagccgccctgaacatcgccagatcctggctgttcctgcggagccaggagtacaagaaataccagacaaacaagacaaccggcaacaccgataagagagccttcgtcgagacctggcagtccttttaccggaagaagcttaaggaggtgtggaaacctgccgtgcggtctggcggatctggcggaggctccacaagcagccaggagagcctgaccttcaaggacgtggccgtggacttcacccaggaggagtggggcaagctggacagcggccagaggtacctgtacagggacgtgatgctggagaactacaggaacctggtgagcctgggccaccagggcagcaagccctacgtgatcagccagctggagcagggccaggagccctggatcgtggagagggagatcagcaggggcaactgcaaggactggggcaccaggaccagccccaagaaaaagagaaaagtctaagctgccttctgcggggcttgccttctggccatgcccttcttctctcccttgcacctgtacctcttggtctttgaataaagcctgagtaggaaggctagcaaaaaaaaaaaaaaaaaaaaaaaaaaaaaaaaaaaaaaaaaaaaaaaaaaaaaaaaaaaaaaaaaaaaaaaaaaaaaaaa

SEQ ID NO: 3510 - RNA, 5419 nt, synthetic construct
  source 1..5419: mol_type = other RNA
aggaaataagagagaaaagaagagtaagaagaaatataagagccaccatggcccctaagaagaagcgtaaagtgagccgggtgaacggcagcggcagcggcggcggcatgaaccacgaccaggagttcgacccccctaaggtgtaccctcccgtccccgccgagaagagaaagcccatccgggtcctgagcctgttcgatggcatcgccaccggtctgctggtgctgaaggacctgggcatccaggtggataggtacattgcctccgaggtgtgcgaggactccatcaccgtgggaatggtgcgtcatcagggcaagatcatgtacgtgggcgacgtgcggagcgtgacacagaagcatatccaggagtggggccctttcgacctggtgatcggcggcagcccttgcaatgacctgagcatcgtgaacccagcccggaagggcctgtacgagggaaccggcagactgttcttcgagttttacagactgctgcacgacgcccggcctaaggaaggcgacgaccggcccttcttttggctgttcgagaatgtggtggccatgggagtcagcgacaagcgggatattagccggttcctggagagcaaccccgtgatgatcgatgccaaggaagtgagcgccgcccaccgggccagatacttctggggcaatctgcctggcatgaacagacccctggccagcaccgtgaacgacaagctggagctgcaggagtgcctggagcacggccggatcgccaagttcagcaaggtgagaaccatcaccacccgaagcaacagcatcaaacaaggcaaggaccagcactttcctgtgttcatgaacgagaaggaggacatcctgtggtgtaccgagatggagagagtgttcgggttcccagtccactacacagatgtcagcaacatgtctagactggccagacagagactgctgggaagaagctggtccgtccctgtgatcagacacctgttcgcccctctgaaggagtacttcgcctgcgtgagcagcggcaacagcaacgccaacagccggggccccagcttctctagcggcctggtgccactgtccctgagagggagccacatgggccccatggagatctacaaaaccgtgagcgcctggaagcggcagcctgtgcgcgtgctgagcctgtttcggaatatcgataaagtcctgaaaagcctgggattcctggagagcggctctggctccggcggtggcaccctgaagtacgtggaggatgtgacaaacgtggtcagacgggatgtggagaagtggggccccttcgatctggtgtacggcagcacccaacccctgggcagctcttgtgaccggtgccctggctggtacatgtttcagttccaccggatcctgcagtacgccctgccgagacaggagtcccagcggccattcttttggattttcatggacaacttgctgctgaccgaggatgaccaggaaactaccactcggttcctgcagaccgaagccgtgaccctgcaggacgtgagaggccgggactaccagaacgccatgcgggtgtggtccaacatccctggactgaaaagcaagcacgcacctctgacccctaaagaagaggagtacctgcaggcccaggtgcggagcagaagcaagctggacgcccctaaggtggatctgctggtgaagaattgcctcctgcccctgagagagtacttcaagtatttcagccagaatagtctgcccctgggcggcccaagcagcggcgcccctcctcccagcggcggcagcccagccggctccccaacctctaccgaggagggcacctctgagtccgccacccccgagagcggccctggcacctccaccgagcccagcgagggcagcgcacccggcagccctgccggcagccccacctccacagaggagggaaccagcaccgagcccagcgaaggcagcgccccaggcaccagcaccgagcctagtgagggcggctctggcggcggcagcgcccaggagattaaacggatcaacaagatcagaagaagacttgtgaaagacagcaacaccaagaaggccggcaagacaggccccatgaaaaccctgctggttagagtgatgacacccgatctgagagagcggctggaaaacctgagaaagaagcctgaaaatatcccccagcccatcagcaatacatctagagccaacctgaataagctgctgaccgattacaccgaaatgaagaaggcgatcctgcatgtgtactgggaagagttccagaaggaccctgtgggcctgatgagccgggtggcccagcctgccagcaagaagatcgatcagaacaagctgaaacctgagatggacgagaagggcaacctgaccaccgccggctttgcctgctctcagtgtggccagcccctgttcgtgtacaagctggagcaggtgtctgagaagggcaaggcttacaccaactacttcggacggtgcaatgtggccgagcacgaaaagctgatcctgctggcccagctgaagcccgagaaggatagcgacgaagccgtgacatatagcctgggaaagtttgggcagagggccctggatttctacagcattcatgtgaccaaggagtccacccaccccgtgaagcccctggcccagatcgccggaaacagatacgcctccggacctgtgggaaaggccctgagcgacgcatgtatgggcacaatcgcctccttcctgtctaagtaccaggacatcatcatcgaacaccagaaggtggtgaagggcaaccagaagagactggagagcctgcgggagctggccggcaaggaaaacctggaataccctagcgtgaccctgccacctcagcctcacaccaaggagggcgttgatgcctacaacgaagtgatcgcccgggtgcgaatgtgggtgaacctgaacctgtggcagaagctgaagctaagcagagatgatgccaagcctctgctgagactgaagggattcccttcctttcctctggtcgagagacaggccaacgaagtggactggtgggacatggtgtgtaacgtgaagaagctgatcaacgagaaaaaggaggatggcaaggtgttttggcagaatctggctggctacaagagacaggaagccctgagaccatacctgagcagcgaggaagatcggaagaagggaaagaaattcgctcggtaccagctgggcgacctgctgctgcacctggaaaagaagcacggcgaggactggggaaaggtgtacgacgaggcctgggagcggattgacaagaaagtggaaggcctgagcaagcacatcaagctggaagaggaacggagaagcgaggacgcccagagcaaggccgccctgaccgactggctgcgggctaaggccagcttcgtgatcgagggcctgaaggaggccgacaaggacgagttctgcagatgcgagctgaagctgcagaagtggtacggggacctgcggggaaagcccttcgccatcgaagccgagaacagcatcctggacatcagcggcttcagcaagcagtacaactgtgccttcatctggcagaaggacggcgtgaagaagctgaacctgtacctgatcatcaactacttcaagggcggcaagctgcggttcaagaagatcaaacctgaagccttcgaagccaacagattctacaccgtgatcaacaaaaagagcggcgagatcgtgcccatggaggtgaacttcaacttcgacgaccccaacctgatcatcctgcctctggcctttggcaagagacagggcagagaattcatctggaacgacctgctgtccctggaaaccggcagcctgaagctggccaacggaagagtgatcgagaagacactgtacaacagaagaacccggcaggatgagcctgccctgttcgtggccctgaccttcgagcggcgggaggtcctggactcctccaatatcaaaccaatgaacctgatcggcgtggcaagaggcgaaaacatccccgccgtgatcgccctgaccgaccccgagggctgcccactgagccggtttaaggatagcctgggaaacccaacccacatcctgagaatcggcgagagctataaggagaagcagcggaccatccaggccaagaaggaggtggagcagcggagagccggcggctacagccggaagtacgccagcaaagccaagaatctggcagacgatatggtgagaaacaccgctagagatctgctgtactacgccgtgacccaggatgccatgctgatcttcgccaacctgagccggggcttcggccggcagggcaagcggaccttcatggccgagagacagtacacacggatggaggactggctgaccgccaagctggcctacgagggcctgagcaagacctacctgtccaagacactggcccagtacacctccaagacatgcagcaactgtgggtttaccatcaccagcgccgactacgacagggtgctggagaagctgaagaagacagcaacaggctggatgaccacaattaacggcaaggagctgaaggtggagggccagattacctactacaacagatacaagagacagaacgtagtcaaggacctgtccgtcgagctggatagactgagcgaagaatctgtgaacaacgacatctcctcctggacaaagggcagaagcggagaagctctgagcctcctgaagaaaagattctcccatagacccgtgcaggagaagttcgtgtgcctgaactgcggcttcgagacacacgcagccgagcaagccgccctgaacatcgccagatcctggctgttcctgcggagccaggagtacaagaaataccagacaaacaagacaaccggcaacaccgataagagagccttcgtcgagacctggcagtccttttaccggaagaagcttaaggaggtgtggaaacctgccgtgcggtctggcggatctggcggaggctccacaagcctgcagggcctgctgaccttcagggacgtggccatcgagttcagccaggacgagtggggctgcctgaaccagagccagagggagctgtacagggacgtgatgctggagacctacggccacctgctgttcctgggcctgatcgtgagcaagccccacctggtgatcttcctggagcagaagagggagctgtgggacgtgaagaggaagaagaccgtgaggacccagaagggcgagaacaccagcaccagccccaagaaaaagagaaaagtctaagctgccttctgcggggcttgccttctggccatgcccttcttctctcccttgcacctgtacctcttggtctttgaataaagcctgagtaggaaggctagcaaaaaaaaaaaaaaaaaaaaaaaaaaaaaaaaaaaaaaaaaaaaaaaaaaaaaaaaaaaaaaaaaaaaaaaaaaaaaaaa

SEQ ID NO: 3511 - RNA, 5419 nt, synthetic construct
  source 1..5419: mol_type = other RNA
aggaaataagagagaaaagaagagtaagaagaaatataagagccaccatggcccctaagaagaagcgtaaagtgagccgggtgaacggcagcggcagcggcggcggcatgaaccacgaccaggagttcgacccccctaaggtgtaccctcccgtccccgccgagaagagaaagcccatccgggtcctgagcctgttcgatggcatcgccaccggtctgctggtgctgaaggacctgggcatccaggtggataggtacattgcctccgaggtgtgcgaggactccatcaccgtgggaatggtgcgtcatcagggcaagatcatgtacgtgggcgacgtgcggagcgtgacacagaagcatatccaggagtggggccctttcgacctggtgatcggcggcagcccttgcaatgacctgagcatcgtgaacccagcccggaagggcctgtacgagggaaccggcagactgttcttcgagttttacagactgctgcacgacgcccggcctaaggaaggcgacgaccggcccttcttttggctgttcgagaatgtggtggccatgggagtcagcgacaagcgggatattagccggttcctggagagcaaccccgtgatgatcgatgccaaggaagtgagcgccgcccaccgggccagatacttctggggcaatctgcctggcatgaacagacccctggccagcaccgtgaacgacaagctggagctgcaggagtgcctggagcacggccggatcgccaagttcagcaaggtgagaaccatcaccacccgaagcaacagcatcaaacaaggcaaggaccagcactttcctgtgttcatgaacgagaaggaggacatcctgtggtgtaccgagatggagagagtgttcgggttcccagtccactacacagatgtcagcaacatgtctagactggccagacagagactgctgggaagaagctggtccgtccctgtgatcagacacctgttcgcccctctgaaggagtacttcgcctgcgtgagcagcggcaacagcaacgccaacagccggggccccagcttctctagcggcctggtgccactgtccctgagagggagccacatgggccccatggagatctacaaaaccgtgagcgcctggaagcggcagcctgtgcgcgtgctgagcctgtttcggaatatcgataaagtcctgaaaagcctgggattcctggagagcggctctggctccggcggtggcaccctgaagtacgtggaggatgtgacaaacgtggtcagacgggatgtggagaagtggggccccttcgatctggtgtacggcagcacccaacccctgggcagctcttgtgaccggtgccctggctggtacatgtttcagttccaccggatcctgcagtacgccctgccgagacaggagtcccagcggccattcttttggattttcatggacaacttgctgctgaccgaggatgaccaggaaactaccactcggttcctgcagaccgaagccgtgaccctgcaggacgtgagaggccgggactaccagaacgccatgcgggtgtggtccaacatccctggactgaaaagcaagcacgcacctctgacccctaaagaagaggagtacctgcaggcccaggtgcggagcagaagcaagctggacgcccctaaggtggatctgctggtgaagaattgcctcctgcccctgagagagtacttcaagtatttcagccagaatagtctgcccctgggcggcccaagcagcggcgcccctcctcccagcggcggcagcccagccggctccccaacctctaccgaggagggcacctctgagtccgccacccccgagagcggccctggcacctccaccgagcccagcgagggcagcgcacccggcagccctgccggcagccccacctccacagaggagggaaccagcaccgagcccagcgaaggcagcgccccaggcaccagcaccgagcctagtgagggcggctctggcggcggcagcgcccaggagattaaacggatcaacaagatcagaagaagacttgtgaaagacagcaacaccaagaaggccggcaagacaggccccatgaaaaccctgctggttagagtgatgacacccgatctgagagagcggctggaaaacctgagaaagaagcctgaaaatatcccccagcccatcagcaatacatctagagccaacctgaataagctgctgaccgattacaccgaaatgaagaaggcgatcctgcatgtgtactgggaagagttccagaaggaccctgtgggcctgatgagccgggtggcccagcctgccagcaagaagatcgatcagaacaagctgaaacctgagatggacgagaagggcaacctgaccaccgccggctttgcctgctctcagtgtggccagcccctgttcgtgtacaagctggagcaggtgtctgagaagggcaaggcttacaccaactacttcggacggtgcaatgtggccgagcacgaaaagctgatcctgctggcccagctgaagcccgagaaggatagcgacgaagccgtgacatatagcctgggaaagtttgggcagagggccctggatttctacagcattcatgtgaccaaggagtccacccaccccgtgaagcccctggcccagatcgccggaaacagatacgcctccggacctgtgggaaaggccctgagcgacgcatgtatgggcacaatcgcctccttcctgtctaagtaccaggacatcatcatcgaacaccagaaggtggtgaagggcaaccagaagagactggagagcctgcgggagctggccggcaaggaaaacctggaataccctagcgtgaccctgccacctcagcctcacaccaaggagggcgttgatgcctacaacgaagtgatcgcccgggtgcgaatgtgggtgaacctgaacctgtggcagaagctgaagctaagcagagatgatgccaagcctctgctgagactgaagggattcccttcctttcctctggtcgagagacaggccaacgaagtggactggtgggacatggtgtgtaacgtgaagaagctgatcaacgagaaaaaggaggatggcaaggtgttttggcagaatctggctggctacaagagacaggaagccctgagaccatacctgagcagcgaggaagatcggaagaagggaaagaaattcgctcggtaccagctgggcgacctgctgctgcacctggaaaagaagcacggcgaggactggggaaaggtgtacgacgaggcctgggagcggattgacaagaaagtggaaggcctgagcaagcacatcaagctggaagaggaacggagaagcgaggacgcccagagcaaggccgccctgaccgactggctgcgggctaaggccagcttcgtgatcgagggcctgaaggaggccgacaaggacgagttctgcagatgcgagctgaagctgcagaagtggtacggggacctgcggggaaagcccttcgccatcgaagccgagaacagcatcctggacatcagcggcttcagcaagcagtacaactgtgccttcatctggcagaaggacggcgtgaagaagctgaacctgtacctgatcatcaactacttcaagggcggcaagctgcggttcaagaagatcaaacctgaagccttcgaagccaacagattctacaccgtgatcaacaaaaagagcggcgagatcgtgcccatggaggtgaacttcaacttcgacgaccccaacctgatcatcctgcctctggcctttggcaagagacagggcagagaattcatctggaacgacctgctgtccctggaaaccggcagcctgaagctggccaacggaagagtgatcgagaagacactgtacaacagaagaacccggcaggatgagcctgccctgttcgtggccctgaccttcgagcggcgggaggtcctggactcctccaatatcaaaccaatgaacctgatcggcgtggcaagaggcgaaaacatccccgccgtgatcgccctgaccgaccccgagggctgcccactgagccggtttaaggatagcctgggaaacccaacccacatcctgagaatcggcgagagctataaggagaagcagcggaccatccaggccaagaaggaggtggagcagcggagagccggcggctacagccggaagtacgccagcaaagccaagaatctggcagacgatatggtgagaaacaccgctagagatctgctgtactacgccgtgacccaggatgccatgctgatcttcgccaacctgagccggggcttcggccggcagggcaagcggaccttcatggccgagagacagtacacacggatggaggactggctgaccgccaagctggcctacgagggcctgagcaagacctacctgtccaagacactggcccagtacacctccaagacatgcagcaactgtgggtttaccatcaccagcgccgactacgacagggtgctggagaagctgaagaagacagcaacaggctggatgaccacaattaacggcaaggagctgaaggtggagggccagattacctactacaacagatacaagagacagaacgtagtcaaggacctgtccgtcgagctggatagactgagcgaagaatctgtgaacaacgacatctcctcctggacaaagggcagaagcggagaagctctgagcctcctgaagaaaagattctcccatagacccgtgcaggagaagttcgtgtgcctgaactgcggcttcgagacacacgcagccgagcaagccgccctgaacatcgccagatcctggctgttcctgcggagccaggagtacaagaaataccagacaaacaagacaaccggcaacaccgataagagagccttcgtcgagacctggcagtccttttaccggaagaagcttaaggaggtgtggaaacctgccgtgcggtctggcggatctggcggaggctccacaagcgccctggagagcgtgaccttccaggacgtggccgtgaacttcacccacgaggagtggggccacctgaagcccgcccagaaggacctgtacagggaggtgatgatggagaactaccagaacttcgtgagcctgggcctgcccttcagcaagccccacgtgatcagccagctggagaagggcgaggccccctggatcaccgagaaggccagcctggtgcccagggtgagctgccaggacttcttcaccagccccaagaaaaagagaaaagtctaagctgccttctgcggggcttgccttctggccatgcccttcttctctcccttgcacctgtacctcttggtctttgaataaagcctgagtaggaaggctagcaaaaaaaaaaaaaaaaaaaaaaaaaaaaaaaaaaaaaaaaaaaaaaaaaaaaaaaaaaaaaaaaaaaaaaaaaaaaaaaa

SEQ ID NO: 3512 - RNA, 5419 nt, synthetic construct
  source 1..5419: mol_type = other RNA
aggaaataagagagaaaagaagagtaagaagaaatataagagccaccatggcccctaagaagaagcgtaaagtgagccgggtgaacggcagcggcagcggcggcggcatgaaccacgaccaggagttcgacccccctaaggtgtaccctcccgtccccgccgagaagagaaagcccatccgggtcctgagcctgttcgatggcatcgccaccggtctgctggtgctgaaggacctgggcatccaggtggataggtacattgcctccgaggtgtgcgaggactccatcaccgtgggaatggtgcgtcatcagggcaagatcatgtacgtgggcgacgtgcggagcgtgacacagaagcatatccaggagtggggccctttcgacctggtgatcggcggcagcccttgcaatgacctgagcatcgtgaacccagcccggaagggcctgtacgagggaaccggcagactgttcttcgagttttacagactgctgcacgacgcccggcctaaggaaggcgacgaccggcccttcttttggctgttcgagaatgtggtggccatgggagtcagcgacaagcgggatattagccggttcctggagagcaaccccgtgatgatcgatgccaaggaagtgagcgccgcccaccgggccagatacttctggggcaatctgcctggcatgaacagacccctggccagcaccgtgaacgacaagctggagctgcaggagtgcctggagcacggccggatcgccaagttcagcaaggtgagaaccatcaccacccgaagcaacagcatcaaacaaggcaaggaccagcactttcctgtgttcatgaacgagaaggaggacatcctgtggtgtaccgagatggagagagtgttcgggttcccagtccactacacagatgtcagcaacatgtctagactggccagacagagactgctgggaagaagctggtccgtccctgtgatcagacacctgttcgcccctctgaaggagtacttcgcctgcgtgagcagcggcaacagcaacgccaacagccggggccccagcttctctagcggcctggtgccactgtccctgagagggagccacatgggccccatggagatctacaaaaccgtgagcgcctggaagcggcagcctgtgcgcgtgctgagcctgtttcggaatatcgataaagtcctgaaaagcctgggattcctggagagcggctctggctccggcggtggcaccctgaagtacgtggaggatgtgacaaacgtggtcagacgggatgtggagaagtggggccccttcgatctggtgtacggcagcacccaacccctgggcagctcttgtgaccggtgccctggctggtacatgtttcagttccaccggatcctgcagtacgccctgccgagacaggagtcccagcggccattcttttggattttcatggacaacttgctgctgaccgaggatgaccaggaaactaccactcggttcctgcagaccgaagccgtgaccctgcaggacgtgagaggccgggactaccagaacgccatgcgggtgtggtccaacatccctggactgaaaagcaagcacgcacctctgacccctaaagaagaggagtacctgcaggcccaggtgcggagcagaagcaagctggacgcccctaaggtggatctgctggtgaagaattgcctcctgcccctgagagagtacttcaagtatttcagccagaatagtctgcccctgggcggcccaagcagcggcgcccctcctcccagcggcggcagcccagccggctccccaacctctaccgaggagggcacctctgagtccgccacccccgagagcggccctggcacctccaccgagcccagcgagggcagcgcacccggcagccctgccggcagccccacctccacagaggagggaaccagcaccgagcccagcgaaggcagcgccccaggcaccagcaccgagcctagtgagggcggctctggcggcggcagcgcccaggagattaaacggatcaacaagatcagaagaagacttgtgaaagacagcaacaccaagaaggccggcaagacaggccccatgaaaaccctgctggttagagtgatgacacccgatctgagagagcggctggaaaacctgagaaagaagcctgaaaatatcccccagcccatcagcaatacatctagagccaacctgaataagctgctgaccgattacaccgaaatgaagaaggcgatcctgcatgtgtactgggaagagttccagaaggaccctgtgggcctgatgagccgggtggcccagcctgccagcaagaagatcgatcagaacaagctgaaacctgagatggacgagaagggcaacctgaccaccgccggctttgcctgctctcagtgtggccagcccctgttcgtgtacaagctggagcaggtgtctgagaagggcaaggcttacaccaactacttcggacggtgcaatgtggccgagcacgaaaagctgatcctgctggcccagctgaagcccgagaaggatagcgacgaagccgtgacatatagcctgggaaagtttgggcagagggccctggatttctacagcattcatgtgaccaaggagtccacccaccccgtgaagcccctggcccagatcgccggaaacagatacgcctccggacctgtgggaaaggccctgagcgacgcatgtatgggcacaatcgcctccttcctgtctaagtaccaggacatcatcatcgaacaccagaaggtggtgaagggcaaccagaagagactggagagcctgcgggagctggccggcaaggaaaacctggaataccctagcgtgaccctgccacctcagcctcacaccaaggagggcgttgatgcctacaacgaagtgatcgcccgggtgcgaatgtgggtgaacctgaacctgtggcagaagctgaagctaagcagagatgatgccaagcctctgctgagactgaagggattcccttcctttcctctggtcgagagacaggccaacgaagtggactggtgggacatggtgtgtaacgtgaagaagctgatcaacgagaaaaaggaggatggcaaggtgttttggcagaatctggctggctacaagagacaggaagccctgagaccatacctgagcagcgaggaagatcggaagaagggaaagaaattcgctcggtaccagctgggcgacctgctgctgcacctggaaaagaagcacggcgaggactggggaaaggtgtacgacgaggcctgggagcggattgacaagaaagtggaaggcctgagcaagcacatcaagctggaagaggaacggagaagcgaggacgcccagagcaaggccgccctgaccgactggctgcgggctaaggccagcttcgtgatcgagggcctgaaggaggccgacaaggacgagttctgcagatgcgagctgaagctgcagaagtggtacggggacctgcggggaaagcccttcgccatcgaagccgagaacagcatcctggacatcagcggcttcagcaagcagtacaactgtgccttcatctggcagaaggacggcgtgaagaagctgaacctgtacctgatcatcaactacttcaagggcggcaagctgcggttcaagaagatcaaacctgaagccttcgaagccaacagattctacaccgtgatcaacaaaaagagcggcgagatcgtgcccatggaggtgaacttcaacttcgacgaccccaacctgatcatcctgcctctggcctttggcaagagacagggcagagaattcatctggaacgacctgctgtccctggaaaccggcagcctgaagctggccaacggaagagtgatcgagaagacactgtacaacagaagaacccggcaggatgagcctgccctgttcgtggccctgaccttcgagcggcgggaggtcctggactcctccaatatcaaaccaatgaacctgatcggcgtggcaagaggcgaaaacatccccgccgtgatcgccctgaccgaccccgagggctgcccactgagccggtttaaggatagcctgggaaacccaacccacatcctgagaatcggcgagagctataaggagaagcagcggaccatccaggccaagaaggaggtggagcagcggagagccggcggctacagccggaagtacgccagcaaagccaagaatctggcagacgatatggtgagaaacaccgctagagatctgctgtactacgccgtgacccaggatgccatgctgatcttcgccaacctgagccggggcttcggccggcagggcaagcggaccttcatggccgagagacagtacacacggatggaggactggctgaccgccaagctggcctacgagggcctgagcaagacctacctgtccaagacactggcccagtacacctccaagacatgcagcaactgtgggtttaccatcaccagcgccgactacgacagggtgctggagaagctgaagaagacagcaacaggctggatgaccacaattaacggcaaggagctgaaggtggagggccagattacctactacaacagatacaagagacagaacgtagtcaaggacctgtccgtcgagctggatagactgagcgaagaatctgtgaacaacgacatctcctcctggacaaagggcagaagcggagaagctctgagcctcctgaagaaaagattctcccatagacccgtgcaggagaagttcgtgtgcctgaactgcggcttcgagacacacgcagccgagcaagccgccctgaacatcgccagatcctggctgttcctgcggagccaggagtacaagaaataccagacaaacaagacaaccggcaacaccgataagagagccttcgtcgagacctggcagtccttttaccggaagaagcttaaggaggtgtggaaacctgccgtgcggtctggcggatctggcggaggctccacaagcaggaccggccccctgaccttcggcgacgtggccgtggagttcagcggcgaggagtgggcctggctggacagcgcccagaggagcctgcacaggagcgtgatgctggagaactacaggaacctggccagcctgggcctgtgcatgagcaagcccgagatgatcagcagcctggagcagagcaaggagccctgggccgtgaaggccaagagcaccaggggcaggtgccccgacctgaacctgtgcaccagccccaagaaaaagagaaaagtctaagctgccttctgcggggcttgccttctggccatgcccttcttctctcccttgcacctgtacctcttggtctttgaataaagcctgagtaggaaggctagcaaaaaaaaaaaaaaaaaaaaaaaaaaaaaaaaaaaaaaaaaaaaaaaaaaaaaaaaaaaaaaaaaaaaaaaaaaaaaaaa

SEQ ID NO: 3513 - RNA, 5419 nt, synthetic construct
  source 1..5419: mol_type = other RNA
aggaaataagagagaaaagaagagtaagaagaaatataagagccaccatggcccctaagaagaagcgtaaagtgagccgggtgaacggcagcggcagcggcggcggcatgaaccacgaccaggagttcgacccccctaaggtgtaccctcccgtccccgccgagaagagaaagcccatccgggtcctgagcctgttcgatggcatcgccaccggtctgctggtgctgaaggacctgggcatccaggtggataggtacattgcctccgaggtgtgcgaggactccatcaccgtgggaatggtgcgtcatcagggcaagatcatgtacgtgggcgacgtgcggagcgtgacacagaagcatatccaggagtggggccctttcgacctggtgatcggcggcagcccttgcaatgacctgagcatcgtgaacccagcccggaagggcctgtacgagggaaccggcagactgttcttcgagttttacagactgctgcacgacgcccggcctaaggaaggcgacgaccggcccttcttttggctgttcgagaatgtggtggccatgggagtcagcgacaagcgggatattagccggttcctggagagcaaccccgtgatgatcgatgccaaggaagtgagcgccgcccaccgggccagatacttctggggcaatctgcctggcatgaacagacccctggccagcaccgtgaacgacaagctggagctgcaggagtgcctggagcacggccggatcgccaagttcagcaaggtgagaaccatcaccacccgaagcaacagcatcaaacaaggcaaggaccagcactttcctgtgttcatgaacgagaaggaggacatcctgtggtgtaccgagatggagagagtgttcgggttcccagtccactacacagatgtcagcaacatgtctagactggccagacagagactgctgggaagaagctggtccgtccctgtgatcagacacctgttcgcccctctgaaggagtacttcgcctgcgtgagcagcggcaacagcaacgccaacagccggggccccagcttctctagcggcctggtgccactgtccctgagagggagccacatgggccccatggagatctacaaaaccgtgagcgcctggaagcggcagcctgtgcgcgtgctgagcctgtttcggaatatcgataaagtcctgaaaagcctgggattcctggagagcggctctggctccggcggtggcaccctgaagtacgtggaggatgtgacaaacgtggtcagacgggatgtggagaagtggggccccttcgatctggtgtacggcagcacccaacccctgggcagctcttgtgaccggtgccctggctggtacatgtttcagttccaccggatcctgcagtacgccctgccgagacaggagtcccagcggccattcttttggattttcatggacaacttgctgctgaccgaggatgaccaggaaactaccactcggttcctgcagaccgaagccgtgaccctgcaggacgtgagaggccgggactaccagaacgccatgcgggtgtggtccaacatccctggactgaaaagcaagcacgcacctctgacccctaaagaagaggagtacctgcaggcccaggtgcggagcagaagcaagctggacgcccctaaggtggatctgctggtgaagaattgcctcctgcccctgagagagtacttcaagtatttcagccagaatagtctgcccctgggcggcccaagcagcggcgcccctcctcccagcggcggcagcccagccggctccccaacctctaccgaggagggcacctctgagtccgccacccccgagagcggccctggcacctccaccgagcccagcgagggcagcgcacccggcagccctgccggcagccccacctccacagaggagggaaccagcaccgagcccagcgaaggcagcgccccaggcaccagcaccgagcctagtgagggcggctctggcggcggcagcgcccaggagattaaacggatcaacaagatcagaagaagacttgtgaaagacagcaacaccaagaaggccggcaagacaggccccatgaaaaccctgctggttagagtgatgacacccgatctgagagagcggctggaaaacctgagaaagaagcctgaaaatatcccccagcccatcagcaatacatctagagccaacctgaataagctgctgaccgattacaccgaaatgaagaaggcgatcctgcatgtgtactgggaagagttccagaaggaccctgtgggcctgatgagccgggtggcccagcctgccagcaagaagatcgatcagaacaagctgaaacctgagatggacgagaagggcaacctgaccaccgccggctttgcctgctctcagtgtggccagcccctgttcgtgtacaagctggagcaggtgtctgagaagggcaaggcttacaccaactacttcggacggtgcaatgtggccgagcacgaaaagctgatcctgctggcccagctgaagcccgagaaggatagcgacgaagccgtgacatatagcctgggaaagtttgggcagagggccctggatttctacagcattcatgtgaccaaggagtccacccaccccgtgaagcccctggcccagatcgccggaaacagatacgcctccggacctgtgggaaaggccctgagcgacgcatgtatgggcacaatcgcctccttcctgtctaagtaccaggacatcatcatcgaacaccagaaggtggtgaagggcaaccagaagagactggagagcctgcgggagctggccggcaaggaaaacctggaataccctagcgtgaccctgccacctcagcctcacaccaaggagggcgttgatgcctacaacgaagtgatcgcccgggtgcgaatgtgggtgaacctgaacctgtggcagaagctgaagctaagcagagatgatgccaagcctctgctgagactgaagggattcccttcctttcctctggtcgagagacaggccaacgaagtggactggtgggacatggtgtgtaacgtgaagaagctgatcaacgagaaaaaggaggatggcaaggtgttttggcagaatctggctggctacaagagacaggaagccctgagaccatacctgagcagcgaggaagatcggaagaagggaaagaaattcgctcggtaccagctgggcgacctgctgctgcacctggaaaagaagcacggcgaggactggggaaaggtgtacgacgaggcctgggagcggattgacaagaaagtggaaggcctgagcaagcacatcaagctggaagaggaacggagaagcgaggacgcccagagcaaggccgccctgaccgactggctgcgggctaaggccagcttcgtgatcgagggcctgaaggaggccgacaaggacgagttctgcagatgcgagctgaagctgcagaagtggtacggggacctgcggggaaagcccttcgccatcgaagccgagaacagcatcctggacatcagcggcttcagcaagcagtacaactgtgccttcatctggcagaaggacggcgtgaagaagctgaacctgtacctgatcatcaactacttcaagggcggcaagctgcggttcaagaagatcaaacctgaagccttcgaagccaacagattctacaccgtgatcaacaaaaagagcggcgagatcgtgcccatggaggtgaacttcaacttcgacgaccccaacctgatcatcctgcctctggcctttggcaagagacagggcagagaattcatctggaacgacctgctgtccctggaaaccggcagcctgaagctggccaacggaagagtgatcgagaagacactgtacaacagaagaacccggcaggatgagcctgccctgttcgtggccctgaccttcgagcggcgggaggtcctggactcctccaatatcaaaccaatgaacctgatcggcgtggcaagaggcgaaaacatccccgccgtgatcgccctgaccgaccccgagggctgcccactgagccggtttaaggatagcctgggaaacccaacccacatcctgagaatcggcgagagctataaggagaagcagcggaccatccaggccaagaaggaggtggagcagcggagagccggcggctacagccggaagtacgccagcaaagccaagaatctggcagacgatatggtgagaaacaccgctagagatctgctgtactacgccgtgacccaggatgccatgctgatcttcgccaacctgagccggggcttcggccggcagggcaagcggaccttcatggccgagagacagtacacacggatggaggactggctgaccgccaagctggcctacgagggcctgagcaagacctacctgtccaagacactggcccagtacacctccaagacatgcagcaactgtgggtttaccatcaccagcgccgactacgacagggtgctggagaagctgaagaagacagcaacaggctggatgaccacaattaacggcaaggagctgaaggtggagggccagattacctactacaacagatacaagagacagaacgtagtcaaggacctgtccgtcgagctggatagactgagcgaagaatctgtgaacaacgacatctcctcctggacaaagggcagaagcggagaagctctgagcctcctgaagaaaagattctcccatagacccgtgcaggagaagttcgtgtgcctgaactgcggcttcgagacacacgcagccgagcaagccgccctgaacatcgccagatcctggctgttcctgcggagccaggagtacaagaaataccagacaaacaagacaaccggcaacaccgataagagagccttcgtcgagacctggcagtccttttaccggaagaagcttaaggaggtgtggaaacctgccgtgcggtctggcggatctggcggaggctccacaagcatgggccccctgcagttcaaggacgtggccatcgagttcagcctggaggagtggcactgcctggacaccgcccagaggaacctgtacagggacgtgatgctggagaactacaggaacctggtgttcctgggcatcgtggtgagcaagcccgacctgatcgccaggctggagcagggcaagaagcccctgaccatgaagaggcacgagatggtggccaaccccagcggccccggcgtggtggtgaccagccccaagaaaaagagaaaagtctaagctgccttctgcggggcttgccttctggccatgcccttcttctctcccttgcacctgtacctcttggtctttgaataaagcctgagtaggaaggctagcaaaaaaaaaaaaaaaaaaaaaaaaaaaaaaaaaaaaaaaaaaaaaaaaaaaaaaaaaaaaaaaaaaaaaaaaaaaaaaaa

SEQ ID NO: 3514 - RNA, 5419 nt, synthetic construct
  source 1..5419: mol_type = other RNA
aggaaataagagagaaaagaagagtaagaagaaatataagagccaccatggcccctaagaagaagcgtaaagtgagccgggtgaacggcagcggcagcggcggcggcatgaaccacgaccaggagttcgacccccctaaggtgtaccctcccgtccccgccgagaagagaaagcccatccgggtcctgagcctgttcgatggcatcgccaccggtctgctggtgctgaaggacctgggcatccaggtggataggtacattgcctccgaggtgtgcgaggactccatcaccgtgggaatggtgcgtcatcagggcaagatcatgtacgtgggcgacgtgcggagcgtgacacagaagcatatccaggagtggggccctttcgacctggtgatcggcggcagcccttgcaatgacctgagcatcgtgaacccagcccggaagggcctgtacgagggaaccggcagactgttcttcgagttttacagactgctgcacgacgcccggcctaaggaaggcgacgaccggcccttcttttggctgttcgagaatgtggtggccatgggagtcagcgacaagcgggatattagccggttcctggagagcaaccccgtgatgatcgatgccaaggaagtgagcgccgcccaccgggccagatacttctggggcaatctgcctggcatgaacagacccctggccagcaccgtgaacgacaagctggagctgcaggagtgcctggagcacggccggatcgccaagttcagcaaggtgagaaccatcaccacccgaagcaacagcatcaaacaaggcaaggaccagcactttcctgtgttcatgaacgagaaggaggacatcctgtggtgtaccgagatggagagagtgttcgggttcccagtccactacacagatgtcagcaacatgtctagactggccagacagagactgctgggaagaagctggtccgtccctgtgatcagacacctgttcgcccctctgaaggagtacttcgcctgcgtgagcagcggcaacagcaacgccaacagccggggccccagcttctctagcggcctggtgccactgtccctgagagggagccacatgggccccatggagatctacaaaaccgtgagcgcctggaagcggcagcctgtgcgcgtgctgagcctgtttcggaatatcgataaagtcctgaaaagcctgggattcctggagagcggctctggctccggcggtggcaccctgaagtacgtggaggatgtgacaaacgtggtcagacgggatgtggagaagtggggccccttcgatctggtgtacggcagcacccaacccctgggcagctcttgtgaccggtgccctggctggtacatgtttcagttccaccggatcctgcagtacgccctgccgagacaggagtcccagcggccattcttttggattttcatggacaacttgctgctgaccgaggatgaccaggaaactaccactcggttcctgcagaccgaagccgtgaccctgcaggacgtgagaggccgggactaccagaacgccatgcgggtgtggtccaacatccctggactgaaaagcaagcacgcacctctgacccctaaagaagaggagtacctgcaggcccaggtgcggagcagaagcaagctggacgcccctaaggtggatctgctggtgaagaattgcctcctgcccctgagagagtacttcaagtatttcagccagaatagtctgcccctgggcggcccaagcagcggcgcccctcctcccagcggcggcagcccagccggctccccaacctctaccgaggagggcacctctgagtccgccacccccgagagcggccctggcacctccaccgagcccagcgagggcagcgcacccggcagccctgccggcagccccacctccacagaggagggaaccagcaccgagcccagcgaaggcagcgccccaggcaccagcaccgagcctagtgagggcggctctggcggcggcagcgcccaggagattaaacggatcaacaagatcagaagaagacttgtgaaagacagcaacaccaagaaggccggcaagacaggccccatgaaaaccctgctggttagagtgatgacacccgatctgagagagcggctggaaaacctgagaaagaagcctgaaaatatcccccagcccatcagcaatacatctagagccaacctgaataagctgctgaccgattacaccgaaatgaagaaggcgatcctgcatgtgtactgggaagagttccagaaggaccctgtgggcctgatgagccgggtggcccagcctgccagcaagaagatcgatcagaacaagctgaaacctgagatggacgagaagggcaacctgaccaccgccggctttgcctgctctcagtgtggccagcccctgttcgtgtacaagctggagcaggtgtctgagaagggcaaggcttacaccaactacttcggacggtgcaatgtggccgagcacgaaaagctgatcctgctggcccagctgaagcccgagaaggatagcgacgaagccgtgacatatagcctgggaaagtttgggcagagggccctggatttctacagcattcatgtgaccaaggagtccacccaccccgtgaagcccctggcccagatcgccggaaacagatacgcctccggacctgtgggaaaggccctgagcgacgcatgtatgggcacaatcgcctccttcctgtctaagtaccaggacatcatcatcgaacaccagaaggtggtgaagggcaaccagaagagactggagagcctgcgggagctggccggcaaggaaaacctggaataccctagcgtgaccctgccacctcagcctcacaccaaggagggcgttgatgcctacaacgaagtgatcgcccgggtgcgaatgtgggtgaacctgaacctgtggcagaagctgaagctaagcagagatgatgccaagcctctgctgagactgaagggattcccttcctttcctctggtcgagagacaggccaacgaagtggactggtgggacatggtgtgtaacgtgaagaagctgatcaacgagaaaaaggaggatggcaaggtgttttggcagaatctggctggctacaagagacaggaagccctgagaccatacctgagcagcgaggaagatcggaagaagggaaagaaattcgctcggtaccagctgggcgacctgctgctgcacctggaaaagaagcacggcgaggactggggaaaggtgtacgacgaggcctgggagcggattgacaagaaagtggaaggcctgagcaagcacatcaagctggaagaggaacggagaagcgaggacgcccagagcaaggccgccctgaccgactggctgcgggctaaggccagcttcgtgatcgagggcctgaaggaggccgacaaggacgagttctgcagatgcgagctgaagctgcagaagtggtacggggacctgcggggaaagcccttcgccatcgaagccgagaacagcatcctggacatcagcggcttcagcaagcagtacaactgtgccttcatctggcagaaggacggcgtgaagaagctgaacctgtacctgatcatcaactacttcaagggcggcaagctgcggttcaagaagatcaaacctgaagccttcgaagccaacagattctacaccgtgatcaacaaaaagagcggcgagatcgtgcccatggaggtgaacttcaacttcgacgaccccaacctgatcatcctgcctctggcctttggcaagagacagggcagagaattcatctggaacgacctgctgtccctggaaaccggcagcctgaagctggccaacggaagagtgatcgagaagacactgtacaacagaagaacccggcaggatgagcctgccctgttcgtggccctgaccttcgagcggcgggaggtcctggactcctccaatatcaaaccaatgaacctgatcggcgtggcaagaggcgaaaacatccccgccgtgatcgccctgaccgaccccgagggctgcccactgagccggtttaaggatagcctgggaaacccaacccacatcctgagaatcggcgagagctataaggagaagcagcggaccatccaggccaagaaggaggtggagcagcggagagccggcggctacagccggaagtacgccagcaaagccaagaatctggcagacgatatggtgagaaacaccgctagagatctgctgtactacgccgtgacccaggatgccatgctgatcttcgccaacctgagccggggcttcggccggcagggcaagcggaccttcatggccgagagacagtacacacggatggaggactggctgaccgccaagctggcctacgagggcctgagcaagacctacctgtccaagacactggcccagtacacctccaagacatgcagcaactgtgggtttaccatcaccagcgccgactacgacagggtgctggagaagctgaagaagacagcaacaggctggatgaccacaattaacggcaaggagctgaaggtggagggccagattacctactacaacagatacaagagacagaacgtagtcaaggacctgtccgtcgagctggatagactgagcgaagaatctgtgaacaacgacatctcctcctggacaaagggcagaagcggagaagctctgagcctcctgaagaaaagattctcccatagacccgtgcaggagaagttcgtgtgcctgaactgcggcttcgagacacacgcagccgagcaagccgccctgaacatcgccagatcctggctgttcctgcggagccaggagtacaagaaataccagacaaacaagacaaccggcaacaccgataagagagccttcgtcgagacctggcagtccttttaccggaagaagcttaaggaggtgtggaaacctgccgtgcggtctggcggatctggcggaggctccacaagcgcccacatgagcctgagcttcagggacgtggccatcgacctgagccaggaggagtgggagtgcctggaccccgtgcagagggccctgtacagggacgtgatgctggagaactacagcaacctggtgagcctgggctgcagcagccccaagcccgacgtgatcaccctgctggagcaggagagggagccctggaccgtgatgagggagggcaccaggagctggtacaccgacctggagagcaagaccagccccaagaaaaagagaaaagtctaagctgccttctgcggggcttgccttctggccatgcccttcttctctcccttgcacctgtacctcttggtctttgaataaagcctgagtaggaaggctagcaaaaaaaaaaaaaaaaaaaaaaaaaaaaaaaaaaaaaaaaaaaaaaaaaaaaaaaaaaaaaaaaaaaaaaaaaaaaaaaa

SEQ ID NO: 3515 - RNA, 5419 nt, synthetic construct
  source 1..5419: mol_type = other RNA
aggaaataagagagaaaagaagagtaagaagaaatataagagccaccatggcccctaagaagaagcgtaaagtgagccgggtgaacggcagcggcagcggcggcggcatgaaccacgaccaggagttcgacccccctaaggtgtaccctcccgtccccgccgagaagagaaagcccatccgggtcctgagcctgttcgatggcatcgccaccggtctgctggtgctgaaggacctgggcatccaggtggataggtacattgcctccgaggtgtgcgaggactccatcaccgtgggaatggtgcgtcatcagggcaagatcatgtacgtgggcgacgtgcggagcgtgacacagaagcatatccaggagtggggccctttcgacctggtgatcggcggcagcccttgcaatgacctgagcatcgtgaacccagcccggaagggcctgtacgagggaaccggcagactgttcttcgagttttacagactgctgcacgacgcccggcctaaggaaggcgacgaccggcccttcttttggctgttcgagaatgtggtggccatgggagtcagcgacaagcgggatattagccggttcctggagagcaaccccgtgatgatcgatgccaaggaagtgagcgccgcccaccgggccagatacttctggggcaatctgcctggcatgaacagacccctggccagcaccgtgaacgacaagctggagctgcaggagtgcctggagcacggccggatcgccaagttcagcaaggtgagaaccatcaccacccgaagcaacagcatcaaacaaggcaaggaccagcactttcctgtgttcatgaacgagaaggaggacatcctgtggtgtaccgagatggagagagtgttcgggttcccagtccactacacagatgtcagcaacatgtctagactggccagacagagactgctgggaagaagctggtccgtccctgtgatcagacacctgttcgcccctctgaaggagtacttcgcctgcgtgagcagcggcaacagcaacgccaacagccggggccccagcttctctagcggcctggtgccactgtccctgagagggagccacatgggccccatggagatctacaaaaccgtgagcgcctggaagcggcagcctgtgcgcgtgctgagcctgtttcggaatatcgataaagtcctgaaaagcctgggattcctggagagcggctctggctccggcggtggcaccctgaagtacgtggaggatgtgacaaacgtggtcagacgggatgtggagaagtggggccccttcgatctggtgtacggcagcacccaacccctgggcagctcttgtgaccggtgccctggctggtacatgtttcagttccaccggatcctgcagtacgccctgccgagacaggagtcccagcggccattcttttggattttcatggacaacttgctgctgaccgaggatgaccaggaaactaccactcggttcctgcagaccgaagccgtgaccctgcaggacgtgagaggccgggactaccagaacgccatgcgggtgtggtccaacatccctggactgaaaagcaagcacgcacctctgacccctaaagaagaggagtacctgcaggcccaggtgcggagcagaagcaagctggacgcccctaaggtggatctgctggtgaagaattgcctcctgcccctgagagagtacttcaagtatttcagccagaatagtctgcccctgggcggcccaagcagcggcgcccctcctcccagcggcggcagcccagccggctccccaacctctaccgaggagggcacctctgagtccgccacccccgagagcggccctggcacctccaccgagcccagcgagggcagcgcacccggcagccctgccggcagccccacctccacagaggagggaaccagcaccgagcccagcgaaggcagcgccccaggcaccagcaccgagcctagtgagggcggctctggcggcggcagcgcccaggagattaaacggatcaacaagatcagaagaagacttgtgaaagacagcaacaccaagaaggccggcaagacaggccccatgaaaaccctgctggttagagtgatgacacccgatctgagagagcggctggaaaacctgagaaagaagcctgaaaatatcccccagcccatcagcaatacatctagagccaacctgaataagctgctgaccgattacaccgaaatgaagaaggcgatcctgcatgtgtactgggaagagttccagaaggaccctgtgggcctgatgagccgggtggcccagcctgccagcaagaagatcgatcagaacaagctgaaacctgagatggacgagaagggcaacctgaccaccgccggctttgcctgctctcagtgtggccagcccctgttcgtgtacaagctggagcaggtgtctgagaagggcaaggcttacaccaactacttcggacggtgcaatgtggccgagcacgaaaagctgatcctgctggcccagctgaagcccgagaaggatagcgacgaagccgtgacatatagcctgggaaagtttgggcagagggccctggatttctacagcattcatgtgaccaaggagtccacccaccccgtgaagcccctggcccagatcgccggaaacagatacgcctccggacctgtgggaaaggccctgagcgacgcatgtatgggcacaatcgcctccttcctgtctaagtaccaggacatcatcatcgaacaccagaaggtggtgaagggcaaccagaagagactggagagcctgcgggagctggccggcaaggaaaacctggaataccctagcgtgaccctgccacctcagcctcacaccaaggagggcgttgatgcctacaacgaagtgatcgcccgggtgcgaatgtgggtgaacctgaacctgtggcagaagctgaagctaagcagagatgatgccaagcctctgctgagactgaagggattcccttcctttcctctggtcgagagacaggccaacgaagtggactggtgggacatggtgtgtaacgtgaagaagctgatcaacgagaaaaaggaggatggcaaggtgttttggcagaatctggctggctacaagagacaggaagccctgagaccatacctgagcagcgaggaagatcggaagaagggaaagaaattcgctcggtaccagctgggcgacctgctgctgcacctggaaaagaagcacggcgaggactggggaaaggtgtacgacgaggcctgggagcggattgacaagaaagtggaaggcctgagcaagcacatcaagctggaagaggaacggagaagcgaggacgcccagagcaaggccgccctgaccgactggctgcgggctaaggccagcttcgtgatcgagggcctgaaggaggccgacaaggacgagttctgcagatgcgagctgaagctgcagaagtggtacggggacctgcggggaaagcccttcgccatcgaagccgagaacagcatcctggacatcagcggcttcagcaagcagtacaactgtgccttcatctggcagaaggacggcgtgaagaagctgaacctgtacctgatcatcaactacttcaagggcggcaagctgcggttcaagaagatcaaacctgaagccttcgaagccaacagattctacaccgtgatcaacaaaaagagcggcgagatcgtgcccatggaggtgaacttcaacttcgacgaccccaacctgatcatcctgcctctggcctttggcaagagacagggcagagaattcatctggaacgacctgctgtccctggaaaccggcagcctgaagctggccaacggaagagtgatcgagaagacactgtacaacagaagaacccggcaggatgagcctgccctgttcgtggccctgaccttcgagcggcgggaggtcctggactcctccaatatcaaaccaatgaacctgatcggcgtggcaagaggcgaaaacatccccgccgtgatcgccctgaccgaccccgagggctgcccactgagccggtttaaggatagcctgggaaacccaacccacatcctgagaatcggcgagagctataaggagaagcagcggaccatccaggccaagaaggaggtggagcagcggagagccggcggctacagccggaagtacgccagcaaagccaagaatctggcagacgatatggtgagaaacaccgctagagatctgctgtactacgccgtgacccaggatgccatgctgatcttcgccaacctgagccggggcttcggccggcagggcaagcggaccttcatggccgagagacagtacacacggatggaggactggctgaccgccaagctggcctacgagggcctgagcaagacctacctgtccaagacactggcccagtacacctccaagacatgcagcaactgtgggtttaccatcaccagcgccgactacgacagggtgctggagaagctgaagaagacagcaacaggctggatgaccacaattaacggcaaggagctgaaggtggagggccagattacctactacaacagatacaagagacagaacgtagtcaaggacctgtccgtcgagctggatagactgagcgaagaatctgtgaacaacgacatctcctcctggacaaagggcagaagcggagaagctctgagcctcctgaagaaaagattctcccatagacccgtgcaggagaagttcgtgtgcctgaactgcggcttcgagacacacgcagccgagcaagccgccctgaacatcgccagatcctggctgttcctgcggagccaggagtacaagaaataccagacaaacaagacaaccggcaacaccgataagagagccttcgtcgagacctggcagtccttttaccggaagaagcttaaggaggtgtggaaacctgccgtgcggtctggcggatctggcggaggctccacaagccaccaggaggtggtgaccttcgaggacgtggccgtgtacttcacccagaccgagtgggccggcctgagccccgcccagagggccctgtacaggagcgtgatgctggagatctacggcaacctgaccagcctgggctaccccgtgcccaagcccgccctggtgagcctgctggagaggggcgacctgccctggggcctggagaccagggacgacccccccgcccagggcaccaaggacatctgcaccagccccaagaaaaagagaaaagtctaagctgccttctgcggggcttgccttctggccatgcccttcttctctcccttgcacctgtacctcttggtctttgaataaagcctgagtaggaaggctagcaaaaaaaaaaaaaaaaaaaaaaaaaaaaaaaaaaaaaaaaaaaaaaaaaaaaaaaaaaaaaaaaaaaaaaaaaaaaaaaa

SEQ ID NO: 3516 - RNA, 5419 nt, synthetic construct
  source 1..5419: mol_type = other RNA
aggaaataagagagaaaagaagagtaagaagaaatataagagccaccatggcccctaagaagaagcgtaaagtgagccgggtgaacggcagcggcagcggcggcggcatgaaccacgaccaggagttcgacccccctaaggtgtaccctcccgtccccgccgagaagagaaagcccatccgggtcctgagcctgttcgatggcatcgccaccggtctgctggtgctgaaggacctgggcatccaggtggataggtacattgcctccgaggtgtgcgaggactccatcaccgtgggaatggtgcgtcatcagggcaagatcatgtacgtgggcgacgtgcggagcgtgacacagaagcatatccaggagtggggccctttcgacctggtgatcggcggcagcccttgcaatgacctgagcatcgtgaacccagcccggaagggcctgtacgagggaaccggcagactgttcttcgagttttacagactgctgcacgacgcccggcctaaggaaggcgacgaccggcccttcttttggctgttcgagaatgtggtggccatgggagtcagcgacaagcgggatattagccggttcctggagagcaaccccgtgatgatcgatgccaaggaagtgagcgccgcccaccgggccagatacttctggggcaatctgcctggcatgaacagacccctggccagcaccgtgaacgacaagctggagctgcaggagtgcctggagcacggccggatcgccaagttcagcaaggtgagaaccatcaccacccgaagcaacagcatcaaacaaggcaaggaccagcactttcctgtgttcatgaacgagaaggaggacatcctgtggtgtaccgagatggagagagtgttcgggttcccagtccactacacagatgtcagcaacatgtctagactggccagacagagactgctgggaagaagctggtccgtccctgtgatcagacacctgttcgcccctctgaaggagtacttcgcctgcgtgagcagcggcaacagcaacgccaacagccggggccccagcttctctagcggcctggtgccactgtccctgagagggagccacatgggccccatggagatctacaaaaccgtgagcgcctggaagcggcagcctgtgcgcgtgctgagcctgtttcggaatatcgataaagtcctgaaaagcctgggattcctggagagcggctctggctccggcggtggcaccctgaagtacgtggaggatgtgacaaacgtggtcagacgggatgtggagaagtggggccccttcgatctggtgtacggcagcacccaacccctgggcagctcttgtgaccggtgccctggctggtacatgtttcagttccaccggatcctgcagtacgccctgccgagacaggagtcccagcggccattcttttggattttcatggacaacttgctgctgaccgaggatgaccaggaaactaccactcggttcctgcagaccgaagccgtgaccctgcaggacgtgagaggccgggactaccagaacgccatgcgggtgtggtccaacatccctggactgaaaagcaagcacgcacctctgacccctaaagaagaggagtacctgcaggcccaggtgcggagcagaagcaagctggacgcccctaaggtggatctgctggtgaagaattgcctcctgcccctgagagagtacttcaagtatttcagccagaatagtctgcccctgggcggcccaagcagcggcgcccctcctcccagcggcggcagcccagccggctccccaacctctaccgaggagggcacctctgagtccgccacccccgagagcggccctggcacctccaccgagcccagcgagggcagcgcacccggcagccctgccggcagccccacctccacagaggagggaaccagcaccgagcccagcgaaggcagcgccccaggcaccagcaccgagcctagtgagggcggctctggcggcggcagcgcccaggagattaaacggatcaacaagatcagaagaagacttgtgaaagacagcaacaccaagaaggccggcaagacaggccccatgaaaaccctgctggttagagtgatgacacccgatctgagagagcggctggaaaacctgagaaagaagcctgaaaatatcccccagcccatcagcaatacatctagagccaacctgaataagctgctgaccgattacaccgaaatgaagaaggcgatcctgcatgtgtactgggaagagttccagaaggaccctgtgggcctgatgagccgggtggcccagcctgccagcaagaagatcgatcagaacaagctgaaacctgagatggacgagaagggcaacctgaccaccgccggctttgcctgctctcagtgtggccagcccctgttcgtgtacaagctggagcaggtgtctgagaagggcaaggcttacaccaactacttcggacggtgcaatgtggccgagcacgaaaagctgatcctgctggcccagctgaagcccgagaaggatagcgacgaagccgtgacatatagcctgggaaagtttgggcagagggccctggatttctacagcattcatgtgaccaaggagtccacccaccccgtgaagcccctggcccagatcgccggaaacagatacgcctccggacctgtgggaaaggccctgagcgacgcatgtatgggcacaatcgcctccttcctgtctaagtaccaggacatcatcatcgaacaccagaaggtggtgaagggcaaccagaagagactggagagcctgcgggagctggccggcaaggaaaacctggaataccctagcgtgaccctgccacctcagcctcacaccaaggagggcgttgatgcctacaacgaagtgatcgcccgggtgcgaatgtgggtgaacctgaacctgtggcagaagctgaagctaagcagagatgatgccaagcctctgctgagactgaagggattcccttcctttcctctggtcgagagacaggccaacgaagtggactggtgggacatggtgtgtaacgtgaagaagctgatcaacgagaaaaaggaggatggcaaggtgttttggcagaatctggctggctacaagagacaggaagccctgagaccatacctgagcagcgaggaagatcggaagaagggaaagaaattcgctcggtaccagctgggcgacctgctgctgcacctggaaaagaagcacggcgaggactggggaaaggtgtacgacgaggcctgggagcggattgacaagaaagtggaaggcctgagcaagcacatcaagctggaagaggaacggagaagcgaggacgcccagagcaaggccgccctgaccgactggctgcgggctaaggccagcttcgtgatcgagggcctgaaggaggccgacaaggacgagttctgcagatgcgagctgaagctgcagaagtggtacggggacctgcggggaaagcccttcgccatcgaagccgagaacagcatcctggacatcagcggcttcagcaagcagtacaactgtgccttcatctggcagaaggacggcgtgaagaagctgaacctgtacctgatcatcaactacttcaagggcggcaagctgcggttcaagaagatcaaacctgaagccttcgaagccaacagattctacaccgtgatcaacaaaaagagcggcgagatcgtgcccatggaggtgaacttcaacttcgacgaccccaacctgatcatcctgcctctggcctttggcaagagacagggcagagaattcatctggaacgacctgctgtccctggaaaccggcagcctgaagctggccaacggaagagtgatcgagaagacactgtacaacagaagaacccggcaggatgagcctgccctgttcgtggccctgaccttcgagcggcgggaggtcctggactcctccaatatcaaaccaatgaacctgatcggcgtggcaagaggcgaaaacatccccgccgtgatcgccctgaccgaccccgagggctgcccactgagccggtttaaggatagcctgggaaacccaacccacatcctgagaatcggcgagagctataaggagaagcagcggaccatccaggccaagaaggaggtggagcagcggagagccggcggctacagccggaagtacgccagcaaagccaagaatctggcagacgatatggtgagaaacaccgctagagatctgctgtactacgccgtgacccaggatgccatgctgatcttcgccaacctgagccggggcttcggccggcagggcaagcggaccttcatggccgagagacagtacacacggatggaggactggctgaccgccaagctggcctacgagggcctgagcaagacctacctgtccaagacactggcccagtacacctccaagacatgcagcaactgtgggtttaccatcaccagcgccgactacgacagggtgctggagaagctgaagaagacagcaacaggctggatgaccacaattaacggcaaggagctgaaggtggagggccagattacctactacaacagatacaagagacagaacgtagtcaaggacctgtccgtcgagctggatagactgagcgaagaatctgtgaacaacgacatctcctcctggacaaagggcagaagcggagaagctctgagcctcctgaagaaaagattctcccatagacccgtgcaggagaagttcgtgtgcctgaactgcggcttcgagacacacgcagccgagcaagccgccctgaacatcgccagatcctggctgttcctgcggagccaggagtacaagaaataccagacaaacaagacaaccggcaacaccgataagagagccttcgtcgagacctggcagtccttttaccggaagaagcttaaggaggtgtggaaacctgccgtgcggtctggcggatctggcggaggctccacaagcgagcccggcgccgtgagcttcggcgacgtggccgtgtacttcagcagggaggagtggggctgcctgaggcccgcccagagggccctgtacagggacgtgatgagggagacctacagccacctgggcgccctgggcgtgggcggcagcaagcccgccctgatcagctggatggaggaggaggccgagctgtgggtgcccgccgcccaggaccccgaggtggccaagtgccccaccgaggccgacaccagccccaagaaaaagagaaaagtctaagctgccttctgcggggcttgccttctggccatgcccttcttctctcccttgcacctgtacctcttggtctttgaataaagcctgagtaggaaggctagcaaaaaaaaaaaaaaaaaaaaaaaaaaaaaaaaaaaaaaaaaaaaaaaaaaaaaaaaaaaaaaaaaaaaaaaaaaaaaaaa

SEQ ID NO: 3517 - RNA, 5419 nt, synthetic construct
  source 1..5419: mol_type = other RNA
aggaaataagagagaaaagaagagtaagaagaaatataagagccaccatggcccctaagaagaagcgtaaagtgagccgggtgaacggcagcggcagcggcggcggcatgaaccacgaccaggagttcgacccccctaaggtgtaccctcccgtccccgccgagaagagaaagcccatccgggtcctgagcctgttcgatggcatcgccaccggtctgctggtgctgaaggacctgggcatccaggtggataggtacattgcctccgaggtgtgcgaggactccatcaccgtgggaatggtgcgtcatcagggcaagatcatgtacgtgggcgacgtgcggagcgtgacacagaagcatatccaggagtggggccctttcgacctggtgatcggcggcagcccttgcaatgacctgagcatcgtgaacccagcccggaagggcctgtacgagggaaccggcagactgttcttcgagttttacagactgctgcacgacgcccggcctaaggaaggcgacgaccggcccttcttttggctgttcgagaatgtggtggccatgggagtcagcgacaagcgggatattagccggttcctggagagcaaccccgtgatgatcgatgccaaggaagtgagcgccgcccaccgggccagatacttctggggcaatctgcctggcatgaacagacccctggccagcaccgtgaacgacaagctggagctgcaggagtgcctggagcacggccggatcgccaagttcagcaaggtgagaaccatcaccacccgaagcaacagcatcaaacaaggcaaggaccagcactttcctgtgttcatgaacgagaaggaggacatcctgtggtgtaccgagatggagagagtgttcgggttcccagtccactacacagatgtcagcaacatgtctagactggccagacagagactgctgggaagaagctggtccgtccctgtgatcagacacctgttcgcccctctgaaggagtacttcgcctgcgtgagcagcggcaacagcaacgccaacagccggggccccagcttctctagcggcctggtgccactgtccctgagagggagccacatgggccccatggagatctacaaaaccgtgagcgcctggaagcggcagcctgtgcgcgtgctgagcctgtttcggaatatcgataaagtcctgaaaagcctgggattcctggagagcggctctggctccggcggtggcaccctgaagtacgtggaggatgtgacaaacgtggtcagacgggatgtggagaagtggggccccttcgatctggtgtacggcagcacccaacccctgggcagctcttgtgaccggtgccctggctggtacatgtttcagttccaccggatcctgcagtacgccctgccgagacaggagtcccagcggccattcttttggattttcatggacaacttgctgctgaccgaggatgaccaggaaactaccactcggttcctgcagaccgaagccgtgaccctgcaggacgtgagaggccgggactaccagaacgccatgcgggtgtggtccaacatccctggactgaaaagcaagcacgcacctctgacccctaaagaagaggagtacctgcaggcccaggtgcggagcagaagcaagctggacgcccctaaggtggatctgctggtgaagaattgcctcctgcccctgagagagtacttcaagtatttcagccagaatagtctgcccctgggcggcccaagcagcggcgcccctcctcccagcggcggcagcccagccggctccccaacctctaccgaggagggcacctctgagtccgccacccccgagagcggccctggcacctccaccgagcccagcgagggcagcgcacccggcagccctgccggcagccccacctccacagaggagggaaccagcaccgagcccagcgaaggcagcgccccaggcaccagcaccgagcctagtgagggcggctctggcggcggcagcgcccaggagattaaacggatcaacaagatcagaagaagacttgtgaaagacagcaacaccaagaaggccggcaagacaggccccatgaaaaccctgctggttagagtgatgacacccgatctgagagagcggctggaaaacctgagaaagaagcctgaaaatatcccccagcccatcagcaatacatctagagccaacctgaataagctgctgaccgattacaccgaaatgaagaaggcgatcctgcatgtgtactgggaagagttccagaaggaccctgtgggcctgatgagccgggtggcccagcctgccagcaagaagatcgatcagaacaagctgaaacctgagatggacgagaagggcaacctgaccaccgccggctttgcctgctctcagtgtggccagcccctgttcgtgtacaagctggagcaggtgtctgagaagggcaaggcttacaccaactacttcggacggtgcaatgtggccgagcacgaaaagctgatcctgctggcccagctgaagcccgagaaggatagcgacgaagccgtgacatatagcctgggaaagtttgggcagagggccctggatttctacagcattcatgtgaccaaggagtccacccaccccgtgaagcccctggcccagatcgccggaaacagatacgcctccggacctgtgggaaaggccctgagcgacgcatgtatgggcacaatcgcctccttcctgtctaagtaccaggacatcatcatcgaacaccagaaggtggtgaagggcaaccagaagagactggagagcctgcgggagctggccggcaaggaaaacctggaataccctagcgtgaccctgccacctcagcctcacaccaaggagggcgttgatgcctacaacgaagtgatcgcccgggtgcgaatgtgggtgaacctgaacctgtggcagaagctgaagctaagcagagatgatgccaagcctctgctgagactgaagggattcccttcctttcctctggtcgagagacaggccaacgaagtggactggtgggacatggtgtgtaacgtgaagaagctgatcaacgagaaaaaggaggatggcaaggtgttttggcagaatctggctggctacaagagacaggaagccctgagaccatacctgagcagcgaggaagatcggaagaagggaaagaaattcgctcggtaccagctgggcgacctgctgctgcacctggaaaagaagcacggcgaggactggggaaaggtgtacgacgaggcctgggagcggattgacaagaaagtggaaggcctgagcaagcacatcaagctggaagaggaacggagaagcgaggacgcccagagcaaggccgccctgaccgactggctgcgggctaaggccagcttcgtgatcgagggcctgaaggaggccgacaaggacgagttctgcagatgcgagctgaagctgcagaagtggtacggggacctgcggggaaagcccttcgccatcgaagccgagaacagcatcctggacatcagcggcttcagcaagcagtacaactgtgccttcatctggcagaaggacggcgtgaagaagctgaacctgtacctgatcatcaactacttcaagggcggcaagctgcggttcaagaagatcaaacctgaagccttcgaagccaacagattctacaccgtgatcaacaaaaagagcggcgagatcgtgcccatggaggtgaacttcaacttcgacgaccccaacctgatcatcctgcctctggcctttggcaagagacagggcagagaattcatctggaacgacctgctgtccctggaaaccggcagcctgaagctggccaacggaagagtgatcgagaagacactgtacaacagaagaacccggcaggatgagcctgccctgttcgtggccctgaccttcgagcggcgggaggtcctggactcctccaatatcaaaccaatgaacctgatcggcgtggcaagaggcgaaaacatccccgccgtgatcgccctgaccgaccccgagggctgcccactgagccggtttaaggatagcctgggaaacccaacccacatcctgagaatcggcgagagctataaggagaagcagcggaccatccaggccaagaaggaggtggagcagcggagagccggcggctacagccggaagtacgccagcaaagccaagaatctggcagacgatatggtgagaaacaccgctagagatctgctgtactacgccgtgacccaggatgccatgctgatcttcgccaacctgagccggggcttcggccggcagggcaagcggaccttcatggccgagagacagtacacacggatggaggactggctgaccgccaagctggcctacgagggcctgagcaagacctacctgtccaagacactggcccagtacacctccaagacatgcagcaactgtgggtttaccatcaccagcgccgactacgacagggtgctggagaagctgaagaagacagcaacaggctggatgaccacaattaacggcaaggagctgaaggtggagggccagattacctactacaacagatacaagagacagaacgtagtcaaggacctgtccgtcgagctggatagactgagcgaagaatctgtgaacaacgacatctcctcctggacaaagggcagaagcggagaagctctgagcctcctgaagaaaagattctcccatagacccgtgcaggagaagttcgtgtgcctgaactgcggcttcgagacacacgcagccgagcaagccgccctgaacatcgccagatcctggctgttcctgcggagccaggagtacaagaaataccagacaaacaagacaaccggcaacaccgataagagagccttcgtcgagacctggcagtccttttaccggaagaagcttaaggaggtgtggaaacctgccgtgcggtctggcggatctggcggaggctccacaagcgcccagggccccgtgaccttcgaggaggtggccgtgtacttcaccagggaggagggcgccctgctggaccccacccagagggccctgtacagggacgtgatgcaggagaactacgagaccgtggtgctgctgggcttccccgtgagcaagcccgacgtgatcagccagctggagcagggcgaggagccctggatccccgacctgcagggcagcgagaaggaggtgctgcccagggccgcctgcaccagccccaagaaaaagagaaaagtctaagctgccttctgcggggcttgccttctggccatgcccttcttctctcccttgcacctgtacctcttggtctttgaataaagcctgagtaggaaggctagcaaaaaaaaaaaaaaaaaaaaaaaaaaaaaaaaaaaaaaaaaaaaaaaaaaaaaaaaaaaaaaaaaaaaaaaaaaaaaaaa

SEQ ID NO: 3518 - RNA, 5419 nt, synthetic construct
  source 1..5419: mol_type = other RNA
aggaaataagagagaaaagaagagtaagaagaaatataagagccaccatggcccctaagaagaagcgtaaagtgagccgggtgaacggcagcggcagcggcggcggcatgaaccacgaccaggagttcgacccccctaaggtgtaccctcccgtccccgccgagaagagaaagcccatccgggtcctgagcctgttcgatggcatcgccaccggtctgctggtgctgaaggacctgggcatccaggtggataggtacattgcctccgaggtgtgcgaggactccatcaccgtgggaatggtgcgtcatcagggcaagatcatgtacgtgggcgacgtgcggagcgtgacacagaagcatatccaggagtggggccctttcgacctggtgatcggcggcagcccttgcaatgacctgagcatcgtgaacccagcccggaagggcctgtacgagggaaccggcagactgttcttcgagttttacagactgctgcacgacgcccggcctaaggaaggcgacgaccggcccttcttttggctgttcgagaatgtggtggccatgggagtcagcgacaagcgggatattagccggttcctggagagcaaccccgtgatgatcgatgccaaggaagtgagcgccgcccaccgggccagatacttctggggcaatctgcctggcatgaacagacccctggccagcaccgtgaacgacaagctggagctgcaggagtgcctggagcacggccggatcgccaagttcagcaaggtgagaaccatcaccacccgaagcaacagcatcaaacaaggcaaggaccagcactttcctgtgttcatgaacgagaaggaggacatcctgtggtgtaccgagatggagagagtgttcgggttcccagtccactacacagatgtcagcaacatgtctagactggccagacagagactgctgggaagaagctggtccgtccctgtgatcagacacctgttcgcccctctgaaggagtacttcgcctgcgtgagcagcggcaacagcaacgccaacagccggggccccagcttctctagcggcctggtgccactgtccctgagagggagccacatgggccccatggagatctacaaaaccgtgagcgcctggaagcggcagcctgtgcgcgtgctgagcctgtttcggaatatcgataaagtcctgaaaagcctgggattcctggagagcggctctggctccggcggtggcaccctgaagtacgtggaggatgtgacaaacgtggtcagacgggatgtggagaagtggggccccttcgatctggtgtacggcagcacccaacccctgggcagctcttgtgaccggtgccctggctggtacatgtttcagttccaccggatcctgcagtacgccctgccgagacaggagtcccagcggccattcttttggattttcatggacaacttgctgctgaccgaggatgaccaggaaactaccactcggttcctgcagaccgaagccgtgaccctgcaggacgtgagaggccgggactaccagaacgccatgcgggtgtggtccaacatccctggactgaaaagcaagcacgcacctctgacccctaaagaagaggagtacctgcaggcccaggtgcggagcagaagcaagctggacgcccctaaggtggatctgctggtgaagaattgcctcctgcccctgagagagtacttcaagtatttcagccagaatagtctgcccctgggcggcccaagcagcggcgcccctcctcccagcggcggcagcccagccggctccccaacctctaccgaggagggcacctctgagtccgccacccccgagagcggccctggcacctccaccgagcccagcgagggcagcgcacccggcagccctgccggcagccccacctccacagaggagggaaccagcaccgagcccagcgaaggcagcgccccaggcaccagcaccgagcctagtgagggcggctctggcggcggcagcgcccaggagattaaacggatcaacaagatcagaagaagacttgtgaaagacagcaacaccaagaaggccggcaagacaggccccatgaaaaccctgctggttagagtgatgacacccgatctgagagagcggctggaaaacctgagaaagaagcctgaaaatatcccccagcccatcagcaatacatctagagccaacctgaataagctgctgaccgattacaccgaaatgaagaaggcgatcctgcatgtgtactgggaagagttccagaaggaccctgtgggcctgatgagccgggtggcccagcctgccagcaagaagatcgatcagaacaagctgaaacctgagatggacgagaagggcaacctgaccaccgccggctttgcctgctctcagtgtggccagcccctgttcgtgtacaagctggagcaggtgtctgagaagggcaaggcttacaccaactacttcggacggtgcaatgtggccgagcacgaaaagctgatcctgctggcccagctgaagcccgagaaggatagcgacgaagccgtgacatatagcctgggaaagtttgggcagagggccctggatttctacagcattcatgtgaccaaggagtccacccaccccgtgaagcccctggcccagatcgccggaaacagatacgcctccggacctgtgggaaaggccctgagcgacgcatgtatgggcacaatcgcctccttcctgtctaagtaccaggacatcatcatcgaacaccagaaggtggtgaagggcaaccagaagagactggagagcctgcgggagctggccggcaaggaaaacctggaataccctagcgtgaccctgccacctcagcctcacaccaaggagggcgttgatgcctacaacgaagtgatcgcccgggtgcgaatgtgggtgaacctgaacctgtggcagaagctgaagctaagcagagatgatgccaagcctctgctgagactgaagggattcccttcctttcctctggtcgagagacaggccaacgaagtggactggtgggacatggtgtgtaacgtgaagaagctgatcaacgagaaaaaggaggatggcaaggtgttttggcagaatctggctggctacaagagacaggaagccctgagaccatacctgagcagcgaggaagatcggaagaagggaaagaaattcgctcggtaccagctgggcgacctgctgctgcacctggaaaagaagcacggcgaggactggggaaaggtgtacgacgaggcctgggagcggattgacaagaaagtggaaggcctgagcaagcacatcaagctggaagaggaacggagaagcgaggacgcccagagcaaggccgccctgaccgactggctgcgggctaaggccagcttcgtgatcgagggcctgaaggaggccgacaaggacgagttctgcagatgcgagctgaagctgcagaagtggtacggggacctgcggggaaagcccttcgccatcgaagccgagaacagcatcctggacatcagcggcttcagcaagcagtacaactgtgccttcatctggcagaaggacggcgtgaagaagctgaacctgtacctgatcatcaactacttcaagggcggcaagctgcggttcaagaagatcaaacctgaagccttcgaagccaacagattctacaccgtgatcaacaaaaagagcggcgagatcgtgcccatggaggtgaacttcaacttcgacgaccccaacctgatcatcctgcctctggcctttggcaagagacagggcagagaattcatctggaacgacctgctgtccctggaaaccggcagcctgaagctggccaacggaagagtgatcgagaagacactgtacaacagaagaacccggcaggatgagcctgccctgttcgtggccctgaccttcgagcggcgggaggtcctggactcctccaatatcaaaccaatgaacctgatcggcgtggcaagaggcgaaaacatccccgccgtgatcgccctgaccgaccccgagggctgcccactgagccggtttaaggatagcctgggaaacccaacccacatcctgagaatcggcgagagctataaggagaagcagcggaccatccaggccaagaaggaggtggagcagcggagagccggcggctacagccggaagtacgccagcaaagccaagaatctggcagacgatatggtgagaaacaccgctagagatctgctgtactacgccgtgacccaggatgccatgctgatcttcgccaacctgagccggggcttcggccggcagggcaagcggaccttcatggccgagagacagtacacacggatggaggactggctgaccgccaagctggcctacgagggcctgagcaagacctacctgtccaagacactggcccagtacacctccaagacatgcagcaactgtgggtttaccatcaccagcgccgactacgacagggtgctggagaagctgaagaagacagcaacaggctggatgaccacaattaacggcaaggagctgaaggtggagggccagattacctactacaacagatacaagagacagaacgtagtcaaggacctgtccgtcgagctggatagactgagcgaagaatctgtgaacaacgacatctcctcctggacaaagggcagaagcggagaagctctgagcctcctgaagaaaagattctcccatagacccgtgcaggagaagttcgtgtgcctgaactgcggcttcgagacacacgcagccgagcaagccgccctgaacatcgccagatcctggctgttcctgcggagccaggagtacaagaaataccagacaaacaagacaaccggcaacaccgataagagagccttcgtcgagacctggcagtccttttaccggaagaagcttaaggaggtgtggaaacctgccgtgcggtctggcggatctggcggaggctccacaagcatggccgagggcctgaagttcaaggacgtggccatctacttcagccagaacgagtgggagtgcctgcacagcgcccagaaggacctgtacagggacatcatgctggagaactacaacaacctgatcagcctgggcctgagcgagagcaagcccgacgtgatcagcctgctggagcagaggaaggagccctggatggtggagaggaaggagaccaaggagtggttccccgactgggagagcaggaccagccccaagaaaaagagaaaagtctaagctgccttctgcggggcttgccttctggccatgcccttcttctctcccttgcacctgtacctcttggtctttgaataaagcctgagtaggaaggctagcaaaaaaaaaaaaaaaaaaaaaaaaaaaaaaaaaaaaaaaaaaaaaaaaaaaaaaaaaaaaaaaaaaaaaaaaaaaaaaaa

SEQ ID NO: 3519 - RNA, 5419 nt, synthetic construct
  source 1..5419: mol_type = other RNA
aggaaataagagagaaaagaagagtaagaagaaatataagagccaccatggcccctaagaagaagcgtaaagtgagccgggtgaacggcagcggcagcggcggcggcatgaaccacgaccaggagttcgacccccctaaggtgtaccctcccgtccccgccgagaagagaaagcccatccgggtcctgagcctgttcgatggcatcgccaccggtctgctggtgctgaaggacctgggcatccaggtggataggtacattgcctccgaggtgtgcgaggactccatcaccgtgggaatggtgcgtcatcagggcaagatcatgtacgtgggcgacgtgcggagcgtgacacagaagcatatccaggagtggggccctttcgacctggtgatcggcggcagcccttgcaatgacctgagcatcgtgaacccagcccggaagggcctgtacgagggaaccggcagactgttcttcgagttttacagactgctgcacgacgcccggcctaaggaaggcgacgaccggcccttcttttggctgttcgagaatgtggtggccatgggagtcagcgacaagcgggatattagccggttcctggagagcaaccccgtgatgatcgatgccaaggaagtgagcgccgcccaccgggccagatacttctggggcaatctgcctggcatgaacagacccctggccagcaccgtgaacgacaagctggagctgcaggagtgcctggagcacggccggatcgccaagttcagcaaggtgagaaccatcaccacccgaagcaacagcatcaaacaaggcaaggaccagcactttcctgtgttcatgaacgagaaggaggacatcctgtggtgtaccgagatggagagagtgttcgggttcccagtccactacacagatgtcagcaacatgtctagactggccagacagagactgctgggaagaagctggtccgtccctgtgatcagacacctgttcgcccctctgaaggagtacttcgcctgcgtgagcagcggcaacagcaacgccaacagccggggccccagcttctctagcggcctggtgccactgtccctgagagggagccacatgggccccatggagatctacaaaaccgtgagcgcctggaagcggcagcctgtgcgcgtgctgagcctgtttcggaatatcgataaagtcctgaaaagcctgggattcctggagagcggctctggctccggcggtggcaccctgaagtacgtggaggatgtgacaaacgtggtcagacgggatgtggagaagtggggccccttcgatctggtgtacggcagcacccaacccctgggcagctcttgtgaccggtgccctggctggtacatgtttcagttccaccggatcctgcagtacgccctgccgagacaggagtcccagcggccattcttttggattttcatggacaacttgctgctgaccgaggatgaccaggaaactaccactcggttcctgcagaccgaagccgtgaccctgcaggacgtgagaggccgggactaccagaacgccatgcgggtgtggtccaacatccctggactgaaaagcaagcacgcacctctgacccctaaagaagaggagtacctgcaggcccaggtgcggagcagaagcaagctggacgcccctaaggtggatctgctggtgaagaattgcctcctgcccctgagagagtacttcaagtatttcagccagaatagtctgcccctgggcggcccaagcagcggcgcccctcctcccagcggcggcagcccagccggctccccaacctctaccgaggagggcacctctgagtccgccacccccgagagcggccctggcacctccaccgagcccagcgagggcagcgcacccggcagccctgccggcagccccacctccacagaggagggaaccagcaccgagcccagcgaaggcagcgccccaggcaccagcaccgagcctagtgagggcggctctggcggcggcagcgcccaggagattaaacggatcaacaagatcagaagaagacttgtgaaagacagcaacaccaagaaggccggcaagacaggccccatgaaaaccctgctggttagagtgatgacacccgatctgagagagcggctggaaaacctgagaaagaagcctgaaaatatcccccagcccatcagcaatacatctagagccaacctgaataagctgctgaccgattacaccgaaatgaagaaggcgatcctgcatgtgtactgggaagagttccagaaggaccctgtgggcctgatgagccgggtggcccagcctgccagcaagaagatcgatcagaacaagctgaaacctgagatggacgagaagggcaacctgaccaccgccggctttgcctgctctcagtgtggccagcccctgttcgtgtacaagctggagcaggtgtctgagaagggcaaggcttacaccaactacttcggacggtgcaatgtggccgagcacgaaaagctgatcctgctggcccagctgaagcccgagaaggatagcgacgaagccgtgacatatagcctgggaaagtttgggcagagggccctggatttctacagcattcatgtgaccaaggagtccacccaccccgtgaagcccctggcccagatcgccggaaacagatacgcctccggacctgtgggaaaggccctgagcgacgcatgtatgggcacaatcgcctccttcctgtctaagtaccaggacatcatcatcgaacaccagaaggtggtgaagggcaaccagaagagactggagagcctgcgggagctggccggcaaggaaaacctggaataccctagcgtgaccctgccacctcagcctcacaccaaggagggcgttgatgcctacaacgaagtgatcgcccgggtgcgaatgtgggtgaacctgaacctgtggcagaagctgaagctaagcagagatgatgccaagcctctgctgagactgaagggattcccttcctttcctctggtcgagagacaggccaacgaagtggactggtgggacatggtgtgtaacgtgaagaagctgatcaacgagaaaaaggaggatggcaaggtgttttggcagaatctggctggctacaagagacaggaagccctgagaccatacctgagcagcgaggaagatcggaagaagggaaagaaattcgctcggtaccagctgggcgacctgctgctgcacctggaaaagaagcacggcgaggactggggaaaggtgtacgacgaggcctgggagcggattgacaagaaagtggaaggcctgagcaagcacatcaagctggaagaggaacggagaagcgaggacgcccagagcaaggccgccctgaccgactggctgcgggctaaggccagcttcgtgatcgagggcctgaaggaggccgacaaggacgagttctgcagatgcgagctgaagctgcagaagtggtacggggacctgcggggaaagcccttcgccatcgaagccgagaacagcatcctggacatcagcggcttcagcaagcagtacaactgtgccttcatctggcagaaggacggcgtgaagaagctgaacctgtacctgatcatcaactacttcaagggcggcaagctgcggttcaagaagatcaaacctgaagccttcgaagccaacagattctacaccgtgatcaacaaaaagagcggcgagatcgtgcccatggaggtgaacttcaacttcgacgaccccaacctgatcatcctgcctctggcctttggcaagagacagggcagagaattcatctggaacgacctgctgtccctggaaaccggcagcctgaagctggccaacggaagagtgatcgagaagacactgtacaacagaagaacccggcaggatgagcctgccctgttcgtggccctgaccttcgagcggcgggaggtcctggactcctccaatatcaaaccaatgaacctgatcggcgtggcaagaggcgaaaacatccccgccgtgatcgccctgaccgaccccgagggctgcccactgagccggtttaaggatagcctgggaaacccaacccacatcctgagaatcggcgagagctataaggagaagcagcggaccatccaggccaagaaggaggtggagcagcggagagccggcggctacagccggaagtacgccagcaaagccaagaatctggcagacgatatggtgagaaacaccgctagagatctgctgtactacgccgtgacccaggatgccatgctgatcttcgccaacctgagccggggcttcggccggcagggcaagcggaccttcatggccgagagacagtacacacggatggaggactggctgaccgccaagctggcctacgagggcctgagcaagacctacctgtccaagacactggcccagtacacctccaagacatgcagcaactgtgggtttaccatcaccagcgccgactacgacagggtgctggagaagctgaagaagacagcaacaggctggatgaccacaattaacggcaaggagctgaaggtggagggccagattacctactacaacagatacaagagacagaacgtagtcaaggacctgtccgtcgagctggatagactgagcgaagaatctgtgaacaacgacatctcctcctggacaaagggcagaagcggagaagctctgagcctcctgaagaaaagattctcccatagacccgtgcaggagaagttcgtgtgcctgaactgcggcttcgagacacacgcagccgagcaagccgccctgaacatcgccagatcctggctgttcctgcggagccaggagtacaagaaataccagacaaacaagacaaccggcaacaccgataagagagccttcgtcgagacctggcagtccttttaccggaagaagcttaaggaggtgtggaaacctgccgtgcggtctggcggatctggcggaggctccacaagcaagcccggcaccgtgagcttcgccgacgtggccgtgtacttcagcagggaggagtggggctgcctgaggcccgcccagagggccctgtacagggacgtgatgagggagacctacggccacctgggcgccctgggcgtgggcggcagcaagcccgccctgatcagctgggtggaggaggccgccgagctgtgggaccccgccgccagggaccccgaggtgaccaagtgccccaccgagaccgacaccagccccaagaaaaagagaaaagtctaagctgccttctgcggggcttgccttctggccatgcccttcttctctcccttgcacctgtacctcttggtctttgaataaagcctgagtaggaaggctagcaaaaaaaaaaaaaaaaaaaaaaaaaaaaaaaaaaaaaaaaaaaaaaaaaaaaaaaaaaaaaaaaaaaaaaaaaaaaaaaa

SEQ ID NO: 3520 - RNA, 5419 nt, synthetic construct
  source 1..5419: mol_type = other RNA
aggaaataagagagaaaagaagagtaagaagaaatataagagccaccatggcccctaagaagaagcgtaaagtgagccgggtgaacggcagcggcagcggcggcggcatgaaccacgaccaggagttcgacccccctaaggtgtaccctcccgtccccgccgagaagagaaagcccatccgggtcctgagcctgttcgatggcatcgccaccggtctgctggtgctgaaggacctgggcatccaggtggataggtacattgcctccgaggtgtgcgaggactccatcaccgtgggaatggtgcgtcatcagggcaagatcatgtacgtgggcgacgtgcggagcgtgacacagaagcatatccaggagtggggccctttcgacctggtgatcggcggcagcccttgcaatgacctgagcatcgtgaacccagcccggaagggcctgtacgagggaaccggcagactgttcttcgagttttacagactgctgcacgacgcccggcctaaggaaggcgacgaccggcccttcttttggctgttcgagaatgtggtggccatgggagtcagcgacaagcgggatattagccggttcctggagagcaaccccgtgatgatcgatgccaaggaagtgagcgccgcccaccgggccagatacttctggggcaatctgcctggcatgaacagacccctggccagcaccgtgaacgacaagctggagctgcaggagtgcctggagcacggccggatcgccaagttcagcaaggtgagaaccatcaccacccgaagcaacagcatcaaacaaggcaaggaccagcactttcctgtgttcatgaacgagaaggaggacatcctgtggtgtaccgagatggagagagtgttcgggttcccagtccactacacagatgtcagcaacatgtctagactggccagacagagactgctgggaagaagctggtccgtccctgtgatcagacacctgttcgcccctctgaaggagtacttcgcctgcgtgagcagcggcaacagcaacgccaacagccggggccccagcttctctagcggcctggtgccactgtccctgagagggagccacatgggccccatggagatctacaaaaccgtgagcgcctggaagcggcagcctgtgcgcgtgctgagcctgtttcggaatatcgataaagtcctgaaaagcctgggattcctggagagcggctctggctccggcggtggcaccctgaagtacgtggaggatgtgacaaacgtggtcagacgggatgtggagaagtggggccccttcgatctggtgtacggcagcacccaacccctgggcagctcttgtgaccggtgccctggctggtacatgtttcagttccaccggatcctgcagtacgccctgccgagacaggagtcccagcggccattcttttggattttcatggacaacttgctgctgaccgaggatgaccaggaaactaccactcggttcctgcagaccgaagccgtgaccctgcaggacgtgagaggccgggactaccagaacgccatgcgggtgtggtccaacatccctggactgaaaagcaagcacgcacctctgacccctaaagaagaggagtacctgcaggcccaggtgcggagcagaagcaagctggacgcccctaaggtggatctgctggtgaagaattgcctcctgcccctgagagagtacttcaagtatttcagccagaatagtctgcccctgggcggcccaagcagcggcgcccctcctcccagcggcggcagcccagccggctccccaacctctaccgaggagggcacctctgagtccgccacccccgagagcggccctggcacctccaccgagcccagcgagggcagcgcacccggcagccctgccggcagccccacctccacagaggagggaaccagcaccgagcccagcgaaggcagcgccccaggcaccagcaccgagcctagtgagggcggctctggcggcggcagcgcccaggagattaaacggatcaacaagatcagaagaagacttgtgaaagacagcaacaccaagaaggccggcaagacaggccccatgaaaaccctgctggttagagtgatgacacccgatctgagagagcggctggaaaacctgagaaagaagcctgaaaatatcccccagcccatcagcaatacatctagagccaacctgaataagctgctgaccgattacaccgaaatgaagaaggcgatcctgcatgtgtactgggaagagttccagaaggaccctgtgggcctgatgagccgggtggcccagcctgccagcaagaagatcgatcagaacaagctgaaacctgagatggacgagaagggcaacctgaccaccgccggctttgcctgctctcagtgtggccagcccctgttcgtgtacaagctggagcaggtgtctgagaagggcaaggcttacaccaactacttcggacggtgcaatgtggccgagcacgaaaagctgatcctgctggcccagctgaagcccgagaaggatagcgacgaagccgtgacatatagcctgggaaagtttgggcagagggccctggatttctacagcattcatgtgaccaaggagtccacccaccccgtgaagcccctggcccagatcgccggaaacagatacgcctccggacctgtgggaaaggccctgagcgacgcatgtatgggcacaatcgcctccttcctgtctaagtaccaggacatcatcatcgaacaccagaaggtggtgaagggcaaccagaagagactggagagcctgcgggagctggccggcaaggaaaacctggaataccctagcgtgaccctgccacctcagcctcacaccaaggagggcgttgatgcctacaacgaagtgatcgcccgggtgcgaatgtgggtgaacctgaacctgtggcagaagctgaagctaagcagagatgatgccaagcctctgctgagactgaagggattcccttcctttcctctggtcgagagacaggccaacgaagtggactggtgggacatggtgtgtaacgtgaagaagctgatcaacgagaaaaaggaggatggcaaggtgttttggcagaatctggctggctacaagagacaggaagccctgagaccatacctgagcagcgaggaagatcggaagaagggaaagaaattcgctcggtaccagctgggcgacctgctgctgcacctggaaaagaagcacggcgaggactggggaaaggtgtacgacgaggcctgggagcggattgacaagaaagtggaaggcctgagcaagcacatcaagctggaagaggaacggagaagcgaggacgcccagagcaaggccgccctgaccgactggctgcgggctaaggccagcttcgtgatcgagggcctgaaggaggccgacaaggacgagttctgcagatgcgagctgaagctgcagaagtggtacggggacctgcggggaaagcccttcgccatcgaagccgagaacagcatcctggacatcagcggcttcagcaagcagtacaactgtgccttcatctggcagaaggacggcgtgaagaagctgaacctgtacctgatcatcaactacttcaagggcggcaagctgcggttcaagaagatcaaacctgaagccttcgaagccaacagattctacaccgtgatcaacaaaaagagcggcgagatcgtgcccatggaggtgaacttcaacttcgacgaccccaacctgatcatcctgcctctggcctttggcaagagacagggcagagaattcatctggaacgacctgctgtccctggaaaccggcagcctgaagctggccaacggaagagtgatcgagaagacactgtacaacagaagaacccggcaggatgagcctgccctgttcgtggccctgaccttcgagcggcgggaggtcctggactcctccaatatcaaaccaatgaacctgatcggcgtggcaagaggcgaaaacatccccgccgtgatcgccctgaccgaccccgagggctgcccactgagccggtttaaggatagcctgggaaacccaacccacatcctgagaatcggcgagagctataaggagaagcagcggaccatccaggccaagaaggaggtggagcagcggagagccggcggctacagccggaagtacgccagcaaagccaagaatctggcagacgatatggtgagaaacaccgctagagatctgctgtactacgccgtgacccaggatgccatgctgatcttcgccaacctgagccggggcttcggccggcagggcaagcggaccttcatggccgagagacagtacacacggatggaggactggctgaccgccaagctggcctacgagggcctgagcaagacctacctgtccaagacactggcccagtacacctccaagacatgcagcaactgtgggtttaccatcaccagcgccgactacgacagggtgctggagaagctgaagaagacagcaacaggctggatgaccacaattaacggcaaggagctgaaggtggagggccagattacctactacaacagatacaagagacagaacgtagtcaaggacctgtccgtcgagctggatagactgagcgaagaatctgtgaacaacgacatctcctcctggacaaagggcagaagcggagaagctctgagcctcctgaagaaaagattctcccatagacccgtgcaggagaagttcgtgtgcctgaactgcggcttcgagacacacgcagccgagcaagccgccctgaacatcgccagatcctggctgttcctgcggagccaggagtacaagaaataccagacaaacaagacaaccggcaacaccgataagagagccttcgtcgagacctggcagtccttttaccggaagaagcttaaggaggtgtggaaacctgccgtgcggtctggcggatctggcggaggctccacaagcttccaggagctggtggtgttcagggacgtggccgtggagttctgcaaggacgagtgggagtgcctgggccccgaccagaggagcctgtacagggacgtgatgctggagacctacagcaacttcgtgagcctgggcctggccgtgagcaagcccagcgtgatcagcctgctggagcagggcaaggagccctggatggtggagcaggccggctggtaccccgacctgctgagcgtgaacgagaccaccagccccaagaaaaagagaaaagtctaagctgccttctgcggggcttgccttctggccatgcccttcttctctcccttgcacctgtacctcttggtctttgaataaagcctgagtaggaaggctagcaaaaaaaaaaaaaaaaaaaaaaaaaaaaaaaaaaaaaaaaaaaaaaaaaaaaaaaaaaaaaaaaaaaaaaaaaaaaaaaa

SEQ ID NO: 3521 - RNA, 5419 nt, synthetic construct
  source 1..5419: mol_type = other RNA
aggaaataagagagaaaagaagagtaagaagaaatataagagccaccatggcccctaagaagaagcgtaaagtgagccgggtgaacggcagcggcagcggcggcggcatgaaccacgaccaggagttcgacccccctaaggtgtaccctcccgtccccgccgagaagagaaagcccatccgggtcctgagcctgttcgatggcatcgccaccggtctgctggtgctgaaggacctgggcatccaggtggataggtacattgcctccgaggtgtgcgaggactccatcaccgtgggaatggtgcgtcatcagggcaagatcatgtacgtgggcgacgtgcggagcgtgacacagaagcatatccaggagtggggccctttcgacctggtgatcggcggcagcccttgcaatgacctgagcatcgtgaacccagcccggaagggcctgtacgagggaaccggcagactgttcttcgagttttacagactgctgcacgacgcccggcctaaggaaggcgacgaccggcccttcttttggctgttcgagaatgtggtggccatgggagtcagcgacaagcgggatattagccggttcctggagagcaaccccgtgatgatcgatgccaaggaagtgagcgccgcccaccgggccagatacttctggggcaatctgcctggcatgaacagacccctggccagcaccgtgaacgacaagctggagctgcaggagtgcctggagcacggccggatcgccaagttcagcaaggtgagaaccatcaccacccgaagcaacagcatcaaacaaggcaaggaccagcactttcctgtgttcatgaacgagaaggaggacatcctgtggtgtaccgagatggagagagtgttcgggttcccagtccactacacagatgtcagcaacatgtctagactggccagacagagactgctgggaagaagctggtccgtccctgtgatcagacacctgttcgcccctctgaaggagtacttcgcctgcgtgagcagcggcaacagcaacgccaacagccggggccccagcttctctagcggcctggtgccactgtccctgagagggagccacatgggccccatggagatctacaaaaccgtgagcgcctggaagcggcagcctgtgcgcgtgctgagcctgtttcggaatatcgataaagtcctgaaaagcctgggattcctggagagcggctctggctccggcggtggcaccctgaagtacgtggaggatgtgacaaacgtggtcagacgggatgtggagaagtggggccccttcgatctggtgtacggcagcacccaacccctgggcagctcttgtgaccggtgccctggctggtacatgtttcagttccaccggatcctgcagtacgccctgccgagacaggagtcccagcggccattcttttggattttcatggacaacttgctgctgaccgaggatgaccaggaaactaccactcggttcctgcagaccgaagccgtgaccctgcaggacgtgagaggccgggactaccagaacgccatgcgggtgtggtccaacatccctggactgaaaagcaagcacgcacctctgacccctaaagaagaggagtacctgcaggcccaggtgcggagcagaagcaagctggacgcccctaaggtggatctgctggtgaagaattgcctcctgcccctgagagagtacttcaagtatttcagccagaatagtctgcccctgggcggcccaagcagcggcgcccctcctcccagcggcggcagcccagccggctccccaacctctaccgaggagggcacctctgagtccgccacccccgagagcggccctggcacctccaccgagcccagcgagggcagcgcacccggcagccctgccggcagccccacctccacagaggagggaaccagcaccgagcccagcgaaggcagcgccccaggcaccagcaccgagcctagtgagggcggctctggcggcggcagcgcccaggagattaaacggatcaacaagatcagaagaagacttgtgaaagacagcaacaccaagaaggccggcaagacaggccccatgaaaaccctgctggttagagtgatgacacccgatctgagagagcggctggaaaacctgagaaagaagcctgaaaatatcccccagcccatcagcaatacatctagagccaacctgaataagctgctgaccgattacaccgaaatgaagaaggcgatcctgcatgtgtactgggaagagttccagaaggaccctgtgggcctgatgagccgggtggcccagcctgccagcaagaagatcgatcagaacaagctgaaacctgagatggacgagaagggcaacctgaccaccgccggctttgcctgctctcagtgtggccagcccctgttcgtgtacaagctggagcaggtgtctgagaagggcaaggcttacaccaactacttcggacggtgcaatgtggccgagcacgaaaagctgatcctgctggcccagctgaagcccgagaaggatagcgacgaagccgtgacatatagcctgggaaagtttgggcagagggccctggatttctacagcattcatgtgaccaaggagtccacccaccccgtgaagcccctggcccagatcgccggaaacagatacgcctccggacctgtgggaaaggccctgagcgacgcatgtatgggcacaatcgcctccttcctgtctaagtaccaggacatcatcatcgaacaccagaaggtggtgaagggcaaccagaagagactggagagcctgcgggagctggccggcaaggaaaacctggaataccctagcgtgaccctgccacctcagcctcacaccaaggagggcgttgatgcctacaacgaagtgatcgcccgggtgcgaatgtgggtgaacctgaacctgtggcagaagctgaagctaagcagagatgatgccaagcctctgctgagactgaagggattcccttcctttcctctggtcgagagacaggccaacgaagtggactggtgggacatggtgtgtaacgtgaagaagctgatcaacgagaaaaaggaggatggcaaggtgttttggcagaatctggctggctacaagagacaggaagccctgagaccatacctgagcagcgaggaagatcggaagaagggaaagaaattcgctcggtaccagctgggcgacctgctgctgcacctggaaaagaagcacggcgaggactggggaaaggtgtacgacgaggcctgggagcggattgacaagaaagtggaaggcctgagcaagcacatcaagctggaagaggaacggagaagcgaggacgcccagagcaaggccgccctgaccgactggctgcgggctaaggccagcttcgtgatcgagggcctgaaggaggccgacaaggacgagttctgcagatgcgagctgaagctgcagaagtggtacggggacctgcggggaaagcccttcgccatcgaagccgagaacagcatcctggacatcagcggcttcagcaagcagtacaactgtgccttcatctggcagaaggacggcgtgaagaagctgaacctgtacctgatcatcaactacttcaagggcggcaagctgcggttcaagaagatcaaacctgaagccttcgaagccaacagattctacaccgtgatcaacaaaaagagcggcgagatcgtgcccatggaggtgaacttcaacttcgacgaccccaacctgatcatcctgcctctggcctttggcaagagacagggcagagaattcatctggaacgacctgctgtccctggaaaccggcagcctgaagctggccaacggaagagtgatcgagaagacactgtacaacagaagaacccggcaggatgagcctgccctgttcgtggccctgaccttcgagcggcgggaggtcctggactcctccaatatcaaaccaatgaacctgatcggcgtggcaagaggcgaaaacatccccgccgtgatcgccctgaccgaccccgagggctgcccactgagccggtttaaggatagcctgggaaacccaacccacatcctgagaatcggcgagagctataaggagaagcagcggaccatccaggccaagaaggaggtggagcagcggagagccggcggctacagccggaagtacgccagcaaagccaagaatctggcagacgatatggtgagaaacaccgctagagatctgctgtactacgccgtgacccaggatgccatgctgatcttcgccaacctgagccggggcttcggccggcagggcaagcggaccttcatggccgagagacagtacacacggatggaggactggctgaccgccaagctggcctacgagggcctgagcaagacctacctgtccaagacactggcccagtacacctccaagacatgcagcaactgtgggtttaccatcaccagcgccgactacgacagggtgctggagaagctgaagaagacagcaacaggctggatgaccacaattaacggcaaggagctgaaggtggagggccagattacctactacaacagatacaagagacagaacgtagtcaaggacctgtccgtcgagctggatagactgagcgaagaatctgtgaacaacgacatctcctcctggacaaagggcagaagcggagaagctctgagcctcctgaagaaaagattctcccatagacccgtgcaggagaagttcgtgtgcctgaactgcggcttcgagacacacgcagccgagcaagccgccctgaacatcgccagatcctggctgttcctgcggagccaggagtacaagaaataccagacaaacaagacaaccggcaacaccgataagagagccttcgtcgagacctggcagtccttttaccggaagaagcttaaggaggtgtggaaacctgccgtgcggtctggcggatctggcggaggctccacaagcttccaggagcccgtgaccttcgaggacgtggtggtgtacttcacccagaacgagtggaccagcctgcagcccagccagagggccctgtacagggaggtgatgctggagaactacgccaccgtgaccagcctgagcgccttccccttcagcaagcccgacctgatcttcaggctggagcagggcgaggccgcctggggcagcgacccctggaccctggccggcgaggaggcccccaggggcctgaccagccccaagaaaaagagaaaagtctaagctgccttctgcggggcttgccttctggccatgcccttcttctctcccttgcacctgtacctcttggtctttgaataaagcctgagtaggaaggctagcaaaaaaaaaaaaaaaaaaaaaaaaaaaaaaaaaaaaaaaaaaaaaaaaaaaaaaaaaaaaaaaaaaaaaaaaaaaaaaaa

SEQ ID NO: 3522 - RNA, 5419 nt, synthetic construct
  source 1..5419: mol_type = other RNA
aggaaataagagagaaaagaagagtaagaagaaatataagagccaccatggcccctaagaagaagcgtaaagtgagccgggtgaacggcagcggcagcggcggcggcatgaaccacgaccaggagttcgacccccctaaggtgtaccctcccgtccccgccgagaagagaaagcccatccgggtcctgagcctgttcgatggcatcgccaccggtctgctggtgctgaaggacctgggcatccaggtggataggtacattgcctccgaggtgtgcgaggactccatcaccgtgggaatggtgcgtcatcagggcaagatcatgtacgtgggcgacgtgcggagcgtgacacagaagcatatccaggagtggggccctttcgacctggtgatcggcggcagcccttgcaatgacctgagcatcgtgaacccagcccggaagggcctgtacgagggaaccggcagactgttcttcgagttttacagactgctgcacgacgcccggcctaaggaaggcgacgaccggcccttcttttggctgttcgagaatgtggtggccatgggagtcagcgacaagcgggatattagccggttcctggagagcaaccccgtgatgatcgatgccaaggaagtgagcgccgcccaccgggccagatacttctggggcaatctgcctggcatgaacagacccctggccagcaccgtgaacgacaagctggagctgcaggagtgcctggagcacggccggatcgccaagttcagcaaggtgagaaccatcaccacccgaagcaacagcatcaaacaaggcaaggaccagcactttcctgtgttcatgaacgagaaggaggacatcctgtggtgtaccgagatggagagagtgttcgggttcccagtccactacacagatgtcagcaacatgtctagactggccagacagagactgctgggaagaagctggtccgtccctgtgatcagacacctgttcgcccctctgaaggagtacttcgcctgcgtgagcagcggcaacagcaacgccaacagccggggccccagcttctctagcggcctggtgccactgtccctgagagggagccacatgggccccatggagatctacaaaaccgtgagcgcctggaagcggcagcctgtgcgcgtgctgagcctgtttcggaatatcgataaagtcctgaaaagcctgggattcctggagagcggctctggctccggcggtggcaccctgaagtacgtggaggatgtgacaaacgtggtcagacgggatgtggagaagtggggccccttcgatctggtgtacggcagcacccaacccctgggcagctcttgtgaccggtgccctggctggtacatgtttcagttccaccggatcctgcagtacgccctgccgagacaggagtcccagcggccattcttttggattttcatggacaacttgctgctgaccgaggatgaccaggaaactaccactcggttcctgcagaccgaagccgtgaccctgcaggacgtgagaggccgggactaccagaacgccatgcgggtgtggtccaacatccctggactgaaaagcaagcacgcacctctgacccctaaagaagaggagtacctgcaggcccaggtgcggagcagaagcaagctggacgcccctaaggtggatctgctggtgaagaattgcctcctgcccctgagagagtacttcaagtatttcagccagaatagtctgcccctgggcggcccaagcagcggcgcccctcctcccagcggcggcagcccagccggctccccaacctctaccgaggagggcacctctgagtccgccacccccgagagcggccctggcacctccaccgagcccagcgagggcagcgcacccggcagccctgccggcagccccacctccacagaggagggaaccagcaccgagcccagcgaaggcagcgccccaggcaccagcaccgagcctagtgagggcggctctggcggcggcagcgcccaggagattaaacggatcaacaagatcagaagaagacttgtgaaagacagcaacaccaagaaggccggcaagacaggccccatgaaaaccctgctggttagagtgatgacacccgatctgagagagcggctggaaaacctgagaaagaagcctgaaaatatcccccagcccatcagcaatacatctagagccaacctgaataagctgctgaccgattacaccgaaatgaagaaggcgatcctgcatgtgtactgggaagagttccagaaggaccctgtgggcctgatgagccgggtggcccagcctgccagcaagaagatcgatcagaacaagctgaaacctgagatggacgagaagggcaacctgaccaccgccggctttgcctgctctcagtgtggccagcccctgttcgtgtacaagctggagcaggtgtctgagaagggcaaggcttacaccaactacttcggacggtgcaatgtggccgagcacgaaaagctgatcctgctggcccagctgaagcccgagaaggatagcgacgaagccgtgacatatagcctgggaaagtttgggcagagggccctggatttctacagcattcatgtgaccaaggagtccacccaccccgtgaagcccctggcccagatcgccggaaacagatacgcctccggacctgtgggaaaggccctgagcgacgcatgtatgggcacaatcgcctccttcctgtctaagtaccaggacatcatcatcgaacaccagaaggtggtgaagggcaaccagaagagactggagagcctgcgggagctggccggcaaggaaaacctggaataccctagcgtgaccctgccacctcagcctcacaccaaggagggcgttgatgcctacaacgaagtgatcgcccgggtgcgaatgtgggtgaacctgaacctgtggcagaagctgaagctaagcagagatgatgccaagcctctgctgagactgaagggattcccttcctttcctctggtcgagagacaggccaacgaagtggactggtgggacatggtgtgtaacgtgaagaagctgatcaacgagaaaaaggaggatggcaaggtgttttggcagaatctggctggctacaagagacaggaagccctgagaccatacctgagcagcgaggaagatcggaagaagggaaagaaattcgctcggtaccagctgggcgacctgctgctgcacctggaaaagaagcacggcgaggactggggaaaggtgtacgacgaggcctgggagcggattgacaagaaagtggaaggcctgagcaagcacatcaagctggaagaggaacggagaagcgaggacgcccagagcaaggccgccctgaccgactggctgcgggctaaggccagcttcgtgatcgagggcctgaaggaggccgacaaggacgagttctgcagatgcgagctgaagctgcagaagtggtacggggacctgcggggaaagcccttcgccatcgaagccgagaacagcatcctggacatcagcggcttcagcaagcagtacaactgtgccttcatctggcagaaggacggcgtgaagaagctgaacctgtacctgatcatcaactacttcaagggcggcaagctgcggttcaagaagatcaaacctgaagccttcgaagccaacagattctacaccgtgatcaacaaaaagagcggcgagatcgtgcccatggaggtgaacttcaacttcgacgaccccaacctgatcatcctgcctctggcctttggcaagagacagggcagagaattcatctggaacgacctgctgtccctggaaaccggcagcctgaagctggccaacggaagagtgatcgagaagacactgtacaacagaagaacccggcaggatgagcctgccctgttcgtggccctgaccttcgagcggcgggaggtcctggactcctccaatatcaaaccaatgaacctgatcggcgtggcaagaggcgaaaacatccccgccgtgatcgccctgaccgaccccgagggctgcccactgagccggtttaaggatagcctgggaaacccaacccacatcctgagaatcggcgagagctataaggagaagcagcggaccatccaggccaagaaggaggtggagcagcggagagccggcggctacagccggaagtacgccagcaaagccaagaatctggcagacgatatggtgagaaacaccgctagagatctgctgtactacgccgtgacccaggatgccatgctgatcttcgccaacctgagccggggcttcggccggcagggcaagcggaccttcatggccgagagacagtacacacggatggaggactggctgaccgccaagctggcctacgagggcctgagcaagacctacctgtccaagacactggcccagtacacctccaagacatgcagcaactgtgggtttaccatcaccagcgccgactacgacagggtgctggagaagctgaagaagacagcaacaggctggatgaccacaattaacggcaaggagctgaaggtggagggccagattacctactacaacagatacaagagacagaacgtagtcaaggacctgtccgtcgagctggatagactgagcgaagaatctgtgaacaacgacatctcctcctggacaaagggcagaagcggagaagctctgagcctcctgaagaaaagattctcccatagacccgtgcaggagaagttcgtgtgcctgaactgcggcttcgagacacacgcagccgagcaagccgccctgaacatcgccagatcctggctgttcctgcggagccaggagtacaagaaataccagacaaacaagacaaccggcaacaccgataagagagccttcgtcgagacctggcagtccttttaccggaagaagcttaaggaggtgtggaaacctgccgtgcggtctggcggatctggcggaggctccacaagcatggccgccatccccctgaaggcccagtgccaggagaccgtgaccttcgaggacgtggccgtgcacttcaccaagaccgagtggaccggcctgagccccgcccagagggccctgtacaggagcgtgatgctggagaactacggcaacctgaccgccatgggctacctggtgcccaagcccgccctgatcagcctgctggagggcggcgacatggcctggggcctggaggcccaggacgaccccaccagccccaagaaaaagagaaaagtctaagctgccttctgcggggcttgccttctggccatgcccttcttctctcccttgcacctgtacctcttggtctttgaataaagcctgagtaggaaggctagcaaaaaaaaaaaaaaaaaaaaaaaaaaaaaaaaaaaaaaaaaaaaaaaaaaaaaaaaaaaaaaaaaaaaaaaaaaaaaaaa

SEQ ID NO: 3523 - RNA, 5419 nt, synthetic construct
  source 1..5419: mol_type = other RNA
aggaaataagagagaaaagaagagtaagaagaaatataagagccaccatggcccctaagaagaagcgtaaagtgagccgggtgaacggcagcggcagcggcggcggcatgaaccacgaccaggagttcgacccccctaaggtgtaccctcccgtccccgccgagaagagaaagcccatccgggtcctgagcctgttcgatggcatcgccaccggtctgctggtgctgaaggacctgggcatccaggtggataggtacattgcctccgaggtgtgcgaggactccatcaccgtgggaatggtgcgtcatcagggcaagatcatgtacgtgggcgacgtgcggagcgtgacacagaagcatatccaggagtggggccctttcgacctggtgatcggcggcagcccttgcaatgacctgagcatcgtgaacccagcccggaagggcctgtacgagggaaccggcagactgttcttcgagttttacagactgctgcacgacgcccggcctaaggaaggcgacgaccggcccttcttttggctgttcgagaatgtggtggccatgggagtcagcgacaagcgggatattagccggttcctggagagcaaccccgtgatgatcgatgccaaggaagtgagcgccgcccaccgggccagatacttctggggcaatctgcctggcatgaacagacccctggccagcaccgtgaacgacaagctggagctgcaggagtgcctggagcacggccggatcgccaagttcagcaaggtgagaaccatcaccacccgaagcaacagcatcaaacaaggcaaggaccagcactttcctgtgttcatgaacgagaaggaggacatcctgtggtgtaccgagatggagagagtgttcgggttcccagtccactacacagatgtcagcaacatgtctagactggccagacagagactgctgggaagaagctggtccgtccctgtgatcagacacctgttcgcccctctgaaggagtacttcgcctgcgtgagcagcggcaacagcaacgccaacagccggggccccagcttctctagcggcctggtgccactgtccctgagagggagccacatgggccccatggagatctacaaaaccgtgagcgcctggaagcggcagcctgtgcgcgtgctgagcctgtttcggaatatcgataaagtcctgaaaagcctgggattcctggagagcggctctggctccggcggtggcaccctgaagtacgtggaggatgtgacaaacgtggtcagacgggatgtggagaagtggggccccttcgatctggtgtacggcagcacccaacccctgggcagctcttgtgaccggtgccctggctggtacatgtttcagttccaccggatcctgcagtacgccctgccgagacaggagtcccagcggccattcttttggattttcatggacaacttgctgctgaccgaggatgaccaggaaactaccactcggttcctgcagaccgaagccgtgaccctgcaggacgtgagaggccgggactaccagaacgccatgcgggtgtggtccaacatccctggactgaaaagcaagcacgcacctctgacccctaaagaagaggagtacctgcaggcccaggtgcggagcagaagcaagctggacgcccctaaggtggatctgctggtgaagaattgcctcctgcccctgagagagtacttcaagtatttcagccagaatagtctgcccctgggcggcccaagcagcggcgcccctcctcccagcggcggcagcccagccggctccccaacctctaccgaggagggcacctctgagtccgccacccccgagagcggccctggcacctccaccgagcccagcgagggcagcgcacccggcagccctgccggcagccccacctccacagaggagggaaccagcaccgagcccagcgaaggcagcgccccaggcaccagcaccgagcctagtgagggcggctctggcggcggcagcgcccaggagattaaacggatcaacaagatcagaagaagacttgtgaaagacagcaacaccaagaaggccggcaagacaggccccatgaaaaccctgctggttagagtgatgacacccgatctgagagagcggctggaaaacctgagaaagaagcctgaaaatatcccccagcccatcagcaatacatctagagccaacctgaataagctgctgaccgattacaccgaaatgaagaaggcgatcctgcatgtgtactgggaagagttccagaaggaccctgtgggcctgatgagccgggtggcccagcctgccagcaagaagatcgatcagaacaagctgaaacctgagatggacgagaagggcaacctgaccaccgccggctttgcctgctctcagtgtggccagcccctgttcgtgtacaagctggagcaggtgtctgagaagggcaaggcttacaccaactacttcggacggtgcaatgtggccgagcacgaaaagctgatcctgctggcccagctgaagcccgagaaggatagcgacgaagccgtgacatatagcctgggaaagtttgggcagagggccctggatttctacagcattcatgtgaccaaggagtccacccaccccgtgaagcccctggcccagatcgccggaaacagatacgcctccggacctgtgggaaaggccctgagcgacgcatgtatgggcacaatcgcctccttcctgtctaagtaccaggacatcatcatcgaacaccagaaggtggtgaagggcaaccagaagagactggagagcctgcgggagctggccggcaaggaaaacctggaataccctagcgtgaccctgccacctcagcctcacaccaaggagggcgttgatgcctacaacgaagtgatcgcccgggtgcgaatgtgggtgaacctgaacctgtggcagaagctgaagctaagcagagatgatgccaagcctctgctgagactgaagggattcccttcctttcctctggtcgagagacaggccaacgaagtggactggtgggacatggtgtgtaacgtgaagaagctgatcaacgagaaaaaggaggatggcaaggtgttttggcagaatctggctggctacaagagacaggaagccctgagaccatacctgagcagcgaggaagatcggaagaagggaaagaaattcgctcggtaccagctgggcgacctgctgctgcacctggaaaagaagcacggcgaggactggggaaaggtgtacgacgaggcctgggagcggattgacaagaaagtggaaggcctgagcaagcacatcaagctggaagaggaacggagaagcgaggacgcccagagcaaggccgccctgaccgactggctgcgggctaaggccagcttcgtgatcgagggcctgaaggaggccgacaaggacgagttctgcagatgcgagctgaagctgcagaagtggtacggggacctgcggggaaagcccttcgccatcgaagccgagaacagcatcctggacatcagcggcttcagcaagcagtacaactgtgccttcatctggcagaaggacggcgtgaagaagctgaacctgtacctgatcatcaactacttcaagggcggcaagctgcggttcaagaagatcaaacctgaagccttcgaagccaacagattctacaccgtgatcaacaaaaagagcggcgagatcgtgcccatggaggtgaacttcaacttcgacgaccccaacctgatcatcctgcctctggcctttggcaagagacagggcagagaattcatctggaacgacctgctgtccctggaaaccggcagcctgaagctggccaacggaagagtgatcgagaagacactgtacaacagaagaacccggcaggatgagcctgccctgttcgtggccctgaccttcgagcggcgggaggtcctggactcctccaatatcaaaccaatgaacctgatcggcgtggcaagaggcgaaaacatccccgccgtgatcgccctgaccgaccccgagggctgcccactgagccggtttaaggatagcctgggaaacccaacccacatcctgagaatcggcgagagctataaggagaagcagcggaccatccaggccaagaaggaggtggagcagcggagagccggcggctacagccggaagtacgccagcaaagccaagaatctggcagacgatatggtgagaaacaccgctagagatctgctgtactacgccgtgacccaggatgccatgctgatcttcgccaacctgagccggggcttcggccggcagggcaagcggaccttcatggccgagagacagtacacacggatggaggactggctgaccgccaagctggcctacgagggcctgagcaagacctacctgtccaagacactggcccagtacacctccaagacatgcagcaactgtgggtttaccatcaccagcgccgactacgacagggtgctggagaagctgaagaagacagcaacaggctggatgaccacaattaacggcaaggagctgaaggtggagggccagattacctactacaacagatacaagagacagaacgtagtcaaggacctgtccgtcgagctggatagactgagcgaagaatctgtgaacaacgacatctcctcctggacaaagggcagaagcggagaagctctgagcctcctgaagaaaagattctcccatagacccgtgcaggagaagttcgtgtgcctgaactgcggcttcgagacacacgcagccgagcaagccgccctgaacatcgccagatcctggctgttcctgcggagccaggagtacaagaaataccagacaaacaagacaaccggcaacaccgataagagagccttcgtcgagacctggcagtccttttaccggaagaagcttaaggaggtgtggaaacctgccgtgcggtctggcggatctggcggaggctccacaagcgtgcagggcagcgtgagcttcgaggacgtggccgtgggcttcagccaggaggagtggcagatcctgggccccagccagaaggccctgtactgggacgtgatgctggagaactactgcaacctggtgagcgtgggctaccaggcccccacccccaacagcctgttccagctggagcagggcggccccccctggaccgtggagggcgccgccctgagcagcacctgcagcggctaccaggccaccaccagccccaagaaaaagagaaaagtctaagctgccttctgcggggcttgccttctggccatgcccttcttctctcccttgcacctgtacctcttggtctttgaataaagcctgagtaggaaggctagcaaaaaaaaaaaaaaaaaaaaaaaaaaaaaaaaaaaaaaaaaaaaaaaaaaaaaaaaaaaaaaaaaaaaaaaaaaaaaaaa

SEQ ID NO: 3524 - RNA, 5419 nt, synthetic construct
  source 1..5419: mol_type = other RNA
aggaaataagagagaaaagaagagtaagaagaaatataagagccaccatggcccctaagaagaagcgtaaagtgagccgggtgaacggcagcggcagcggcggcggcatgaaccacgaccaggagttcgacccccctaaggtgtaccctcccgtccccgccgagaagagaaagcccatccgggtcctgagcctgttcgatggcatcgccaccggtctgctggtgctgaaggacctgggcatccaggtggataggtacattgcctccgaggtgtgcgaggactccatcaccgtgggaatggtgcgtcatcagggcaagatcatgtacgtgggcgacgtgcggagcgtgacacagaagcatatccaggagtggggccctttcgacctggtgatcggcggcagcccttgcaatgacctgagcatcgtgaacccagcccggaagggcctgtacgagggaaccggcagactgttcttcgagttttacagactgctgcacgacgcccggcctaaggaaggcgacgaccggcccttcttttggctgttcgagaatgtggtggccatgggagtcagcgacaagcgggatattagccggttcctggagagcaaccccgtgatgatcgatgccaaggaagtgagcgccgcccaccgggccagatacttctggggcaatctgcctggcatgaacagacccctggccagcaccgtgaacgacaagctggagctgcaggagtgcctggagcacggccggatcgccaagttcagcaaggtgagaaccatcaccacccgaagcaacagcatcaaacaaggcaaggaccagcactttcctgtgttcatgaacgagaaggaggacatcctgtggtgtaccgagatggagagagtgttcgggttcccagtccactacacagatgtcagcaacatgtctagactggccagacagagactgctgggaagaagctggtccgtccctgtgatcagacacctgttcgcccctctgaaggagtacttcgcctgcgtgagcagcggcaacagcaacgccaacagccggggccccagcttctctagcggcctggtgccactgtccctgagagggagccacatgggccccatggagatctacaaaaccgtgagcgcctggaagcggcagcctgtgcgcgtgctgagcctgtttcggaatatcgataaagtcctgaaaagcctgggattcctggagagcggctctggctccggcggtggcaccctgaagtacgtggaggatgtgacaaacgtggtcagacgggatgtggagaagtggggccccttcgatctggtgtacggcagcacccaacccctgggcagctcttgtgaccggtgccctggctggtacatgtttcagttccaccggatcctgcagtacgccctgccgagacaggagtcccagcggccattcttttggattttcatggacaacttgctgctgaccgaggatgaccaggaaactaccactcggttcctgcagaccgaagccgtgaccctgcaggacgtgagaggccgggactaccagaacgccatgcgggtgtggtccaacatccctggactgaaaagcaagcacgcacctctgacccctaaagaagaggagtacctgcaggcccaggtgcggagcagaagcaagctggacgcccctaaggtggatctgctggtgaagaattgcctcctgcccctgagagagtacttcaagtatttcagccagaatagtctgcccctgggcggcccaagcagcggcgcccctcctcccagcggcggcagcccagccggctccccaacctctaccgaggagggcacctctgagtccgccacccccgagagcggccctggcacctccaccgagcccagcgagggcagcgcacccggcagccctgccggcagccccacctccacagaggagggaaccagcaccgagcccagcgaaggcagcgccccaggcaccagcaccgagcctagtgagggcggctctggcggcggcagcgcccaggagattaaacggatcaacaagatcagaagaagacttgtgaaagacagcaacaccaagaaggccggcaagacaggccccatgaaaaccctgctggttagagtgatgacacccgatctgagagagcggctggaaaacctgagaaagaagcctgaaaatatcccccagcccatcagcaatacatctagagccaacctgaataagctgctgaccgattacaccgaaatgaagaaggcgatcctgcatgtgtactgggaagagttccagaaggaccctgtgggcctgatgagccgggtggcccagcctgccagcaagaagatcgatcagaacaagctgaaacctgagatggacgagaagggcaacctgaccaccgccggctttgcctgctctcagtgtggccagcccctgttcgtgtacaagctggagcaggtgtctgagaagggcaaggcttacaccaactacttcggacggtgcaatgtggccgagcacgaaaagctgatcctgctggcccagctgaagcccgagaaggatagcgacgaagccgtgacatatagcctgggaaagtttgggcagagggccctggatttctacagcattcatgtgaccaaggagtccacccaccccgtgaagcccctggcccagatcgccggaaacagatacgcctccggacctgtgggaaaggccctgagcgacgcatgtatgggcacaatcgcctccttcctgtctaagtaccaggacatcatcatcgaacaccagaaggtggtgaagggcaaccagaagagactggagagcctgcgggagctggccggcaaggaaaacctggaataccctagcgtgaccctgccacctcagcctcacaccaaggagggcgttgatgcctacaacgaagtgatcgcccgggtgcgaatgtgggtgaacctgaacctgtggcagaagctgaagctaagcagagatgatgccaagcctctgctgagactgaagggattcccttcctttcctctggtcgagagacaggccaacgaagtggactggtgggacatggtgtgtaacgtgaagaagctgatcaacgagaaaaaggaggatggcaaggtgttttggcagaatctggctggctacaagagacaggaagccctgagaccatacctgagcagcgaggaagatcggaagaagggaaagaaattcgctcggtaccagctgggcgacctgctgctgcacctggaaaagaagcacggcgaggactggggaaaggtgtacgacgaggcctgggagcggattgacaagaaagtggaaggcctgagcaagcacatcaagctggaagaggaacggagaagcgaggacgcccagagcaaggccgccctgaccgactggctgcgggctaaggccagcttcgtgatcgagggcctgaaggaggccgacaaggacgagttctgcagatgcgagctgaagctgcagaagtggtacggggacctgcggggaaagcccttcgccatcgaagccgagaacagcatcctggacatcagcggcttcagcaagcagtacaactgtgccttcatctggcagaaggacggcgtgaagaagctgaacctgtacctgatcatcaactacttcaagggcggcaagctgcggttcaagaagatcaaacctgaagccttcgaagccaacagattctacaccgtgatcaacaaaaagagcggcgagatcgtgcccatggaggtgaacttcaacttcgacgaccccaacctgatcatcctgcctctggcctttggcaagagacagggcagagaattcatctggaacgacctgctgtccctggaaaccggcagcctgaagctggccaacggaagagtgatcgagaagacactgtacaacagaagaacccggcaggatgagcctgccctgttcgtggccctgaccttcgagcggcgggaggtcctggactcctccaatatcaaaccaatgaacctgatcggcgtggcaagaggcgaaaacatccccgccgtgatcgccctgaccgaccccgagggctgcccactgagccggtttaaggatagcctgggaaacccaacccacatcctgagaatcggcgagagctataaggagaagcagcggaccatccaggccaagaaggaggtggagcagcggagagccggcggctacagccggaagtacgccagcaaagccaagaatctggcagacgatatggtgagaaacaccgctagagatctgctgtactacgccgtgacccaggatgccatgctgatcttcgccaacctgagccggggcttcggccggcagggcaagcggaccttcatggccgagagacagtacacacggatggaggactggctgaccgccaagctggcctacgagggcctgagcaagacctacctgtccaagacactggcccagtacacctccaagacatgcagcaactgtgggtttaccatcaccagcgccgactacgacagggtgctggagaagctgaagaagacagcaacaggctggatgaccacaattaacggcaaggagctgaaggtggagggccagattacctactacaacagatacaagagacagaacgtagtcaaggacctgtccgtcgagctggatagactgagcgaagaatctgtgaacaacgacatctcctcctggacaaagggcagaagcggagaagctctgagcctcctgaagaaaagattctcccatagacccgtgcaggagaagttcgtgtgcctgaactgcggcttcgagacacacgcagccgagcaagccgccctgaacatcgccagatcctggctgttcctgcggagccaggagtacaagaaataccagacaaacaagacaaccggcaacaccgataagagagccttcgtcgagacctggcagtccttttaccggaagaagcttaaggaggtgtggaaacctgccgtgcggtctggcggatctggcggaggctccacaagcagctacggcagcctgagcttcgaggacgtgaccgtgggcttcagccaggaggagtggcagcacctggaccccgcccagaggaccctgtacagggacgtgatgctggagaactacagccacctggtggccgtgggctgctgcgtgcccaagcccgacgtgatcttcaggctggagcagggccagcagccctggatcgtggaggaggagagcctggaccagagctgccccgaggtgtgcaaggtgaccagccccaagaaaaagagaaaagtctaagctgccttctgcggggcttgccttctggccatgcccttcttctctcccttgcacctgtacctcttggtctttgaataaagcctgagtaggaaggctagcaaaaaaaaaaaaaaaaaaaaaaaaaaaaaaaaaaaaaaaaaaaaaaaaaaaaaaaaaaaaaaaaaaaaaaaaaaaaaaaa

SEQ ID NO: 3525 - RNA, 5419 nt, synthetic construct
  source 1..5419: mol_type = other RNA
aggaaataagagagaaaagaagagtaagaagaaatataagagccaccatggcccctaagaagaagcgtaaagtgagccgggtgaacggcagcggcagcggcggcggcatgaaccacgaccaggagttcgacccccctaaggtgtaccctcccgtccccgccgagaagagaaagcccatccgggtcctgagcctgttcgatggcatcgccaccggtctgctggtgctgaaggacctgggcatccaggtggataggtacattgcctccgaggtgtgcgaggactccatcaccgtgggaatggtgcgtcatcagggcaagatcatgtacgtgggcgacgtgcggagcgtgacacagaagcatatccaggagtggggccctttcgacctggtgatcggcggcagcccttgcaatgacctgagcatcgtgaacccagcccggaagggcctgtacgagggaaccggcagactgttcttcgagttttacagactgctgcacgacgcccggcctaaggaaggcgacgaccggcccttcttttggctgttcgagaatgtggtggccatgggagtcagcgacaagcgggatattagccggttcctggagagcaaccccgtgatgatcgatgccaaggaagtgagcgccgcccaccgggccagatacttctggggcaatctgcctggcatgaacagacccctggccagcaccgtgaacgacaagctggagctgcaggagtgcctggagcacggccggatcgccaagttcagcaaggtgagaaccatcaccacccgaagcaacagcatcaaacaaggcaaggaccagcactttcctgtgttcatgaacgagaaggaggacatcctgtggtgtaccgagatggagagagtgttcgggttcccagtccactacacagatgtcagcaacatgtctagactggccagacagagactgctgggaagaagctggtccgtccctgtgatcagacacctgttcgcccctctgaaggagtacttcgcctgcgtgagcagcggcaacagcaacgccaacagccggggccccagcttctctagcggcctggtgccactgtccctgagagggagccacatgggccccatggagatctacaaaaccgtgagcgcctggaagcggcagcctgtgcgcgtgctgagcctgtttcggaatatcgataaagtcctgaaaagcctgggattcctggagagcggctctggctccggcggtggcaccctgaagtacgtggaggatgtgacaaacgtggtcagacgggatgtggagaagtggggccccttcgatctggtgtacggcagcacccaacccctgggcagctcttgtgaccggtgccctggctggtacatgtttcagttccaccggatcctgcagtacgccctgccgagacaggagtcccagcggccattcttttggattttcatggacaacttgctgctgaccgaggatgaccaggaaactaccactcggttcctgcagaccgaagccgtgaccctgcaggacgtgagaggccgggactaccagaacgccatgcgggtgtggtccaacatccctggactgaaaagcaagcacgcacctctgacccctaaagaagaggagtacctgcaggcccaggtgcggagcagaagcaagctggacgcccctaaggtggatctgctggtgaagaattgcctcctgcccctgagagagtacttcaagtatttcagccagaatagtctgcccctgggcggcccaagcagcggcgcccctcctcccagcggcggcagcccagccggctccccaacctctaccgaggagggcacctctgagtccgccacccccgagagcggccctggcacctccaccgagcccagcgagggcagcgcacccggcagccctgccggcagccccacctccacagaggagggaaccagcaccgagcccagcgaaggcagcgccccaggcaccagcaccgagcctagtgagggcggctctggcggcggcagcgcccaggagattaaacggatcaacaagatcagaagaagacttgtgaaagacagcaacaccaagaaggccggcaagacaggccccatgaaaaccctgctggttagagtgatgacacccgatctgagagagcggctggaaaacctgagaaagaagcctgaaaatatcccccagcccatcagcaatacatctagagccaacctgaataagctgctgaccgattacaccgaaatgaagaaggcgatcctgcatgtgtactgggaagagttccagaaggaccctgtgggcctgatgagccgggtggcccagcctgccagcaagaagatcgatcagaacaagctgaaacctgagatggacgagaagggcaacctgaccaccgccggctttgcctgctctcagtgtggccagcccctgttcgtgtacaagctggagcaggtgtctgagaagggcaaggcttacaccaactacttcggacggtgcaatgtggccgagcacgaaaagctgatcctgctggcccagctgaagcccgagaaggatagcgacgaagccgtgacatatagcctgggaaagtttgggcagagggccctggatttctacagcattcatgtgaccaaggagtccacccaccccgtgaagcccctggcccagatcgccggaaacagatacgcctccggacctgtgggaaaggccctgagcgacgcatgtatgggcacaatcgcctccttcctgtctaagtaccaggacatcatcatcgaacaccagaaggtggtgaagggcaaccagaagagactggagagcctgcgggagctggccggcaaggaaaacctggaataccctagcgtgaccctgccacctcagcctcacaccaaggagggcgttgatgcctacaacgaagtgatcgcccgggtgcgaatgtgggtgaacctgaacctgtggcagaagctgaagctaagcagagatgatgccaagcctctgctgagactgaagggattcccttcctttcctctggtcgagagacaggccaacgaagtggactggtgggacatggtgtgtaacgtgaagaagctgatcaacgagaaaaaggaggatggcaaggtgttttggcagaatctggctggctacaagagacaggaagccctgagaccatacctgagcagcgaggaagatcggaagaagggaaagaaattcgctcggtaccagctgggcgacctgctgctgcacctggaaaagaagcacggcgaggactggggaaaggtgtacgacgaggcctgggagcggattgacaagaaagtggaaggcctgagcaagcacatcaagctggaagaggaacggagaagcgaggacgcccagagcaaggccgccctgaccgactggctgcgggctaaggccagcttcgtgatcgagggcctgaaggaggccgacaaggacgagttctgcagatgcgagctgaagctgcagaagtggtacggggacctgcggggaaagcccttcgccatcgaagccgagaacagcatcctggacatcagcggcttcagcaagcagtacaactgtgccttcatctggcagaaggacggcgtgaagaagctgaacctgtacctgatcatcaactacttcaagggcggcaagctgcggttcaagaagatcaaacctgaagccttcgaagccaacagattctacaccgtgatcaacaaaaagagcggcgagatcgtgcccatggaggtgaacttcaacttcgacgaccccaacctgatcatcctgcctctggcctttggcaagagacagggcagagaattcatctggaacgacctgctgtccctggaaaccggcagcctgaagctggccaacggaagagtgatcgagaagacactgtacaacagaagaacccggcaggatgagcctgccctgttcgtggccctgaccttcgagcggcgggaggtcctggactcctccaatatcaaaccaatgaacctgatcggcgtggcaagaggcgaaaacatccccgccgtgatcgccctgaccgaccccgagggctgcccactgagccggtttaaggatagcctgggaaacccaacccacatcctgagaatcggcgagagctataaggagaagcagcggaccatccaggccaagaaggaggtggagcagcggagagccggcggctacagccggaagtacgccagcaaagccaagaatctggcagacgatatggtgagaaacaccgctagagatctgctgtactacgccgtgacccaggatgccatgctgatcttcgccaacctgagccggggcttcggccggcagggcaagcggaccttcatggccgagagacagtacacacggatggaggactggctgaccgccaagctggcctacgagggcctgagcaagacctacctgtccaagacactggcccagtacacctccaagacatgcagcaactgtgggtttaccatcaccagcgccgactacgacagggtgctggagaagctgaagaagacagcaacaggctggatgaccacaattaacggcaaggagctgaaggtggagggccagattacctactacaacagatacaagagacagaacgtagtcaaggacctgtccgtcgagctggatagactgagcgaagaatctgtgaacaacgacatctcctcctggacaaagggcagaagcggagaagctctgagcctcctgaagaaaagattctcccatagacccgtgcaggagaagttcgtgtgcctgaactgcggcttcgagacacacgcagccgagcaagccgccctgaacatcgccagatcctggctgttcctgcggagccaggagtacaagaaataccagacaaacaagacaaccggcaacaccgataagagagccttcgtcgagacctggcagtccttttaccggaagaagcttaaggaggtgtggaaacctgccgtgcggtctggcggatctggcggaggctccacaagcgcccacggcagcgtgatgttcagcgacgtgagcatcgacttcagccaggaggagtgggagtacctgaacctggagcagagggacctgtacaggaacgtgatgctggagaactacagcaacctggtgagcctgggctgcttcatcagcaagcccgacgtgatcagcctgctggagcagggcaaggagccctggaaggtggtgaggaagggcaggaggccctacagcggcctggagaccaagaagaccagccccaagaaaaagagaaaagtctaagctgccttctgcggggcttgccttctggccatgcccttcttctctcccttgcacctgtacctcttggtctttgaataaagcctgagtaggaaggctagcaaaaaaaaaaaaaaaaaaaaaaaaaaaaaaaaaaaaaaaaaaaaaaaaaaaaaaaaaaaaaaaaaaaaaaaaaaaaaaaa

SEQ ID NO: 3526 - RNA, 5419 nt, synthetic construct
  source 1..5419: mol_type = other RNA
aggaaataagagagaaaagaagagtaagaagaaatataagagccaccatggcccctaagaagaagcgtaaagtgagccgggtgaacggcagcggcagcggcggcggcatgaaccacgaccaggagttcgacccccctaaggtgtaccctcccgtccccgccgagaagagaaagcccatccgggtcctgagcctgttcgatggcatcgccaccggtctgctggtgctgaaggacctgggcatccaggtggataggtacattgcctccgaggtgtgcgaggactccatcaccgtgggaatggtgcgtcatcagggcaagatcatgtacgtgggcgacgtgcggagcgtgacacagaagcatatccaggagtggggccctttcgacctggtgatcggcggcagcccttgcaatgacctgagcatcgtgaacccagcccggaagggcctgtacgagggaaccggcagactgttcttcgagttttacagactgctgcacgacgcccggcctaaggaaggcgacgaccggcccttcttttggctgttcgagaatgtggtggccatgggagtcagcgacaagcgggatattagccggttcctggagagcaaccccgtgatgatcgatgccaaggaagtgagcgccgcccaccgggccagatacttctggggcaatctgcctggcatgaacagacccctggccagcaccgtgaacgacaagctggagctgcaggagtgcctggagcacggccggatcgccaagttcagcaaggtgagaaccatcaccacccgaagcaacagcatcaaacaaggcaaggaccagcactttcctgtgttcatgaacgagaaggaggacatcctgtggtgtaccgagatggagagagtgttcgggttcccagtccactacacagatgtcagcaacatgtctagactggccagacagagactgctgggaagaagctggtccgtccctgtgatcagacacctgttcgcccctctgaaggagtacttcgcctgcgtgagcagcggcaacagcaacgccaacagccggggccccagcttctctagcggcctggtgccactgtccctgagagggagccacatgggccccatggagatctacaaaaccgtgagcgcctggaagcggcagcctgtgcgcgtgctgagcctgtttcggaatatcgataaagtcctgaaaagcctgggattcctggagagcggctctggctccggcggtggcaccctgaagtacgtggaggatgtgacaaacgtggtcagacgggatgtggagaagtggggccccttcgatctggtgtacggcagcacccaacccctgggcagctcttgtgaccggtgccctggctggtacatgtttcagttccaccggatcctgcagtacgccctgccgagacaggagtcccagcggccattcttttggattttcatggacaacttgctgctgaccgaggatgaccaggaaactaccactcggttcctgcagaccgaagccgtgaccctgcaggacgtgagaggccgggactaccagaacgccatgcgggtgtggtccaacatccctggactgaaaagcaagcacgcacctctgacccctaaagaagaggagtacctgcaggcccaggtgcggagcagaagcaagctggacgcccctaaggtggatctgctggtgaagaattgcctcctgcccctgagagagtacttcaagtatttcagccagaatagtctgcccctgggcggcccaagcagcggcgcccctcctcccagcggcggcagcccagccggctccccaacctctaccgaggagggcacctctgagtccgccacccccgagagcggccctggcacctccaccgagcccagcgagggcagcgcacccggcagccctgccggcagccccacctccacagaggagggaaccagcaccgagcccagcgaaggcagcgccccaggcaccagcaccgagcctagtgagggcggctctggcggcggcagcgcccaggagattaaacggatcaacaagatcagaagaagacttgtgaaagacagcaacaccaagaaggccggcaagacaggccccatgaaaaccctgctggttagagtgatgacacccgatctgagagagcggctggaaaacctgagaaagaagcctgaaaatatcccccagcccatcagcaatacatctagagccaacctgaataagctgctgaccgattacaccgaaatgaagaaggcgatcctgcatgtgtactgggaagagttccagaaggaccctgtgggcctgatgagccgggtggcccagcctgccagcaagaagatcgatcagaacaagctgaaacctgagatggacgagaagggcaacctgaccaccgccggctttgcctgctctcagtgtggccagcccctgttcgtgtacaagctggagcaggtgtctgagaagggcaaggcttacaccaactacttcggacggtgcaatgtggccgagcacgaaaagctgatcctgctggcccagctgaagcccgagaaggatagcgacgaagccgtgacatatagcctgggaaagtttgggcagagggccctggatttctacagcattcatgtgaccaaggagtccacccaccccgtgaagcccctggcccagatcgccggaaacagatacgcctccggacctgtgggaaaggccctgagcgacgcatgtatgggcacaatcgcctccttcctgtctaagtaccaggacatcatcatcgaacaccagaaggtggtgaagggcaaccagaagagactggagagcctgcgggagctggccggcaaggaaaacctggaataccctagcgtgaccctgccacctcagcctcacaccaaggagggcgttgatgcctacaacgaagtgatcgcccgggtgcgaatgtgggtgaacctgaacctgtggcagaagctgaagctaagcagagatgatgccaagcctctgctgagactgaagggattcccttcctttcctctggtcgagagacaggccaacgaagtggactggtgggacatggtgtgtaacgtgaagaagctgatcaacgagaaaaaggaggatggcaaggtgttttggcagaatctggctggctacaagagacaggaagccctgagaccatacctgagcagcgaggaagatcggaagaagggaaagaaattcgctcggtaccagctgggcgacctgctgctgcacctggaaaagaagcacggcgaggactggggaaaggtgtacgacgaggcctgggagcggattgacaagaaagtggaaggcctgagcaagcacatcaagctggaagaggaacggagaagcgaggacgcccagagcaaggccgccctgaccgactggctgcgggctaaggccagcttcgtgatcgagggcctgaaggaggccgacaaggacgagttctgcagatgcgagctgaagctgcagaagtggtacggggacctgcggggaaagcccttcgccatcgaagccgagaacagcatcctggacatcagcggcttcagcaagcagtacaactgtgccttcatctggcagaaggacggcgtgaagaagctgaacctgtacctgatcatcaactacttcaagggcggcaagctgcggttcaagaagatcaaacctgaagccttcgaagccaacagattctacaccgtgatcaacaaaaagagcggcgagatcgtgcccatggaggtgaacttcaacttcgacgaccccaacctgatcatcctgcctctggcctttggcaagagacagggcagagaattcatctggaacgacctgctgtccctggaaaccggcagcctgaagctggccaacggaagagtgatcgagaagacactgtacaacagaagaacccggcaggatgagcctgccctgttcgtggccctgaccttcgagcggcgggaggtcctggactcctccaatatcaaaccaatgaacctgatcggcgtggcaagaggcgaaaacatccccgccgtgatcgccctgaccgaccccgagggctgcccactgagccggtttaaggatagcctgggaaacccaacccacatcctgagaatcggcgagagctataaggagaagcagcggaccatccaggccaagaaggaggtggagcagcggagagccggcggctacagccggaagtacgccagcaaagccaagaatctggcagacgatatggtgagaaacaccgctagagatctgctgtactacgccgtgacccaggatgccatgctgatcttcgccaacctgagccggggcttcggccggcagggcaagcggaccttcatggccgagagacagtacacacggatggaggactggctgaccgccaagctggcctacgagggcctgagcaagacctacctgtccaagacactggcccagtacacctccaagacatgcagcaactgtgggtttaccatcaccagcgccgactacgacagggtgctggagaagctgaagaagacagcaacaggctggatgaccacaattaacggcaaggagctgaaggtggagggccagattacctactacaacagatacaagagacagaacgtagtcaaggacctgtccgtcgagctggatagactgagcgaagaatctgtgaacaacgacatctcctcctggacaaagggcagaagcggagaagctctgagcctcctgaagaaaagattctcccatagacccgtgcaggagaagttcgtgtgcctgaactgcggcttcgagacacacgcagccgagcaagccgccctgaacatcgccagatcctggctgttcctgcggagccaggagtacaagaaataccagacaaacaagacaaccggcaacaccgataagagagccttcgtcgagacctggcagtccttttaccggaagaagcttaaggaggtgtggaaacctgccgtgcggtctggcggatctggcggaggctccacaagcgaggagctgcccgtggtgttcgaggacgtggccgtgtacttcaccagggaggagtggggcatgctggacaagaggcagaaggagctgtacagggacgtgatgaggatgaactacgagctgctggccagcctgggccccgccgccgccaagcccgacctgatcagcaagctggagaggagggccgccccctggatcagggaccccaacggccccaagtggggcaagggcaggcccagcggcaacaccagccccaagaaaaagagaaaagtctaagctgccttctgcggggcttgccttctggccatgcccttcttctctcccttgcacctgtacctcttggtctttgaataaagcctgagtaggaaggctagcaaaaaaaaaaaaaaaaaaaaaaaaaaaaaaaaaaaaaaaaaaaaaaaaaaaaaaaaaaaaaaaaaaaaaaaaaaaaaaaa

SEQ ID NO: 3527 - RNA, 5419 nt, synthetic construct
  source 1..5419: mol_type = other RNA
aggaaataagagagaaaagaagagtaagaagaaatataagagccaccatggcccctaagaagaagcgtaaagtgagccgggtgaacggcagcggcagcggcggcggcatgaaccacgaccaggagttcgacccccctaaggtgtaccctcccgtccccgccgagaagagaaagcccatccgggtcctgagcctgttcgatggcatcgccaccggtctgctggtgctgaaggacctgggcatccaggtggataggtacattgcctccgaggtgtgcgaggactccatcaccgtgggaatggtgcgtcatcagggcaagatcatgtacgtgggcgacgtgcggagcgtgacacagaagcatatccaggagtggggccctttcgacctggtgatcggcggcagcccttgcaatgacctgagcatcgtgaacccagcccggaagggcctgtacgagggaaccggcagactgttcttcgagttttacagactgctgcacgacgcccggcctaaggaaggcgacgaccggcccttcttttggctgttcgagaatgtggtggccatgggagtcagcgacaagcgggatattagccggttcctggagagcaaccccgtgatgatcgatgccaaggaagtgagcgccgcccaccgggccagatacttctggggcaatctgcctggcatgaacagacccctggccagcaccgtgaacgacaagctggagctgcaggagtgcctggagcacggccggatcgccaagttcagcaaggtgagaaccatcaccacccgaagcaacagcatcaaacaaggcaaggaccagcactttcctgtgttcatgaacgagaaggaggacatcctgtggtgtaccgagatggagagagtgttcgggttcccagtccactacacagatgtcagcaacatgtctagactggccagacagagactgctgggaagaagctggtccgtccctgtgatcagacacctgttcgcccctctgaaggagtacttcgcctgcgtgagcagcggcaacagcaacgccaacagccggggccccagcttctctagcggcctggtgccactgtccctgagagggagccacatgggccccatggagatctacaaaaccgtgagcgcctggaagcggcagcctgtgcgcgtgctgagcctgtttcggaatatcgataaagtcctgaaaagcctgggattcctggagagcggctctggctccggcggtggcaccctgaagtacgtggaggatgtgacaaacgtggtcagacgggatgtggagaagtggggccccttcgatctggtgtacggcagcacccaacccctgggcagctcttgtgaccggtgccctggctggtacatgtttcagttccaccggatcctgcagtacgccctgccgagacaggagtcccagcggccattcttttggattttcatggacaacttgctgctgaccgaggatgaccaggaaactaccactcggttcctgcagaccgaagccgtgaccctgcaggacgtgagaggccgggactaccagaacgccatgcgggtgtggtccaacatccctggactgaaaagcaagcacgcacctctgacccctaaagaagaggagtacctgcaggcccaggtgcggagcagaagcaagctggacgcccctaaggtggatctgctggtgaagaattgcctcctgcccctgagagagtacttcaagtatttcagccagaatagtctgcccctgggcggcccaagcagcggcgcccctcctcccagcggcggcagcccagccggctccccaacctctaccgaggagggcacctctgagtccgccacccccgagagcggccctggcacctccaccgagcccagcgagggcagcgcacccggcagccctgccggcagccccacctccacagaggagggaaccagcaccgagcccagcgaaggcagcgccccaggcaccagcaccgagcctagtgagggcggctctggcggcggcagcgcccaggagattaaacggatcaacaagatcagaagaagacttgtgaaagacagcaacaccaagaaggccggcaagacaggccccatgaaaaccctgctggttagagtgatgacacccgatctgagagagcggctggaaaacctgagaaagaagcctgaaaatatcccccagcccatcagcaatacatctagagccaacctgaataagctgctgaccgattacaccgaaatgaagaaggcgatcctgcatgtgtactgggaagagttccagaaggaccctgtgggcctgatgagccgggtggcccagcctgccagcaagaagatcgatcagaacaagctgaaacctgagatggacgagaagggcaacctgaccaccgccggctttgcctgctctcagtgtggccagcccctgttcgtgtacaagctggagcaggtgtctgagaagggcaaggcttacaccaactacttcggacggtgcaatgtggccgagcacgaaaagctgatcctgctggcccagctgaagcccgagaaggatagcgacgaagccgtgacatatagcctgggaaagtttgggcagagggccctggatttctacagcattcatgtgaccaaggagtccacccaccccgtgaagcccctggcccagatcgccggaaacagatacgcctccggacctgtgggaaaggccctgagcgacgcatgtatgggcacaatcgcctccttcctgtctaagtaccaggacatcatcatcgaacaccagaaggtggtgaagggcaaccagaagagactggagagcctgcgggagctggccggcaaggaaaacctggaataccctagcgtgaccctgccacctcagcctcacaccaaggagggcgttgatgcctacaacgaagtgatcgcccgggtgcgaatgtgggtgaacctgaacctgtggcagaagctgaagctaagcagagatgatgccaagcctctgctgagactgaagggattcccttcctttcctctggtcgagagacaggccaacgaagtggactggtgggacatggtgtgtaacgtgaagaagctgatcaacgagaaaaaggaggatggcaaggtgttttggcagaatctggctggctacaagagacaggaagccctgagaccatacctgagcagcgaggaagatcggaagaagggaaagaaattcgctcggtaccagctgggcgacctgctgctgcacctggaaaagaagcacggcgaggactggggaaaggtgtacgacgaggcctgggagcggattgacaagaaagtggaaggcctgagcaagcacatcaagctggaagaggaacggagaagcgaggacgcccagagcaaggccgccctgaccgactggctgcgggctaaggccagcttcgtgatcgagggcctgaaggaggccgacaaggacgagttctgcagatgcgagctgaagctgcagaagtggtacggggacctgcggggaaagcccttcgccatcgaagccgagaacagcatcctggacatcagcggcttcagcaagcagtacaactgtgccttcatctggcagaaggacggcgtgaagaagctgaacctgtacctgatcatcaactacttcaagggcggcaagctgcggttcaagaagatcaaacctgaagccttcgaagccaacagattctacaccgtgatcaacaaaaagagcggcgagatcgtgcccatggaggtgaacttcaacttcgacgaccccaacctgatcatcctgcctctggcctttggcaagagacagggcagagaattcatctggaacgacctgctgtccctggaaaccggcagcctgaagctggccaacggaagagtgatcgagaagacactgtacaacagaagaacccggcaggatgagcctgccctgttcgtggccctgaccttcgagcggcgggaggtcctggactcctccaatatcaaaccaatgaacctgatcggcgtggcaagaggcgaaaacatccccgccgtgatcgccctgaccgaccccgagggctgcccactgagccggtttaaggatagcctgggaaacccaacccacatcctgagaatcggcgagagctataaggagaagcagcggaccatccaggccaagaaggaggtggagcagcggagagccggcggctacagccggaagtacgccagcaaagccaagaatctggcagacgatatggtgagaaacaccgctagagatctgctgtactacgccgtgacccaggatgccatgctgatcttcgccaacctgagccggggcttcggccggcagggcaagcggaccttcatggccgagagacagtacacacggatggaggactggctgaccgccaagctggcctacgagggcctgagcaagacctacctgtccaagacactggcccagtacacctccaagacatgcagcaactgtgggtttaccatcaccagcgccgactacgacagggtgctggagaagctgaagaagacagcaacaggctggatgaccacaattaacggcaaggagctgaaggtggagggccagattacctactacaacagatacaagagacagaacgtagtcaaggacctgtccgtcgagctggatagactgagcgaagaatctgtgaacaacgacatctcctcctggacaaagggcagaagcggagaagctctgagcctcctgaagaaaagattctcccatagacccgtgcaggagaagttcgtgtgcctgaactgcggcttcgagacacacgcagccgagcaagccgccctgaacatcgccagatcctggctgttcctgcggagccaggagtacaagaaataccagacaaacaagacaaccggcaacaccgataagagagccttcgtcgagacctggcagtccttttaccggaagaagcttaaggaggtgtggaaacctgccgtgcggtctggcggatctggcggaggctccacaagcaaggtgaagcagttcagcttccagagcctgctgaccttcaaggacctggccatcaacttcagcaaggaggagtgggagtacctgaacaccagccagaaggacctgtacaaggacgtgatgctggagaactacagcaacctggtgagcgtgggcctgagcgagagcaagcccgagctggtgacctgcctggagcagaacaaggagccctggatggtgcacatcgtggaggccgagggcctggagaccagccccaagaaaaagagaaaagtctaagctgccttctgcggggcttgccttctggccatgcccttcttctctcccttgcacctgtacctcttggtctttgaataaagcctgagtaggaaggctagcaaaaaaaaaaaaaaaaaaaaaaaaaaaaaaaaaaaaaaaaaaaaaaaaaaaaaaaaaaaaaaaaaaaaaaaaaaaaaaaa

SEQ ID NO: 3528 - RNA, 5419 nt, synthetic construct
  source 1..5419: mol_type = other RNA
aggaaataagagagaaaagaagagtaagaagaaatataagagccaccatggcccctaagaagaagcgtaaagtgagccgggtgaacggcagcggcagcggcggcggcatgaaccacgaccaggagttcgacccccctaaggtgtaccctcccgtccccgccgagaagagaaagcccatccgggtcctgagcctgttcgatggcatcgccaccggtctgctggtgctgaaggacctgggcatccaggtggataggtacattgcctccgaggtgtgcgaggactccatcaccgtgggaatggtgcgtcatcagggcaagatcatgtacgtgggcgacgtgcggagcgtgacacagaagcatatccaggagtggggccctttcgacctggtgatcggcggcagcccttgcaatgacctgagcatcgtgaacccagcccggaagggcctgtacgagggaaccggcagactgttcttcgagttttacagactgctgcacgacgcccggcctaaggaaggcgacgaccggcccttcttttggctgttcgagaatgtggtggccatgggagtcagcgacaagcgggatattagccggttcctggagagcaaccccgtgatgatcgatgccaaggaagtgagcgccgcccaccgggccagatacttctggggcaatctgcctggcatgaacagacccctggccagcaccgtgaacgacaagctggagctgcaggagtgcctggagcacggccggatcgccaagttcagcaaggtgagaaccatcaccacccgaagcaacagcatcaaacaaggcaaggaccagcactttcctgtgttcatgaacgagaaggaggacatcctgtggtgtaccgagatggagagagtgttcgggttcccagtccactacacagatgtcagcaacatgtctagactggccagacagagactgctgggaagaagctggtccgtccctgtgatcagacacctgttcgcccctctgaaggagtacttcgcctgcgtgagcagcggcaacagcaacgccaacagccggggccccagcttctctagcggcctggtgccactgtccctgagagggagccacatgggccccatggagatctacaaaaccgtgagcgcctggaagcggcagcctgtgcgcgtgctgagcctgtttcggaatatcgataaagtcctgaaaagcctgggattcctggagagcggctctggctccggcggtggcaccctgaagtacgtggaggatgtgacaaacgtggtcagacgggatgtggagaagtggggccccttcgatctggtgtacggcagcacccaacccctgggcagctcttgtgaccggtgccctggctggtacatgtttcagttccaccggatcctgcagtacgccctgccgagacaggagtcccagcggccattcttttggattttcatggacaacttgctgctgaccgaggatgaccaggaaactaccactcggttcctgcagaccgaagccgtgaccctgcaggacgtgagaggccgggactaccagaacgccatgcgggtgtggtccaacatccctggactgaaaagcaagcacgcacctctgacccctaaagaagaggagtacctgcaggcccaggtgcggagcagaagcaagctggacgcccctaaggtggatctgctggtgaagaattgcctcctgcccctgagagagtacttcaagtatttcagccagaatagtctgcccctgggcggcccaagcagcggcgcccctcctcccagcggcggcagcccagccggctccccaacctctaccgaggagggcacctctgagtccgccacccccgagagcggccctggcacctccaccgagcccagcgagggcagcgcacccggcagccctgccggcagccccacctccacagaggagggaaccagcaccgagcccagcgaaggcagcgccccaggcaccagcaccgagcctagtgagggcggctctggcggcggcagcgcccaggagattaaacggatcaacaagatcagaagaagacttgtgaaagacagcaacaccaagaaggccggcaagacaggccccatgaaaaccctgctggttagagtgatgacacccgatctgagagagcggctggaaaacctgagaaagaagcctgaaaatatcccccagcccatcagcaatacatctagagccaacctgaataagctgctgaccgattacaccgaaatgaagaaggcgatcctgcatgtgtactgggaagagttccagaaggaccctgtgggcctgatgagccgggtggcccagcctgccagcaagaagatcgatcagaacaagctgaaacctgagatggacgagaagggcaacctgaccaccgccggctttgcctgctctcagtgtggccagcccctgttcgtgtacaagctggagcaggtgtctgagaagggcaaggcttacaccaactacttcggacggtgcaatgtggccgagcacgaaaagctgatcctgctggcccagctgaagcccgagaaggatagcgacgaagccgtgacatatagcctgggaaagtttgggcagagggccctggatttctacagcattcatgtgaccaaggagtccacccaccccgtgaagcccctggcccagatcgccggaaacagatacgcctccggacctgtgggaaaggccctgagcgacgcatgtatgggcacaatcgcctccttcctgtctaagtaccaggacatcatcatcgaacaccagaaggtggtgaagggcaaccagaagagactggagagcctgcgggagctggccggcaaggaaaacctggaataccctagcgtgaccctgccacctcagcctcacaccaaggagggcgttgatgcctacaacgaagtgatcgcccgggtgcgaatgtgggtgaacctgaacctgtggcagaagctgaagctaagcagagatgatgccaagcctctgctgagactgaagggattcccttcctttcctctggtcgagagacaggccaacgaagtggactggtgggacatggtgtgtaacgtgaagaagctgatcaacgagaaaaaggaggatggcaaggtgttttggcagaatctggctggctacaagagacaggaagccctgagaccatacctgagcagcgaggaagatcggaagaagggaaagaaattcgctcggtaccagctgggcgacctgctgctgcacctggaaaagaagcacggcgaggactggggaaaggtgtacgacgaggcctgggagcggattgacaagaaagtggaaggcctgagcaagcacatcaagctggaagaggaacggagaagcgaggacgcccagagcaaggccgccctgaccgactggctgcgggctaaggccagcttcgtgatcgagggcctgaaggaggccgacaaggacgagttctgcagatgcgagctgaagctgcagaagtggtacggggacctgcggggaaagcccttcgccatcgaagccgagaacagcatcctggacatcagcggcttcagcaagcagtacaactgtgccttcatctggcagaaggacggcgtgaagaagctgaacctgtacctgatcatcaactacttcaagggcggcaagctgcggttcaagaagatcaaacctgaagccttcgaagccaacagattctacaccgtgatcaacaaaaagagcggcgagatcgtgcccatggaggtgaacttcaacttcgacgaccccaacctgatcatcctgcctctggcctttggcaagagacagggcagagaattcatctggaacgacctgctgtccctggaaaccggcagcctgaagctggccaacggaagagtgatcgagaagacactgtacaacagaagaacccggcaggatgagcctgccctgttcgtggccctgaccttcgagcggcgggaggtcctggactcctccaatatcaaaccaatgaacctgatcggcgtggcaagaggcgaaaacatccccgccgtgatcgccctgaccgaccccgagggctgcccactgagccggtttaaggatagcctgggaaacccaacccacatcctgagaatcggcgagagctataaggagaagcagcggaccatccaggccaagaaggaggtggagcagcggagagccggcggctacagccggaagtacgccagcaaagccaagaatctggcagacgatatggtgagaaacaccgctagagatctgctgtactacgccgtgacccaggatgccatgctgatcttcgccaacctgagccggggcttcggccggcagggcaagcggaccttcatggccgagagacagtacacacggatggaggactggctgaccgccaagctggcctacgagggcctgagcaagacctacctgtccaagacactggcccagtacacctccaagacatgcagcaactgtgggtttaccatcaccagcgccgactacgacagggtgctggagaagctgaagaagacagcaacaggctggatgaccacaattaacggcaaggagctgaaggtggagggccagattacctactacaacagatacaagagacagaacgtagtcaaggacctgtccgtcgagctggatagactgagcgaagaatctgtgaacaacgacatctcctcctggacaaagggcagaagcggagaagctctgagcctcctgaagaaaagattctcccatagacccgtgcaggagaagttcgtgtgcctgaactgcggcttcgagacacacgcagccgagcaagccgccctgaacatcgccagatcctggctgttcctgcggagccaggagtacaagaaataccagacaaacaagacaaccggcaacaccgataagagagccttcgtcgagacctggcagtccttttaccggaagaagcttaaggaggtgtggaaacctgccgtgcggtctggcggatctggcggaggctccacaagcttccaggacagcgtgaccttcgaggacgtggccgtgaggttcagcagcggcgagtggcagtgcctgaccagggcccagaggcacctgtacgccgacgtgatgctggagaactactggaacgtgatcagcgtgggcttcgccgtgcccaagccccccctgatcagccacctggagcagggcgccgagccctgcgtgcaggacctgcaggacggcggcttcctgagctgcagcttccccgtgagcaccagccccaagaaaaagagaaaagtctaagctgccttctgcggggcttgccttctggccatgcccttcttctctcccttgcacctgtacctcttggtctttgaataaagcctgagtaggaaggctagcaaaaaaaaaaaaaaaaaaaaaaaaaaaaaaaaaaaaaaaaaaaaaaaaaaaaaaaaaaaaaaaaaaaaaaaaaaaaaaaa

SEQ ID NO: 3529 - RNA, 5419 nt, synthetic construct
  source 1..5419: mol_type = other RNA
aggaaataagagagaaaagaagagtaagaagaaatataagagccaccatggcccctaagaagaagcgtaaagtgagccgggtgaacggcagcggcagcggcggcggcatgaaccacgaccaggagttcgacccccctaaggtgtaccctcccgtccccgccgagaagagaaagcccatccgggtcctgagcctgttcgatggcatcgccaccggtctgctggtgctgaaggacctgggcatccaggtggataggtacattgcctccgaggtgtgcgaggactccatcaccgtgggaatggtgcgtcatcagggcaagatcatgtacgtgggcgacgtgcggagcgtgacacagaagcatatccaggagtggggccctttcgacctggtgatcggcggcagcccttgcaatgacctgagcatcgtgaacccagcccggaagggcctgtacgagggaaccggcagactgttcttcgagttttacagactgctgcacgacgcccggcctaaggaaggcgacgaccggcccttcttttggctgttcgagaatgtggtggccatgggagtcagcgacaagcgggatattagccggttcctggagagcaaccccgtgatgatcgatgccaaggaagtgagcgccgcccaccgggccagatacttctggggcaatctgcctggcatgaacagacccctggccagcaccgtgaacgacaagctggagctgcaggagtgcctggagcacggccggatcgccaagttcagcaaggtgagaaccatcaccacccgaagcaacagcatcaaacaaggcaaggaccagcactttcctgtgttcatgaacgagaaggaggacatcctgtggtgtaccgagatggagagagtgttcgggttcccagtccactacacagatgtcagcaacatgtctagactggccagacagagactgctgggaagaagctggtccgtccctgtgatcagacacctgttcgcccctctgaaggagtacttcgcctgcgtgagcagcggcaacagcaacgccaacagccggggccccagcttctctagcggcctggtgccactgtccctgagagggagccacatgggccccatggagatctacaaaaccgtgagcgcctggaagcggcagcctgtgcgcgtgctgagcctgtttcggaatatcgataaagtcctgaaaagcctgggattcctggagagcggctctggctccggcggtggcaccctgaagtacgtggaggatgtgacaaacgtggtcagacgggatgtggagaagtggggccccttcgatctggtgtacggcagcacccaacccctgggcagctcttgtgaccggtgccctggctggtacatgtttcagttccaccggatcctgcagtacgccctgccgagacaggagtcccagcggccattcttttggattttcatggacaacttgctgctgaccgaggatgaccaggaaactaccactcggttcctgcagaccgaagccgtgaccctgcaggacgtgagaggccgggactaccagaacgccatgcgggtgtggtccaacatccctggactgaaaagcaagcacgcacctctgacccctaaagaagaggagtacctgcaggcccaggtgcggagcagaagcaagctggacgcccctaaggtggatctgctggtgaagaattgcctcctgcccctgagagagtacttcaagtatttcagccagaatagtctgcccctgggcggcccaagcagcggcgcccctcctcccagcggcggcagcccagccggctccccaacctctaccgaggagggcacctctgagtccgccacccccgagagcggccctggcacctccaccgagcccagcgagggcagcgcacccggcagccctgccggcagccccacctccacagaggagggaaccagcaccgagcccagcgaaggcagcgccccaggcaccagcaccgagcctagtgagggcggctctggcggcggcagcgcccaggagattaaacggatcaacaagatcagaagaagacttgtgaaagacagcaacaccaagaaggccggcaagacaggccccatgaaaaccctgctggttagagtgatgacacccgatctgagagagcggctggaaaacctgagaaagaagcctgaaaatatcccccagcccatcagcaatacatctagagccaacctgaataagctgctgaccgattacaccgaaatgaagaaggcgatcctgcatgtgtactgggaagagttccagaaggaccctgtgggcctgatgagccgggtggcccagcctgccagcaagaagatcgatcagaacaagctgaaacctgagatggacgagaagggcaacctgaccaccgccggctttgcctgctctcagtgtggccagcccctgttcgtgtacaagctggagcaggtgtctgagaagggcaaggcttacaccaactacttcggacggtgcaatgtggccgagcacgaaaagctgatcctgctggcccagctgaagcccgagaaggatagcgacgaagccgtgacatatagcctgggaaagtttgggcagagggccctggatttctacagcattcatgtgaccaaggagtccacccaccccgtgaagcccctggcccagatcgccggaaacagatacgcctccggacctgtgggaaaggccctgagcgacgcatgtatgggcacaatcgcctccttcctgtctaagtaccaggacatcatcatcgaacaccagaaggtggtgaagggcaaccagaagagactggagagcctgcgggagctggccggcaaggaaaacctggaataccctagcgtgaccctgccacctcagcctcacaccaaggagggcgttgatgcctacaacgaagtgatcgcccgggtgcgaatgtgggtgaacctgaacctgtggcagaagctgaagctaagcagagatgatgccaagcctctgctgagactgaagggattcccttcctttcctctggtcgagagacaggccaacgaagtggactggtgggacatggtgtgtaacgtgaagaagctgatcaacgagaaaaaggaggatggcaaggtgttttggcagaatctggctggctacaagagacaggaagccctgagaccatacctgagcagcgaggaagatcggaagaagggaaagaaattcgctcggtaccagctgggcgacctgctgctgcacctggaaaagaagcacggcgaggactggggaaaggtgtacgacgaggcctgggagcggattgacaagaaagtggaaggcctgagcaagcacatcaagctggaagaggaacggagaagcgaggacgcccagagcaaggccgccctgaccgactggctgcgggctaaggccagcttcgtgatcgagggcctgaaggaggccgacaaggacgagttctgcagatgcgagctgaagctgcagaagtggtacggggacctgcggggaaagcccttcgccatcgaagccgagaacagcatcctggacatcagcggcttcagcaagcagtacaactgtgccttcatctggcagaaggacggcgtgaagaagctgaacctgtacctgatcatcaactacttcaagggcggcaagctgcggttcaagaagatcaaacctgaagccttcgaagccaacagattctacaccgtgatcaacaaaaagagcggcgagatcgtgcccatggaggtgaacttcaacttcgacgaccccaacctgatcatcctgcctctggcctttggcaagagacagggcagagaattcatctggaacgacctgctgtccctggaaaccggcagcctgaagctggccaacggaagagtgatcgagaagacactgtacaacagaagaacccggcaggatgagcctgccctgttcgtggccctgaccttcgagcggcgggaggtcctggactcctccaatatcaaaccaatgaacctgatcggcgtggcaagaggcgaaaacatccccgccgtgatcgccctgaccgaccccgagggctgcccactgagccggtttaaggatagcctgggaaacccaacccacatcctgagaatcggcgagagctataaggagaagcagcggaccatccaggccaagaaggaggtggagcagcggagagccggcggctacagccggaagtacgccagcaaagccaagaatctggcagacgatatggtgagaaacaccgctagagatctgctgtactacgccgtgacccaggatgccatgctgatcttcgccaacctgagccggggcttcggccggcagggcaagcggaccttcatggccgagagacagtacacacggatggaggactggctgaccgccaagctggcctacgagggcctgagcaagacctacctgtccaagacactggcccagtacacctccaagacatgcagcaactgtgggtttaccatcaccagcgccgactacgacagggtgctggagaagctgaagaagacagcaacaggctggatgaccacaattaacggcaaggagctgaaggtggagggccagattacctactacaacagatacaagagacagaacgtagtcaaggacctgtccgtcgagctggatagactgagcgaagaatctgtgaacaacgacatctcctcctggacaaagggcagaagcggagaagctctgagcctcctgaagaaaagattctcccatagacccgtgcaggagaagttcgtgtgcctgaactgcggcttcgagacacacgcagccgagcaagccgccctgaacatcgccagatcctggctgttcctgcggagccaggagtacaagaaataccagacaaacaagacaaccggcaacaccgataagagagccttcgtcgagacctggcagtccttttaccggaagaagcttaaggaggtgtggaaacctgccgtgcggtctggcggatctggcggaggctccacaagcgcccaggcccccctgagcttcgaggacgtggccgtgggcttcagccccgaggagtggcagctgctggcccccgcccagaaggacctgtacagggacgtgatgctggagaactacaggaacctggtgagcctgggctaccaggccagcaagcccgacagcctgttccagctggagcacggcggccccccctgggccgtgggcggcgccgcccccaggcccccctgcgccgaggagatctgggagaccagccccaagaaaaagagaaaagtctaagctgccttctgcggggcttgccttctggccatgcccttcttctctcccttgcacctgtacctcttggtctttgaataaagcctgagtaggaaggctagcaaaaaaaaaaaaaaaaaaaaaaaaaaaaaaaaaaaaaaaaaaaaaaaaaaaaaaaaaaaaaaaaaaaaaaaaaaaaaaaa

SEQ ID NO: 3530 - RNA, 5419 nt, synthetic construct
  source 1..5419: mol_type = other RNA
aggaaataagagagaaaagaagagtaagaagaaatataagagccaccatggcccctaagaagaagcgtaaagtgagccgggtgaacggcagcggcagcggcggcggcatgaaccacgaccaggagttcgacccccctaaggtgtaccctcccgtccccgccgagaagagaaagcccatccgggtcctgagcctgttcgatggcatcgccaccggtctgctggtgctgaaggacctgggcatccaggtggataggtacattgcctccgaggtgtgcgaggactccatcaccgtgggaatggtgcgtcatcagggcaagatcatgtacgtgggcgacgtgcggagcgtgacacagaagcatatccaggagtggggccctttcgacctggtgatcggcggcagcccttgcaatgacctgagcatcgtgaacccagcccggaagggcctgtacgagggaaccggcagactgttcttcgagttttacagactgctgcacgacgcccggcctaaggaaggcgacgaccggcccttcttttggctgttcgagaatgtggtggccatgggagtcagcgacaagcgggatattagccggttcctggagagcaaccccgtgatgatcgatgccaaggaagtgagcgccgcccaccgggccagatacttctggggcaatctgcctggcatgaacagacccctggccagcaccgtgaacgacaagctggagctgcaggagtgcctggagcacggccggatcgccaagttcagcaaggtgagaaccatcaccacccgaagcaacagcatcaaacaaggcaaggaccagcactttcctgtgttcatgaacgagaaggaggacatcctgtggtgtaccgagatggagagagtgttcgggttcccagtccactacacagatgtcagcaacatgtctagactggccagacagagactgctgggaagaagctggtccgtccctgtgatcagacacctgttcgcccctctgaaggagtacttcgcctgcgtgagcagcggcaacagcaacgccaacagccggggccccagcttctctagcggcctggtgccactgtccctgagagggagccacatgggccccatggagatctacaaaaccgtgagcgcctggaagcggcagcctgtgcgcgtgctgagcctgtttcggaatatcgataaagtcctgaaaagcctgggattcctggagagcggctctggctccggcggtggcaccctgaagtacgtggaggatgtgacaaacgtggtcagacgggatgtggagaagtggggccccttcgatctggtgtacggcagcacccaacccctgggcagctcttgtgaccggtgccctggctggtacatgtttcagttccaccggatcctgcagtacgccctgccgagacaggagtcccagcggccattcttttggattttcatggacaacttgctgctgaccgaggatgaccaggaaactaccactcggttcctgcagaccgaagccgtgaccctgcaggacgtgagaggccgggactaccagaacgccatgcgggtgtggtccaacatccctggactgaaaagcaagcacgcacctctgacccctaaagaagaggagtacctgcaggcccaggtgcggagcagaagcaagctggacgcccctaaggtggatctgctggtgaagaattgcctcctgcccctgagagagtacttcaagtatttcagccagaatagtctgcccctgggcggcccaagcagcggcgcccctcctcccagcggcggcagcccagccggctccccaacctctaccgaggagggcacctctgagtccgccacccccgagagcggccctggcacctccaccgagcccagcgagggcagcgcacccggcagccctgccggcagccccacctccacagaggagggaaccagcaccgagcccagcgaaggcagcgccccaggcaccagcaccgagcctagtgagggcggctctggcggcggcagcgcccaggagattaaacggatcaacaagatcagaagaagacttgtgaaagacagcaacaccaagaaggccggcaagacaggccccatgaaaaccctgctggttagagtgatgacacccgatctgagagagcggctggaaaacctgagaaagaagcctgaaaatatcccccagcccatcagcaatacatctagagccaacctgaataagctgctgaccgattacaccgaaatgaagaaggcgatcctgcatgtgtactgggaagagttccagaaggaccctgtgggcctgatgagccgggtggcccagcctgccagcaagaagatcgatcagaacaagctgaaacctgagatggacgagaagggcaacctgaccaccgccggctttgcctgctctcagtgtggccagcccctgttcgtgtacaagctggagcaggtgtctgagaagggcaaggcttacaccaactacttcggacggtgcaatgtggccgagcacgaaaagctgatcctgctggcccagctgaagcccgagaaggatagcgacgaagccgtgacatatagcctgggaaagtttgggcagagggccctggatttctacagcattcatgtgaccaaggagtccacccaccccgtgaagcccctggcccagatcgccggaaacagatacgcctccggacctgtgggaaaggccctgagcgacgcatgtatgggcacaatcgcctccttcctgtctaagtaccaggacatcatcatcgaacaccagaaggtggtgaagggcaaccagaagagactggagagcctgcgggagctggccggcaaggaaaacctggaataccctagcgtgaccctgccacctcagcctcacaccaaggagggcgttgatgcctacaacgaagtgatcgcccgggtgcgaatgtgggtgaacctgaacctgtggcagaagctgaagctaagcagagatgatgccaagcctctgctgagactgaagggattcccttcctttcctctggtcgagagacaggccaacgaagtggactggtgggacatggtgtgtaacgtgaagaagctgatcaacgagaaaaaggaggatggcaaggtgttttggcagaatctggctggctacaagagacaggaagccctgagaccatacctgagcagcgaggaagatcggaagaagggaaagaaattcgctcggtaccagctgggcgacctgctgctgcacctggaaaagaagcacggcgaggactggggaaaggtgtacgacgaggcctgggagcggattgacaagaaagtggaaggcctgagcaagcacatcaagctggaagaggaacggagaagcgaggacgcccagagcaaggccgccctgaccgactggctgcgggctaaggccagcttcgtgatcgagggcctgaaggaggccgacaaggacgagttctgcagatgcgagctgaagctgcagaagtggtacggggacctgcggggaaagcccttcgccatcgaagccgagaacagcatcctggacatcagcggcttcagcaagcagtacaactgtgccttcatctggcagaaggacggcgtgaagaagctgaacctgtacctgatcatcaactacttcaagggcggcaagctgcggttcaagaagatcaaacctgaagccttcgaagccaacagattctacaccgtgatcaacaaaaagagcggcgagatcgtgcccatggaggtgaacttcaacttcgacgaccccaacctgatcatcctgcctctggcctttggcaagagacagggcagagaattcatctggaacgacctgctgtccctggaaaccggcagcctgaagctggccaacggaagagtgatcgagaagacactgtacaacagaagaacccggcaggatgagcctgccctgttcgtggccctgaccttcgagcggcgggaggtcctggactcctccaatatcaaaccaatgaacctgatcggcgtggcaagaggcgaaaacatccccgccgtgatcgccctgaccgaccccgagggctgcccactgagccggtttaaggatagcctgggaaacccaacccacatcctgagaatcggcgagagctataaggagaagcagcggaccatccaggccaagaaggaggtggagcagcggagagccggcggctacagccggaagtacgccagcaaagccaagaatctggcagacgatatggtgagaaacaccgctagagatctgctgtactacgccgtgacccaggatgccatgctgatcttcgccaacctgagccggggcttcggccggcagggcaagcggaccttcatggccgagagacagtacacacggatggaggactggctgaccgccaagctggcctacgagggcctgagcaagacctacctgtccaagacactggcccagtacacctccaagacatgcagcaactgtgggtttaccatcaccagcgccgactacgacagggtgctggagaagctgaagaagacagcaacaggctggatgaccacaattaacggcaaggagctgaaggtggagggccagattacctactacaacagatacaagagacagaacgtagtcaaggacctgtccgtcgagctggatagactgagcgaagaatctgtgaacaacgacatctcctcctggacaaagggcagaagcggagaagctctgagcctcctgaagaaaagattctcccatagacccgtgcaggagaagttcgtgtgcctgaactgcggcttcgagacacacgcagccgagcaagccgccctgaacatcgccagatcctggctgttcctgcggagccaggagtacaagaaataccagacaaacaagacaaccggcaacaccgataagagagccttcgtcgagacctggcagtccttttaccggaagaagcttaaggaggtgtggaaacctgccgtgcggtctggcggatctggcggaggctccacaagcgcccacaggagcctgatgttcagcgacgtgagcatcgtgttcagccaggaggagtgggagtacctggacctggagcagagggacctgtacagggacgtgatgctggagaactacagcaacctggtgagcctgggctgcttcatcagcaagcccgacgtgatcagcctgctggagcagggcaaggagccctggaaggtggtgagaaagggcaggaggaggtacgccgcccccatgagcatcgccaccagccccaagaaaaagagaaaagtctaagctgccttctgcggggcttgccttctggccatgcccttcttctctcccttgcacctgtacctcttggtctttgaataaagcctgagtaggaaggctagcaaaaaaaaaaaaaaaaaaaaaaaaaaaaaaaaaaaaaaaaaaaaaaaaaaaaaaaaaaaaaaaaaaaaaaaaaaaaaaaa

SEQ ID NO: 3531 - RNA, 5419 nt, synthetic construct
  source 1..5419: mol_type = other RNA
aggaaataagagagaaaagaagagtaagaagaaatataagagccaccatggcccctaagaagaagcgtaaagtgagccgggtgaacggcagcggcagcggcggcggcatgaaccacgaccaggagttcgacccccctaaggtgtaccctcccgtccccgccgagaagagaaagcccatccgggtcctgagcctgttcgatggcatcgccaccggtctgctggtgctgaaggacctgggcatccaggtggataggtacattgcctccgaggtgtgcgaggactccatcaccgtgggaatggtgcgtcatcagggcaagatcatgtacgtgggcgacgtgcggagcgtgacacagaagcatatccaggagtggggccctttcgacctggtgatcggcggcagcccttgcaatgacctgagcatcgtgaacccagcccggaagggcctgtacgagggaaccggcagactgttcttcgagttttacagactgctgcacgacgcccggcctaaggaaggcgacgaccggcccttcttttggctgttcgagaatgtggtggccatgggagtcagcgacaagcgggatattagccggttcctggagagcaaccccgtgatgatcgatgccaaggaagtgagcgccgcccaccgggccagatacttctggggcaatctgcctggcatgaacagacccctggccagcaccgtgaacgacaagctggagctgcaggagtgcctggagcacggccggatcgccaagttcagcaaggtgagaaccatcaccacccgaagcaacagcatcaaacaaggcaaggaccagcactttcctgtgttcatgaacgagaaggaggacatcctgtggtgtaccgagatggagagagtgttcgggttcccagtccactacacagatgtcagcaacatgtctagactggccagacagagactgctgggaagaagctggtccgtccctgtgatcagacacctgttcgcccctctgaaggagtacttcgcctgcgtgagcagcggcaacagcaacgccaacagccggggccccagcttctctagcggcctggtgccactgtccctgagagggagccacatgggccccatggagatctacaaaaccgtgagcgcctggaagcggcagcctgtgcgcgtgctgagcctgtttcggaatatcgataaagtcctgaaaagcctgggattcctggagagcggctctggctccggcggtggcaccctgaagtacgtggaggatgtgacaaacgtggtcagacgggatgtggagaagtggggccccttcgatctggtgtacggcagcacccaacccctgggcagctcttgtgaccggtgccctggctggtacatgtttcagttccaccggatcctgcagtacgccctgccgagacaggagtcccagcggccattcttttggattttcatggacaacttgctgctgaccgaggatgaccaggaaactaccactcggttcctgcagaccgaagccgtgaccctgcaggacgtgagaggccgggactaccagaacgccatgcgggtgtggtccaacatccctggactgaaaagcaagcacgcacctctgacccctaaagaagaggagtacctgcaggcccaggtgcggagcagaagcaagctggacgcccctaaggtggatctgctggtgaagaattgcctcctgcccctgagagagtacttcaagtatttcagccagaatagtctgcccctgggcggcccaagcagcggcgcccctcctcccagcggcggcagcccagccggctccccaacctctaccgaggagggcacctctgagtccgccacccccgagagcggccctggcacctccaccgagcccagcgagggcagcgcacccggcagccctgccggcagccccacctccacagaggagggaaccagcaccgagcccagcgaaggcagcgccccaggcaccagcaccgagcctagtgagggcggctctggcggcggcagcgcccaggagattaaacggatcaacaagatcagaagaagacttgtgaaagacagcaacaccaagaaggccggcaagacaggccccatgaaaaccctgctggttagagtgatgacacccgatctgagagagcggctggaaaacctgagaaagaagcctgaaaatatcccccagcccatcagcaatacatctagagccaacctgaataagctgctgaccgattacaccgaaatgaagaaggcgatcctgcatgtgtactgggaagagttccagaaggaccctgtgggcctgatgagccgggtggcccagcctgccagcaagaagatcgatcagaacaagctgaaacctgagatggacgagaagggcaacctgaccaccgccggctttgcctgctctcagtgtggccagcccctgttcgtgtacaagctggagcaggtgtctgagaagggcaaggcttacaccaactacttcggacggtgcaatgtggccgagcacgaaaagctgatcctgctggcccagctgaagcccgagaaggatagcgacgaagccgtgacatatagcctgggaaagtttgggcagagggccctggatttctacagcattcatgtgaccaaggagtccacccaccccgtgaagcccctggcccagatcgccggaaacagatacgcctccggacctgtgggaaaggccctgagcgacgcatgtatgggcacaatcgcctccttcctgtctaagtaccaggacatcatcatcgaacaccagaaggtggtgaagggcaaccagaagagactggagagcctgcgggagctggccggcaaggaaaacctggaataccctagcgtgaccctgccacctcagcctcacaccaaggagggcgttgatgcctacaacgaagtgatcgcccgggtgcgaatgtgggtgaacctgaacctgtggcagaagctgaagctaagcagagatgatgccaagcctctgctgagactgaagggattcccttcctttcctctggtcgagagacaggccaacgaagtggactggtgggacatggtgtgtaacgtgaagaagctgatcaacgagaaaaaggaggatggcaaggtgttttggcagaatctggctggctacaagagacaggaagccctgagaccatacctgagcagcgaggaagatcggaagaagggaaagaaattcgctcggtaccagctgggcgacctgctgctgcacctggaaaagaagcacggcgaggactggggaaaggtgtacgacgaggcctgggagcggattgacaagaaagtggaaggcctgagcaagcacatcaagctggaagaggaacggagaagcgaggacgcccagagcaaggccgccctgaccgactggctgcgggctaaggccagcttcgtgatcgagggcctgaaggaggccgacaaggacgagttctgcagatgcgagctgaagctgcagaagtggtacggggacctgcggggaaagcccttcgccatcgaagccgagaacagcatcctggacatcagcggcttcagcaagcagtacaactgtgccttcatctggcagaaggacggcgtgaagaagctgaacctgtacctgatcatcaactacttcaagggcggcaagctgcggttcaagaagatcaaacctgaagccttcgaagccaacagattctacaccgtgatcaacaaaaagagcggcgagatcgtgcccatggaggtgaacttcaacttcgacgaccccaacctgatcatcctgcctctggcctttggcaagagacagggcagagaattcatctggaacgacctgctgtccctggaaaccggcagcctgaagctggccaacggaagagtgatcgagaagacactgtacaacagaagaacccggcaggatgagcctgccctgttcgtggccctgaccttcgagcggcgggaggtcctggactcctccaatatcaaaccaatgaacctgatcggcgtggcaagaggcgaaaacatccccgccgtgatcgccctgaccgaccccgagggctgcccactgagccggtttaaggatagcctgggaaacccaacccacatcctgagaatcggcgagagctataaggagaagcagcggaccatccaggccaagaaggaggtggagcagcggagagccggcggctacagccggaagtacgccagcaaagccaagaatctggcagacgatatggtgagaaacaccgctagagatctgctgtactacgccgtgacccaggatgccatgctgatcttcgccaacctgagccggggcttcggccggcagggcaagcggaccttcatggccgagagacagtacacacggatggaggactggctgaccgccaagctggcctacgagggcctgagcaagacctacctgtccaagacactggcccagtacacctccaagacatgcagcaactgtgggtttaccatcaccagcgccgactacgacagggtgctggagaagctgaagaagacagcaacaggctggatgaccacaattaacggcaaggagctgaaggtggagggccagattacctactacaacagatacaagagacagaacgtagtcaaggacctgtccgtcgagctggatagactgagcgaagaatctgtgaacaacgacatctcctcctggacaaagggcagaagcggagaagctctgagcctcctgaagaaaagattctcccatagacccgtgcaggagaagttcgtgtgcctgaactgcggcttcgagacacacgcagccgagcaagccgccctgaacatcgccagatcctggctgttcctgcggagccaggagtacaagaaataccagacaaacaagacaaccggcaacaccgataagagagccttcgtcgagacctggcagtccttttaccggaagaagcttaaggaggtgtggaaacctgccgtgcggtctggcggatctggcggaggctccacaagcagcctgggccccctgagcttcaaggacgtggccgtggccttcagccaggaggagtggcagcagctggaccccgaggagaggaccacctacagggacgtgatgctggagacctacagcaacctggtgagcgtgggctacgacatcatcaagcccgacgtgatcatcaagctggagcagggcgaggagccctggatcgtggagggcgccttcagcccccagagctaccccgacgagatcaggcacaccagccccaagaaaaagagaaaagtctaagctgccttctgcggggcttgccttctggccatgcccttcttctctcccttgcacctgtacctcttggtctttgaataaagcctgagtaggaaggctagcaaaaaaaaaaaaaaaaaaaaaaaaaaaaaaaaaaaaaaaaaaaaaaaaaaaaaaaaaaaaaaaaaaaaaaaaaaaaaaaa

SEQ ID NO: 3532 - RNA, 5419 nt, synthetic construct
  source 1..5419: mol_type = other RNA
aggaaataagagagaaaagaagagtaagaagaaatataagagccaccatggcccctaagaagaagcgtaaagtgagccgggtgaacggcagcggcagcggcggcggcatgaaccacgaccaggagttcgacccccctaaggtgtaccctcccgtccccgccgagaagagaaagcccatccgggtcctgagcctgttcgatggcatcgccaccggtctgctggtgctgaaggacctgggcatccaggtggataggtacattgcctccgaggtgtgcgaggactccatcaccgtgggaatggtgcgtcatcagggcaagatcatgtacgtgggcgacgtgcggagcgtgacacagaagcatatccaggagtggggccctttcgacctggtgatcggcggcagcccttgcaatgacctgagcatcgtgaacccagcccggaagggcctgtacgagggaaccggcagactgttcttcgagttttacagactgctgcacgacgcccggcctaaggaaggcgacgaccggcccttcttttggctgttcgagaatgtggtggccatgggagtcagcgacaagcgggatattagccggttcctggagagcaaccccgtgatgatcgatgccaaggaagtgagcgccgcccaccgggccagatacttctggggcaatctgcctggcatgaacagacccctggccagcaccgtgaacgacaagctggagctgcaggagtgcctggagcacggccggatcgccaagttcagcaaggtgagaaccatcaccacccgaagcaacagcatcaaacaaggcaaggaccagcactttcctgtgttcatgaacgagaaggaggacatcctgtggtgtaccgagatggagagagtgttcgggttcccagtccactacacagatgtcagcaacatgtctagactggccagacagagactgctgggaagaagctggtccgtccctgtgatcagacacctgttcgcccctctgaaggagtacttcgcctgcgtgagcagcggcaacagcaacgccaacagccggggccccagcttctctagcggcctggtgccactgtccctgagagggagccacatgggccccatggagatctacaaaaccgtgagcgcctggaagcggcagcctgtgcgcgtgctgagcctgtttcggaatatcgataaagtcctgaaaagcctgggattcctggagagcggctctggctccggcggtggcaccctgaagtacgtggaggatgtgacaaacgtggtcagacgggatgtggagaagtggggccccttcgatctggtgtacggcagcacccaacccctgggcagctcttgtgaccggtgccctggctggtacatgtttcagttccaccggatcctgcagtacgccctgccgagacaggagtcccagcggccattcttttggattttcatggacaacttgctgctgaccgaggatgaccaggaaactaccactcggttcctgcagaccgaagccgtgaccctgcaggacgtgagaggccgggactaccagaacgccatgcgggtgtggtccaacatccctggactgaaaagcaagcacgcacctctgacccctaaagaagaggagtacctgcaggcccaggtgcggagcagaagcaagctggacgcccctaaggtggatctgctggtgaagaattgcctcctgcccctgagagagtacttcaagtatttcagccagaatagtctgcccctgggcggcccaagcagcggcgcccctcctcccagcggcggcagcccagccggctccccaacctctaccgaggagggcacctctgagtccgccacccccgagagcggccctggcacctccaccgagcccagcgagggcagcgcacccggcagccctgccggcagccccacctccacagaggagggaaccagcaccgagcccagcgaaggcagcgccccaggcaccagcaccgagcctagtgagggcggctctggcggcggcagcgcccaggagattaaacggatcaacaagatcagaagaagacttgtgaaagacagcaacaccaagaaggccggcaagacaggccccatgaaaaccctgctggttagagtgatgacacccgatctgagagagcggctggaaaacctgagaaagaagcctgaaaatatcccccagcccatcagcaatacatctagagccaacctgaataagctgctgaccgattacaccgaaatgaagaaggcgatcctgcatgtgtactgggaagagttccagaaggaccctgtgggcctgatgagccgggtggcccagcctgccagcaagaagatcgatcagaacaagctgaaacctgagatggacgagaagggcaacctgaccaccgccggctttgcctgctctcagtgtggccagcccctgttcgtgtacaagctggagcaggtgtctgagaagggcaaggcttacaccaactacttcggacggtgcaatgtggccgagcacgaaaagctgatcctgctggcccagctgaagcccgagaaggatagcgacgaagccgtgacatatagcctgggaaagtttgggcagagggccctggatttctacagcattcatgtgaccaaggagtccacccaccccgtgaagcccctggcccagatcgccggaaacagatacgcctccggacctgtgggaaaggccctgagcgacgcatgtatgggcacaatcgcctccttcctgtctaagtaccaggacatcatcatcgaacaccagaaggtggtgaagggcaaccagaagagactggagagcctgcgggagctggccggcaaggaaaacctggaataccctagcgtgaccctgccacctcagcctcacaccaaggagggcgttgatgcctacaacgaagtgatcgcccgggtgcgaatgtgggtgaacctgaacctgtggcagaagctgaagctaagcagagatgatgccaagcctctgctgagactgaagggattcccttcctttcctctggtcgagagacaggccaacgaagtggactggtgggacatggtgtgtaacgtgaagaagctgatcaacgagaaaaaggaggatggcaaggtgttttggcagaatctggctggctacaagagacaggaagccctgagaccatacctgagcagcgaggaagatcggaagaagggaaagaaattcgctcggtaccagctgggcgacctgctgctgcacctggaaaagaagcacggcgaggactggggaaaggtgtacgacgaggcctgggagcggattgacaagaaagtggaaggcctgagcaagcacatcaagctggaagaggaacggagaagcgaggacgcccagagcaaggccgccctgaccgactggctgcgggctaaggccagcttcgtgatcgagggcctgaaggaggccgacaaggacgagttctgcagatgcgagctgaagctgcagaagtggtacggggacctgcggggaaagcccttcgccatcgaagccgagaacagcatcctggacatcagcggcttcagcaagcagtacaactgtgccttcatctggcagaaggacggcgtgaagaagctgaacctgtacctgatcatcaactacttcaagggcggcaagctgcggttcaagaagatcaaacctgaagccttcgaagccaacagattctacaccgtgatcaacaaaaagagcggcgagatcgtgcccatggaggtgaacttcaacttcgacgaccccaacctgatcatcctgcctctggcctttggcaagagacagggcagagaattcatctggaacgacctgctgtccctggaaaccggcagcctgaagctggccaacggaagagtgatcgagaagacactgtacaacagaagaacccggcaggatgagcctgccctgttcgtggccctgaccttcgagcggcgggaggtcctggactcctccaatatcaaaccaatgaacctgatcggcgtggcaagaggcgaaaacatccccgccgtgatcgccctgaccgaccccgagggctgcccactgagccggtttaaggatagcctgggaaacccaacccacatcctgagaatcggcgagagctataaggagaagcagcggaccatccaggccaagaaggaggtggagcagcggagagccggcggctacagccggaagtacgccagcaaagccaagaatctggcagacgatatggtgagaaacaccgctagagatctgctgtactacgccgtgacccaggatgccatgctgatcttcgccaacctgagccggggcttcggccggcagggcaagcggaccttcatggccgagagacagtacacacggatggaggactggctgaccgccaagctggcctacgagggcctgagcaagacctacctgtccaagacactggcccagtacacctccaagacatgcagcaactgtgggtttaccatcaccagcgccgactacgacagggtgctggagaagctgaagaagacagcaacaggctggatgaccacaattaacggcaaggagctgaaggtggagggccagattacctactacaacagatacaagagacagaacgtagtcaaggacctgtccgtcgagctggatagactgagcgaagaatctgtgaacaacgacatctcctcctggacaaagggcagaagcggagaagctctgagcctcctgaagaaaagattctcccatagacccgtgcaggagaagttcgtgtgcctgaactgcggcttcgagacacacgcagccgagcaagccgccctgaacatcgccagatcctggctgttcctgcggagccaggagtacaagaaataccagacaaacaagacaaccggcaacaccgataagagagccttcgtcgagacctggcagtccttttaccggaagaagcttaaggaggtgtggaaacctgccgtgcggtctggcggatctggcggaggctccacaagcttccaggccagcgtggtgttcgaggacgtggccgtgaacttcacccccgaggagtgggccctgctgaacaggggccagaggaagctgtacagggacgtgatgctggagacctgcaggaacctgagcgccgtggagaagcagaagttccacagcagcggcgacctgaccaggatgcaggagggcctgctgaggagccccctggtggagagcgtgtgcgagaggatcgagggcgacccctgcggcaccagccccaagaaaaagagaaaagtctaagctgccttctgcggggcttgccttctggccatgcccttcttctctcccttgcacctgtacctcttggtctttgaataaagcctgagtaggaaggctagcaaaaaaaaaaaaaaaaaaaaaaaaaaaaaaaaaaaaaaaaaaaaaaaaaaaaaaaaaaaaaaaaaaaaaaaaaaaaaaaa

SEQ ID NO: 3533 - RNA, 5419 nt, synthetic construct
  source 1..5419: mol_type = other RNA
aggaaataagagagaaaagaagagtaagaagaaatataagagccaccatggcccctaagaagaagcgtaaagtgagccgggtgaacggcagcggcagcggcggcggcatgaaccacgaccaggagttcgacccccctaaggtgtaccctcccgtccccgccgagaagagaaagcccatccgggtcctgagcctgttcgatggcatcgccaccggtctgctggtgctgaaggacctgggcatccaggtggataggtacattgcctccgaggtgtgcgaggactccatcaccgtgggaatggtgcgtcatcagggcaagatcatgtacgtgggcgacgtgcggagcgtgacacagaagcatatccaggagtggggccctttcgacctggtgatcggcggcagcccttgcaatgacctgagcatcgtgaacccagcccggaagggcctgtacgagggaaccggcagactgttcttcgagttttacagactgctgcacgacgcccggcctaaggaaggcgacgaccggcccttcttttggctgttcgagaatgtggtggccatgggagtcagcgacaagcgggatattagccggttcctggagagcaaccccgtgatgatcgatgccaaggaagtgagcgccgcccaccgggccagatacttctggggcaatctgcctggcatgaacagacccctggccagcaccgtgaacgacaagctggagctgcaggagtgcctggagcacggccggatcgccaagttcagcaaggtgagaaccatcaccacccgaagcaacagcatcaaacaaggcaaggaccagcactttcctgtgttcatgaacgagaaggaggacatcctgtggtgtaccgagatggagagagtgttcgggttcccagtccactacacagatgtcagcaacatgtctagactggccagacagagactgctgggaagaagctggtccgtccctgtgatcagacacctgttcgcccctctgaaggagtacttcgcctgcgtgagcagcggcaacagcaacgccaacagccggggccccagcttctctagcggcctggtgccactgtccctgagagggagccacatgggccccatggagatctacaaaaccgtgagcgcctggaagcggcagcctgtgcgcgtgctgagcctgtttcggaatatcgataaagtcctgaaaagcctgggattcctggagagcggctctggctccggcggtggcaccctgaagtacgtggaggatgtgacaaacgtggtcagacgggatgtggagaagtggggccccttcgatctggtgtacggcagcacccaacccctgggcagctcttgtgaccggtgccctggctggtacatgtttcagttccaccggatcctgcagtacgccctgccgagacaggagtcccagcggccattcttttggattttcatggacaacttgctgctgaccgaggatgaccaggaaactaccactcggttcctgcagaccgaagccgtgaccctgcaggacgtgagaggccgggactaccagaacgccatgcgggtgtggtccaacatccctggactgaaaagcaagcacgcacctctgacccctaaagaagaggagtacctgcaggcccaggtgcggagcagaagcaagctggacgcccctaaggtggatctgctggtgaagaattgcctcctgcccctgagagagtacttcaagtatttcagccagaatagtctgcccctgggcggcccaagcagcggcgcccctcctcccagcggcggcagcccagccggctccccaacctctaccgaggagggcacctctgagtccgccacccccgagagcggccctggcacctccaccgagcccagcgagggcagcgcacccggcagccctgccggcagccccacctccacagaggagggaaccagcaccgagcccagcgaaggcagcgccccaggcaccagcaccgagcctagtgagggcggctctggcggcggcagcgcccaggagattaaacggatcaacaagatcagaagaagacttgtgaaagacagcaacaccaagaaggccggcaagacaggccccatgaaaaccctgctggttagagtgatgacacccgatctgagagagcggctggaaaacctgagaaagaagcctgaaaatatcccccagcccatcagcaatacatctagagccaacctgaataagctgctgaccgattacaccgaaatgaagaaggcgatcctgcatgtgtactgggaagagttccagaaggaccctgtgggcctgatgagccgggtggcccagcctgccagcaagaagatcgatcagaacaagctgaaacctgagatggacgagaagggcaacctgaccaccgccggctttgcctgctctcagtgtggccagcccctgttcgtgtacaagctggagcaggtgtctgagaagggcaaggcttacaccaactacttcggacggtgcaatgtggccgagcacgaaaagctgatcctgctggcccagctgaagcccgagaaggatagcgacgaagccgtgacatatagcctgggaaagtttgggcagagggccctggatttctacagcattcatgtgaccaaggagtccacccaccccgtgaagcccctggcccagatcgccggaaacagatacgcctccggacctgtgggaaaggccctgagcgacgcatgtatgggcacaatcgcctccttcctgtctaagtaccaggacatcatcatcgaacaccagaaggtggtgaagggcaaccagaagagactggagagcctgcgggagctggccggcaaggaaaacctggaataccctagcgtgaccctgccacctcagcctcacaccaaggagggcgttgatgcctacaacgaagtgatcgcccgggtgcgaatgtgggtgaacctgaacctgtggcagaagctgaagctaagcagagatgatgccaagcctctgctgagactgaagggattcccttcctttcctctggtcgagagacaggccaacgaagtggactggtgggacatggtgtgtaacgtgaagaagctgatcaacgagaaaaaggaggatggcaaggtgttttggcagaatctggctggctacaagagacaggaagccctgagaccatacctgagcagcgaggaagatcggaagaagggaaagaaattcgctcggtaccagctgggcgacctgctgctgcacctggaaaagaagcacggcgaggactggggaaaggtgtacgacgaggcctgggagcggattgacaagaaagtggaaggcctgagcaagcacatcaagctggaagaggaacggagaagcgaggacgcccagagcaaggccgccctgaccgactggctgcgggctaaggccagcttcgtgatcgagggcctgaaggaggccgacaaggacgagttctgcagatgcgagctgaagctgcagaagtggtacggggacctgcggggaaagcccttcgccatcgaagccgagaacagcatcctggacatcagcggcttcagcaagcagtacaactgtgccttcatctggcagaaggacggcgtgaagaagctgaacctgtacctgatcatcaactacttcaagggcggcaagctgcggttcaagaagatcaaacctgaagccttcgaagccaacagattctacaccgtgatcaacaaaaagagcggcgagatcgtgcccatggaggtgaacttcaacttcgacgaccccaacctgatcatcctgcctctggcctttggcaagagacagggcagagaattcatctggaacgacctgctgtccctggaaaccggcagcctgaagctggccaacggaagagtgatcgagaagacactgtacaacagaagaacccggcaggatgagcctgccctgttcgtggccctgaccttcgagcggcgggaggtcctggactcctccaatatcaaaccaatgaacctgatcggcgtggcaagaggcgaaaacatccccgccgtgatcgccctgaccgaccccgagggctgcccactgagccggtttaaggatagcctgggaaacccaacccacatcctgagaatcggcgagagctataaggagaagcagcggaccatccaggccaagaaggaggtggagcagcggagagccggcggctacagccggaagtacgccagcaaagccaagaatctggcagacgatatggtgagaaacaccgctagagatctgctgtactacgccgtgacccaggatgccatgctgatcttcgccaacctgagccggggcttcggccggcagggcaagcggaccttcatggccgagagacagtacacacggatggaggactggctgaccgccaagctggcctacgagggcctgagcaagacctacctgtccaagacactggcccagtacacctccaagacatgcagcaactgtgggtttaccatcaccagcgccgactacgacagggtgctggagaagctgaagaagacagcaacaggctggatgaccacaattaacggcaaggagctgaaggtggagggccagattacctactacaacagatacaagagacagaacgtagtcaaggacctgtccgtcgagctggatagactgagcgaagaatctgtgaacaacgacatctcctcctggacaaagggcagaagcggagaagctctgagcctcctgaagaaaagattctcccatagacccgtgcaggagaagttcgtgtgcctgaactgcggcttcgagacacacgcagccgagcaagccgccctgaacatcgccagatcctggctgttcctgcggagccaggagtacaagaaataccagacaaacaagacaaccggcaacaccgataagagagccttcgtcgagacctggcagtccttttaccggaagaagcttaaggaggtgtggaaacctgccgtgcggtctggcggatctggcggaggctccacaagccaggccgaggtgaccttcgaggacgtggccgtgctgctgagcagggaggagtggggcaggctgggccccgtgcagaagggcctgtacagggacgtgatgctggagacctacaggaacctggtgagcctgggcgccggccccgccggccccaagcccgaggtgatcacccagctggagaggggcgacgagccctgggtgcccgacgtgcagggcagggagaggcccaccatcgacggcagcgccaccagccccaagaaaaagagaaaagtctaagctgccttctgcggggcttgccttctggccatgcccttcttctctcccttgcacctgtacctcttggtctttgaataaagcctgagtaggaaggctagcaaaaaaaaaaaaaaaaaaaaaaaaaaaaaaaaaaaaaaaaaaaaaaaaaaaaaaaaaaaaaaaaaaaaaaaaaaaaaaaa

SEQ ID NO: 3534 - RNA, 5419 nt, synthetic construct
  source 1..5419: mol_type = other RNA
aggaaataagagagaaaagaagagtaagaagaaatataagagccaccatggcccctaagaagaagcgtaaagtgagccgggtgaacggcagcggcagcggcggcggcatgaaccacgaccaggagttcgacccccctaaggtgtaccctcccgtccccgccgagaagagaaagcccatccgggtcctgagcctgttcgatggcatcgccaccggtctgctggtgctgaaggacctgggcatccaggtggataggtacattgcctccgaggtgtgcgaggactccatcaccgtgggaatggtgcgtcatcagggcaagatcatgtacgtgggcgacgtgcggagcgtgacacagaagcatatccaggagtggggccctttcgacctggtgatcggcggcagcccttgcaatgacctgagcatcgtgaacccagcccggaagggcctgtacgagggaaccggcagactgttcttcgagttttacagactgctgcacgacgcccggcctaaggaaggcgacgaccggcccttcttttggctgttcgagaatgtggtggccatgggagtcagcgacaagcgggatattagccggttcctggagagcaaccccgtgatgatcgatgccaaggaagtgagcgccgcccaccgggccagatacttctggggcaatctgcctggcatgaacagacccctggccagcaccgtgaacgacaagctggagctgcaggagtgcctggagcacggccggatcgccaagttcagcaaggtgagaaccatcaccacccgaagcaacagcatcaaacaaggcaaggaccagcactttcctgtgttcatgaacgagaaggaggacatcctgtggtgtaccgagatggagagagtgttcgggttcccagtccactacacagatgtcagcaacatgtctagactggccagacagagactgctgggaagaagctggtccgtccctgtgatcagacacctgttcgcccctctgaaggagtacttcgcctgcgtgagcagcggcaacagcaacgccaacagccggggccccagcttctctagcggcctggtgccactgtccctgagagggagccacatgggccccatggagatctacaaaaccgtgagcgcctggaagcggcagcctgtgcgcgtgctgagcctgtttcggaatatcgataaagtcctgaaaagcctgggattcctggagagcggctctggctccggcggtggcaccctgaagtacgtggaggatgtgacaaacgtggtcagacgggatgtggagaagtggggccccttcgatctggtgtacggcagcacccaacccctgggcagctcttgtgaccggtgccctggctggtacatgtttcagttccaccggatcctgcagtacgccctgccgagacaggagtcccagcggccattcttttggattttcatggacaacttgctgctgaccgaggatgaccaggaaactaccactcggttcctgcagaccgaagccgtgaccctgcaggacgtgagaggccgggactaccagaacgccatgcgggtgtggtccaacatccctggactgaaaagcaagcacgcacctctgacccctaaagaagaggagtacctgcaggcccaggtgcggagcagaagcaagctggacgcccctaaggtggatctgctggtgaagaattgcctcctgcccctgagagagtacttcaagtatttcagccagaatagtctgcccctgggcggcccaagcagcggcgcccctcctcccagcggcggcagcccagccggctccccaacctctaccgaggagggcacctctgagtccgccacccccgagagcggccctggcacctccaccgagcccagcgagggcagcgcacccggcagccctgccggcagccccacctccacagaggagggaaccagcaccgagcccagcgaaggcagcgccccaggcaccagcaccgagcctagtgagggcggctctggcggcggcagcgcccaggagattaaacggatcaacaagatcagaagaagacttgtgaaagacagcaacaccaagaaggccggcaagacaggccccatgaaaaccctgctggttagagtgatgacacccgatctgagagagcggctggaaaacctgagaaagaagcctgaaaatatcccccagcccatcagcaatacatctagagccaacctgaataagctgctgaccgattacaccgaaatgaagaaggcgatcctgcatgtgtactgggaagagttccagaaggaccctgtgggcctgatgagccgggtggcccagcctgccagcaagaagatcgatcagaacaagctgaaacctgagatggacgagaagggcaacctgaccaccgccggctttgcctgctctcagtgtggccagcccctgttcgtgtacaagctggagcaggtgtctgagaagggcaaggcttacaccaactacttcggacggtgcaatgtggccgagcacgaaaagctgatcctgctggcccagctgaagcccgagaaggatagcgacgaagccgtgacatatagcctgggaaagtttgggcagagggccctggatttctacagcattcatgtgaccaaggagtccacccaccccgtgaagcccctggcccagatcgccggaaacagatacgcctccggacctgtgggaaaggccctgagcgacgcatgtatgggcacaatcgcctccttcctgtctaagtaccaggacatcatcatcgaacaccagaaggtggtgaagggcaaccagaagagactggagagcctgcgggagctggccggcaaggaaaacctggaataccctagcgtgaccctgccacctcagcctcacaccaaggagggcgttgatgcctacaacgaagtgatcgcccgggtgcgaatgtgggtgaacctgaacctgtggcagaagctgaagctaagcagagatgatgccaagcctctgctgagactgaagggattcccttcctttcctctggtcgagagacaggccaacgaagtggactggtgggacatggtgtgtaacgtgaagaagctgatcaacgagaaaaaggaggatggcaaggtgttttggcagaatctggctggctacaagagacaggaagccctgagaccatacctgagcagcgaggaagatcggaagaagggaaagaaattcgctcggtaccagctgggcgacctgctgctgcacctggaaaagaagcacggcgaggactggggaaaggtgtacgacgaggcctgggagcggattgacaagaaagtggaaggcctgagcaagcacatcaagctggaagaggaacggagaagcgaggacgcccagagcaaggccgccctgaccgactggctgcgggctaaggccagcttcgtgatcgagggcctgaaggaggccgacaaggacgagttctgcagatgcgagctgaagctgcagaagtggtacggggacctgcggggaaagcccttcgccatcgaagccgagaacagcatcctggacatcagcggcttcagcaagcagtacaactgtgccttcatctggcagaaggacggcgtgaagaagctgaacctgtacctgatcatcaactacttcaagggcggcaagctgcggttcaagaagatcaaacctgaagccttcgaagccaacagattctacaccgtgatcaacaaaaagagcggcgagatcgtgcccatggaggtgaacttcaacttcgacgaccccaacctgatcatcctgcctctggcctttggcaagagacagggcagagaattcatctggaacgacctgctgtccctggaaaccggcagcctgaagctggccaacggaagagtgatcgagaagacactgtacaacagaagaacccggcaggatgagcctgccctgttcgtggccctgaccttcgagcggcgggaggtcctggactcctccaatatcaaaccaatgaacctgatcggcgtggcaagaggcgaaaacatccccgccgtgatcgccctgaccgaccccgagggctgcccactgagccggtttaaggatagcctgggaaacccaacccacatcctgagaatcggcgagagctataaggagaagcagcggaccatccaggccaagaaggaggtggagcagcggagagccggcggctacagccggaagtacgccagcaaagccaagaatctggcagacgatatggtgagaaacaccgctagagatctgctgtactacgccgtgacccaggatgccatgctgatcttcgccaacctgagccggggcttcggccggcagggcaagcggaccttcatggccgagagacagtacacacggatggaggactggctgaccgccaagctggcctacgagggcctgagcaagacctacctgtccaagacactggcccagtacacctccaagacatgcagcaactgtgggtttaccatcaccagcgccgactacgacagggtgctggagaagctgaagaagacagcaacaggctggatgaccacaattaacggcaaggagctgaaggtggagggccagattacctactacaacagatacaagagacagaacgtagtcaaggacctgtccgtcgagctggatagactgagcgaagaatctgtgaacaacgacatctcctcctggacaaagggcagaagcggagaagctctgagcctcctgaagaaaagattctcccatagacccgtgcaggagaagttcgtgtgcctgaactgcggcttcgagacacacgcagccgagcaagccgccctgaacatcgccagatcctggctgttcctgcggagccaggagtacaagaaataccagacaaacaagacaaccggcaacaccgataagagagccttcgtcgagacctggcagtccttttaccggaagaagcttaaggaggtgtggaaacctgccgtgcggtctggcggatctggcggaggctccacaagcccccaggtgctggtgagcttcgaggaggtggccgtgctgctgagccaggaggagtggggcaggctgagccccgcccagaagggcctgtacagggacgtgatgatggagacctacggcaacctggtgagcctgggcctgcagggcagcaagcccgacgtgatcagcaagctggagcagggcaaggagccctgggccccccacagccccaggatcgagggcagctggatctggaggaggaggaggaccagccccaagaaaaagagaaaagtctaagctgccttctgcggggcttgccttctggccatgcccttcttctctcccttgcacctgtacctcttggtctttgaataaagcctgagtaggaaggctagcaaaaaaaaaaaaaaaaaaaaaaaaaaaaaaaaaaaaaaaaaaaaaaaaaaaaaaaaaaaaaaaaaaaaaaaaaaaaaaaa

SEQ ID NO: 3535 - RNA, 5419 nt, synthetic construct
  source 1..5419: mol_type = other RNA
aggaaataagagagaaaagaagagtaagaagaaatataagagccaccatggcccctaagaagaagcgtaaagtgagccgggtgaacggcagcggcagcggcggcggcatgaaccacgaccaggagttcgacccccctaaggtgtaccctcccgtccccgccgagaagagaaagcccatccgggtcctgagcctgttcgatggcatcgccaccggtctgctggtgctgaaggacctgggcatccaggtggataggtacattgcctccgaggtgtgcgaggactccatcaccgtgggaatggtgcgtcatcagggcaagatcatgtacgtgggcgacgtgcggagcgtgacacagaagcatatccaggagtggggccctttcgacctggtgatcggcggcagcccttgcaatgacctgagcatcgtgaacccagcccggaagggcctgtacgagggaaccggcagactgttcttcgagttttacagactgctgcacgacgcccggcctaaggaaggcgacgaccggcccttcttttggctgttcgagaatgtggtggccatgggagtcagcgacaagcgggatattagccggttcctggagagcaaccccgtgatgatcgatgccaaggaagtgagcgccgcccaccgggccagatacttctggggcaatctgcctggcatgaacagacccctggccagcaccgtgaacgacaagctggagctgcaggagtgcctggagcacggccggatcgccaagttcagcaaggtgagaaccatcaccacccgaagcaacagcatcaaacaaggcaaggaccagcactttcctgtgttcatgaacgagaaggaggacatcctgtggtgtaccgagatggagagagtgttcgggttcccagtccactacacagatgtcagcaacatgtctagactggccagacagagactgctgggaagaagctggtccgtccctgtgatcagacacctgttcgcccctctgaaggagtacttcgcctgcgtgagcagcggcaacagcaacgccaacagccggggccccagcttctctagcggcctggtgccactgtccctgagagggagccacatgggccccatggagatctacaaaaccgtgagcgcctggaagcggcagcctgtgcgcgtgctgagcctgtttcggaatatcgataaagtcctgaaaagcctgggattcctggagagcggctctggctccggcggtggcaccctgaagtacgtggaggatgtgacaaacgtggtcagacgggatgtggagaagtggggccccttcgatctggtgtacggcagcacccaacccctgggcagctcttgtgaccggtgccctggctggtacatgtttcagttccaccggatcctgcagtacgccctgccgagacaggagtcccagcggccattcttttggattttcatggacaacttgctgctgaccgaggatgaccaggaaactaccactcggttcctgcagaccgaagccgtgaccctgcaggacgtgagaggccgggactaccagaacgccatgcgggtgtggtccaacatccctggactgaaaagcaagcacgcacctctgacccctaaagaagaggagtacctgcaggcccaggtgcggagcagaagcaagctggacgcccctaaggtggatctgctggtgaagaattgcctcctgcccctgagagagtacttcaagtatttcagccagaatagtctgcccctgggcggcccaagcagcggcgcccctcctcccagcggcggcagcccagccggctccccaacctctaccgaggagggcacctctgagtccgccacccccgagagcggccctggcacctccaccgagcccagcgagggcagcgcacccggcagccctgccggcagccccacctccacagaggagggaaccagcaccgagcccagcgaaggcagcgccccaggcaccagcaccgagcctagtgagggcggctctggcggcggcagcgcccaggagattaaacggatcaacaagatcagaagaagacttgtgaaagacagcaacaccaagaaggccggcaagacaggccccatgaaaaccctgctggttagagtgatgacacccgatctgagagagcggctggaaaacctgagaaagaagcctgaaaatatcccccagcccatcagcaatacatctagagccaacctgaataagctgctgaccgattacaccgaaatgaagaaggcgatcctgcatgtgtactgggaagagttccagaaggaccctgtgggcctgatgagccgggtggcccagcctgccagcaagaagatcgatcagaacaagctgaaacctgagatggacgagaagggcaacctgaccaccgccggctttgcctgctctcagtgtggccagcccctgttcgtgtacaagctggagcaggtgtctgagaagggcaaggcttacaccaactacttcggacggtgcaatgtggccgagcacgaaaagctgatcctgctggcccagctgaagcccgagaaggatagcgacgaagccgtgacatatagcctgggaaagtttgggcagagggccctggatttctacagcattcatgtgaccaaggagtccacccaccccgtgaagcccctggcccagatcgccggaaacagatacgcctccggacctgtgggaaaggccctgagcgacgcatgtatgggcacaatcgcctccttcctgtctaagtaccaggacatcatcatcgaacaccagaaggtggtgaagggcaaccagaagagactggagagcctgcgggagctggccggcaaggaaaacctggaataccctagcgtgaccctgccacctcagcctcacaccaaggagggcgttgatgcctacaacgaagtgatcgcccgggtgcgaatgtgggtgaacctgaacctgtggcagaagctgaagctaagcagagatgatgccaagcctctgctgagactgaagggattcccttcctttcctctggtcgagagacaggccaacgaagtggactggtgggacatggtgtgtaacgtgaagaagctgatcaacgagaaaaaggaggatggcaaggtgttttggcagaatctggctggctacaagagacaggaagccctgagaccatacctgagcagcgaggaagatcggaagaagggaaagaaattcgctcggtaccagctgggcgacctgctgctgcacctggaaaagaagcacggcgaggactggggaaaggtgtacgacgaggcctgggagcggattgacaagaaagtggaaggcctgagcaagcacatcaagctggaagaggaacggagaagcgaggacgcccagagcaaggccgccctgaccgactggctgcgggctaaggccagcttcgtgatcgagggcctgaaggaggccgacaaggacgagttctgcagatgcgagctgaagctgcagaagtggtacggggacctgcggggaaagcccttcgccatcgaagccgagaacagcatcctggacatcagcggcttcagcaagcagtacaactgtgccttcatctggcagaaggacggcgtgaagaagctgaacctgtacctgatcatcaactacttcaagggcggcaagctgcggttcaagaagatcaaacctgaagccttcgaagccaacagattctacaccgtgatcaacaaaaagagcggcgagatcgtgcccatggaggtgaacttcaacttcgacgaccccaacctgatcatcctgcctctggcctttggcaagagacagggcagagaattcatctggaacgacctgctgtccctggaaaccggcagcctgaagctggccaacggaagagtgatcgagaagacactgtacaacagaagaacccggcaggatgagcctgccctgttcgtggccctgaccttcgagcggcgggaggtcctggactcctccaatatcaaaccaatgaacctgatcggcgtggcaagaggcgaaaacatccccgccgtgatcgccctgaccgaccccgagggctgcccactgagccggtttaaggatagcctgggaaacccaacccacatcctgagaatcggcgagagctataaggagaagcagcggaccatccaggccaagaaggaggtggagcagcggagagccggcggctacagccggaagtacgccagcaaagccaagaatctggcagacgatatggtgagaaacaccgctagagatctgctgtactacgccgtgacccaggatgccatgctgatcttcgccaacctgagccggggcttcggccggcagggcaagcggaccttcatggccgagagacagtacacacggatggaggactggctgaccgccaagctggcctacgagggcctgagcaagacctacctgtccaagacactggcccagtacacctccaagacatgcagcaactgtgggtttaccatcaccagcgccgactacgacagggtgctggagaagctgaagaagacagcaacaggctggatgaccacaattaacggcaaggagctgaaggtggagggccagattacctactacaacagatacaagagacagaacgtagtcaaggacctgtccgtcgagctggatagactgagcgaagaatctgtgaacaacgacatctcctcctggacaaagggcagaagcggagaagctctgagcctcctgaagaaaagattctcccatagacccgtgcaggagaagttcgtgtgcctgaactgcggcttcgagacacacgcagccgagcaagccgccctgaacatcgccagatcctggctgttcctgcggagccaggagtacaagaaataccagacaaacaagacaaccggcaacaccgataagagagccttcgtcgagacctggcagtccttttaccggaagaagcttaaggaggtgtggaaacctgccgtgcggtctggcggatctggcggaggctccacaagcatgatcgagtaccagatccccgtgagcttcaaggacgtggtggtgggcttcacccaggaggagtggcacaggctgagccccgcccagagggccctgtacagggacgtgatgctggagacctacagcaacctggtgagcgtgggctacgagggcaccaagcccgacgtgatcctgaggctggagcaggaggaggccccctggatcggcgaggccgcctgccccggctgccactgctggggcaagaccagccccaagaaaaagagaaaagtctaagctgccttctgcggggcttgccttctggccatgcccttcttctctcccttgcacctgtacctcttggtctttgaataaagcctgagtaggaaggctagcaaaaaaaaaaaaaaaaaaaaaaaaaaaaaaaaaaaaaaaaaaaaaaaaaaaaaaaaaaaaaaaaaaaaaaaaaaaaaaaa

SEQ ID NO: 3536 - RNA, 5419 nt, synthetic construct
  source 1..5419: mol_type = other RNA
aggaaataagagagaaaagaagagtaagaagaaatataagagccaccatggcccctaagaagaagcgtaaagtgagccgggtgaacggcagcggcagcggcggcggcatgaaccacgaccaggagttcgacccccctaaggtgtaccctcccgtccccgccgagaagagaaagcccatccgggtcctgagcctgttcgatggcatcgccaccggtctgctggtgctgaaggacctgggcatccaggtggataggtacattgcctccgaggtgtgcgaggactccatcaccgtgggaatggtgcgtcatcagggcaagatcatgtacgtgggcgacgtgcggagcgtgacacagaagcatatccaggagtggggccctttcgacctggtgatcggcggcagcccttgcaatgacctgagcatcgtgaacccagcccggaagggcctgtacgagggaaccggcagactgttcttcgagttttacagactgctgcacgacgcccggcctaaggaaggcgacgaccggcccttcttttggctgttcgagaatgtggtggccatgggagtcagcgacaagcgggatattagccggttcctggagagcaaccccgtgatgatcgatgccaaggaagtgagcgccgcccaccgggccagatacttctggggcaatctgcctggcatgaacagacccctggccagcaccgtgaacgacaagctggagctgcaggagtgcctggagcacggccggatcgccaagttcagcaaggtgagaaccatcaccacccgaagcaacagcatcaaacaaggcaaggaccagcactttcctgtgttcatgaacgagaaggaggacatcctgtggtgtaccgagatggagagagtgttcgggttcccagtccactacacagatgtcagcaacatgtctagactggccagacagagactgctgggaagaagctggtccgtccctgtgatcagacacctgttcgcccctctgaaggagtacttcgcctgcgtgagcagcggcaacagcaacgccaacagccggggccccagcttctctagcggcctggtgccactgtccctgagagggagccacatgggccccatggagatctacaaaaccgtgagcgcctggaagcggcagcctgtgcgcgtgctgagcctgtttcggaatatcgataaagtcctgaaaagcctgggattcctggagagcggctctggctccggcggtggcaccctgaagtacgtggaggatgtgacaaacgtggtcagacgggatgtggagaagtggggccccttcgatctggtgtacggcagcacccaacccctgggcagctcttgtgaccggtgccctggctggtacatgtttcagttccaccggatcctgcagtacgccctgccgagacaggagtcccagcggccattcttttggattttcatggacaacttgctgctgaccgaggatgaccaggaaactaccactcggttcctgcagaccgaagccgtgaccctgcaggacgtgagaggccgggactaccagaacgccatgcgggtgtggtccaacatccctggactgaaaagcaagcacgcacctctgacccctaaagaagaggagtacctgcaggcccaggtgcggagcagaagcaagctggacgcccctaaggtggatctgctggtgaagaattgcctcctgcccctgagagagtacttcaagtatttcagccagaatagtctgcccctgggcggcccaagcagcggcgcccctcctcccagcggcggcagcccagccggctccccaacctctaccgaggagggcacctctgagtccgccacccccgagagcggccctggcacctccaccgagcccagcgagggcagcgcacccggcagccctgccggcagccccacctccacagaggagggaaccagcaccgagcccagcgaaggcagcgccccaggcaccagcaccgagcctagtgagggcggctctggcggcggcagcgcccaggagattaaacggatcaacaagatcagaagaagacttgtgaaagacagcaacaccaagaaggccggcaagacaggccccatgaaaaccctgctggttagagtgatgacacccgatctgagagagcggctggaaaacctgagaaagaagcctgaaaatatcccccagcccatcagcaatacatctagagccaacctgaataagctgctgaccgattacaccgaaatgaagaaggcgatcctgcatgtgtactgggaagagttccagaaggaccctgtgggcctgatgagccgggtggcccagcctgccagcaagaagatcgatcagaacaagctgaaacctgagatggacgagaagggcaacctgaccaccgccggctttgcctgctctcagtgtggccagcccctgttcgtgtacaagctggagcaggtgtctgagaagggcaaggcttacaccaactacttcggacggtgcaatgtggccgagcacgaaaagctgatcctgctggcccagctgaagcccgagaaggatagcgacgaagccgtgacatatagcctgggaaagtttgggcagagggccctggatttctacagcattcatgtgaccaaggagtccacccaccccgtgaagcccctggcccagatcgccggaaacagatacgcctccggacctgtgggaaaggccctgagcgacgcatgtatgggcacaatcgcctccttcctgtctaagtaccaggacatcatcatcgaacaccagaaggtggtgaagggcaaccagaagagactggagagcctgcgggagctggccggcaaggaaaacctggaataccctagcgtgaccctgccacctcagcctcacaccaaggagggcgttgatgcctacaacgaagtgatcgcccgggtgcgaatgtgggtgaacctgaacctgtggcagaagctgaagctaagcagagatgatgccaagcctctgctgagactgaagggattcccttcctttcctctggtcgagagacaggccaacgaagtggactggtgggacatggtgtgtaacgtgaagaagctgatcaacgagaaaaaggaggatggcaaggtgttttggcagaatctggctggctacaagagacaggaagccctgagaccatacctgagcagcgaggaagatcggaagaagggaaagaaattcgctcggtaccagctgggcgacctgctgctgcacctggaaaagaagcacggcgaggactggggaaaggtgtacgacgaggcctgggagcggattgacaagaaagtggaaggcctgagcaagcacatcaagctggaagaggaacggagaagcgaggacgcccagagcaaggccgccctgaccgactggctgcgggctaaggccagcttcgtgatcgagggcctgaaggaggccgacaaggacgagttctgcagatgcgagctgaagctgcagaagtggtacggggacctgcggggaaagcccttcgccatcgaagccgagaacagcatcctggacatcagcggcttcagcaagcagtacaactgtgccttcatctggcagaaggacggcgtgaagaagctgaacctgtacctgatcatcaactacttcaagggcggcaagctgcggttcaagaagatcaaacctgaagccttcgaagccaacagattctacaccgtgatcaacaaaaagagcggcgagatcgtgcccatggaggtgaacttcaacttcgacgaccccaacctgatcatcctgcctctggcctttggcaagagacagggcagagaattcatctggaacgacctgctgtccctggaaaccggcagcctgaagctggccaacggaagagtgatcgagaagacactgtacaacagaagaacccggcaggatgagcctgccctgttcgtggccctgaccttcgagcggcgggaggtcctggactcctccaatatcaaaccaatgaacctgatcggcgtggcaagaggcgaaaacatccccgccgtgatcgccctgaccgaccccgagggctgcccactgagccggtttaaggatagcctgggaaacccaacccacatcctgagaatcggcgagagctataaggagaagcagcggaccatccaggccaagaaggaggtggagcagcggagagccggcggctacagccggaagtacgccagcaaagccaagaatctggcagacgatatggtgagaaacaccgctagagatctgctgtactacgccgtgacccaggatgccatgctgatcttcgccaacctgagccggggcttcggccggcagggcaagcggaccttcatggccgagagacagtacacacggatggaggactggctgaccgccaagctggcctacgagggcctgagcaagacctacctgtccaagacactggcccagtacacctccaagacatgcagcaactgtgggtttaccatcaccagcgccgactacgacagggtgctggagaagctgaagaagacagcaacaggctggatgaccacaattaacggcaaggagctgaaggtggagggccagattacctactacaacagatacaagagacagaacgtagtcaaggacctgtccgtcgagctggatagactgagcgaagaatctgtgaacaacgacatctcctcctggacaaagggcagaagcggagaagctctgagcctcctgaagaaaagattctcccatagacccgtgcaggagaagttcgtgtgcctgaactgcggcttcgagacacacgcagccgagcaagccgccctgaacatcgccagatcctggctgttcctgcggagccaggagtacaagaaataccagacaaacaagacaaccggcaacaccgataagagagccttcgtcgagacctggcagtccttttaccggaagaagcttaaggaggtgtggaaacctgccgtgcggtctggcggatctggcggaggctccacaagcctgcaggaggccgtgaccttcaacgacgtggccatcgacttcagccaggaggagtgggagtggctgaacagcgcccagaggagcctgtacaggaccgtggtgctggagaactacaggaacctggtgagcgtgggcgcctgcatcagcaagcccagcctgatcagcctgctggagcacggcaaggagccctgggaggtgaagggccaggtgaccggcagcagggtgcagggcggcgagagcgtgaccagccccaagaaaaagagaaaagtctaagctgccttctgcggggcttgccttctggccatgcccttcttctctcccttgcacctgtacctcttggtctttgaataaagcctgagtaggaaggctagcaaaaaaaaaaaaaaaaaaaaaaaaaaaaaaaaaaaaaaaaaaaaaaaaaaaaaaaaaaaaaaaaaaaaaaaaaaaaaaaa

SEQ ID NO: 3537 - RNA, 5419 nt, synthetic construct
  source 1..5419: mol_type = other RNA
aggaaataagagagaaaagaagagtaagaagaaatataagagccaccatggcccctaagaagaagcgtaaagtgagccgggtgaacggcagcggcagcggcggcggcatgaaccacgaccaggagttcgacccccctaaggtgtaccctcccgtccccgccgagaagagaaagcccatccgggtcctgagcctgttcgatggcatcgccaccggtctgctggtgctgaaggacctgggcatccaggtggataggtacattgcctccgaggtgtgcgaggactccatcaccgtgggaatggtgcgtcatcagggcaagatcatgtacgtgggcgacgtgcggagcgtgacacagaagcatatccaggagtggggccctttcgacctggtgatcggcggcagcccttgcaatgacctgagcatcgtgaacccagcccggaagggcctgtacgagggaaccggcagactgttcttcgagttttacagactgctgcacgacgcccggcctaaggaaggcgacgaccggcccttcttttggctgttcgagaatgtggtggccatgggagtcagcgacaagcgggatattagccggttcctggagagcaaccccgtgatgatcgatgccaaggaagtgagcgccgcccaccgggccagatacttctggggcaatctgcctggcatgaacagacccctggccagcaccgtgaacgacaagctggagctgcaggagtgcctggagcacggccggatcgccaagttcagcaaggtgagaaccatcaccacccgaagcaacagcatcaaacaaggcaaggaccagcactttcctgtgttcatgaacgagaaggaggacatcctgtggtgtaccgagatggagagagtgttcgggttcccagtccactacacagatgtcagcaacatgtctagactggccagacagagactgctgggaagaagctggtccgtccctgtgatcagacacctgttcgcccctctgaaggagtacttcgcctgcgtgagcagcggcaacagcaacgccaacagccggggccccagcttctctagcggcctggtgccactgtccctgagagggagccacatgggccccatggagatctacaaaaccgtgagcgcctggaagcggcagcctgtgcgcgtgctgagcctgtttcggaatatcgataaagtcctgaaaagcctgggattcctggagagcggctctggctccggcggtggcaccctgaagtacgtggaggatgtgacaaacgtggtcagacgggatgtggagaagtggggccccttcgatctggtgtacggcagcacccaacccctgggcagctcttgtgaccggtgccctggctggtacatgtttcagttccaccggatcctgcagtacgccctgccgagacaggagtcccagcggccattcttttggattttcatggacaacttgctgctgaccgaggatgaccaggaaactaccactcggttcctgcagaccgaagccgtgaccctgcaggacgtgagaggccgggactaccagaacgccatgcgggtgtggtccaacatccctggactgaaaagcaagcacgcacctctgacccctaaagaagaggagtacctgcaggcccaggtgcggagcagaagcaagctggacgcccctaaggtggatctgctggtgaagaattgcctcctgcccctgagagagtacttcaagtatttcagccagaatagtctgcccctgggcggcccaagcagcggcgcccctcctcccagcggcggcagcccagccggctccccaacctctaccgaggagggcacctctgagtccgccacccccgagagcggccctggcacctccaccgagcccagcgagggcagcgcacccggcagccctgccggcagccccacctccacagaggagggaaccagcaccgagcccagcgaaggcagcgccccaggcaccagcaccgagcctagtgagggcggctctggcggcggcagcgcccaggagattaaacggatcaacaagatcagaagaagacttgtgaaagacagcaacaccaagaaggccggcaagacaggccccatgaaaaccctgctggttagagtgatgacacccgatctgagagagcggctggaaaacctgagaaagaagcctgaaaatatcccccagcccatcagcaatacatctagagccaacctgaataagctgctgaccgattacaccgaaatgaagaaggcgatcctgcatgtgtactgggaagagttccagaaggaccctgtgggcctgatgagccgggtggcccagcctgccagcaagaagatcgatcagaacaagctgaaacctgagatggacgagaagggcaacctgaccaccgccggctttgcctgctctcagtgtggccagcccctgttcgtgtacaagctggagcaggtgtctgagaagggcaaggcttacaccaactacttcggacggtgcaatgtggccgagcacgaaaagctgatcctgctggcccagctgaagcccgagaaggatagcgacgaagccgtgacatatagcctgggaaagtttgggcagagggccctggatttctacagcattcatgtgaccaaggagtccacccaccccgtgaagcccctggcccagatcgccggaaacagatacgcctccggacctgtgggaaaggccctgagcgacgcatgtatgggcacaatcgcctccttcctgtctaagtaccaggacatcatcatcgaacaccagaaggtggtgaagggcaaccagaagagactggagagcctgcgggagctggccggcaaggaaaacctggaataccctagcgtgaccctgccacctcagcctcacaccaaggagggcgttgatgcctacaacgaagtgatcgcccgggtgcgaatgtgggtgaacctgaacctgtggcagaagctgaagctaagcagagatgatgccaagcctctgctgagactgaagggattcccttcctttcctctggtcgagagacaggccaacgaagtggactggtgggacatggtgtgtaacgtgaagaagctgatcaacgagaaaaaggaggatggcaaggtgttttggcagaatctggctggctacaagagacaggaagccctgagaccatacctgagcagcgaggaagatcggaagaagggaaagaaattcgctcggtaccagctgggcgacctgctgctgcacctggaaaagaagcacggcgaggactggggaaaggtgtacgacgaggcctgggagcggattgacaagaaagtggaaggcctgagcaagcacatcaagctggaagaggaacggagaagcgaggacgcccagagcaaggccgccctgaccgactggctgcgggctaaggccagcttcgtgatcgagggcctgaaggaggccgacaaggacgagttctgcagatgcgagctgaagctgcagaagtggtacggggacctgcggggaaagcccttcgccatcgaagccgagaacagcatcctggacatcagcggcttcagcaagcagtacaactgtgccttcatctggcagaaggacggcgtgaagaagctgaacctgtacctgatcatcaactacttcaagggcggcaagctgcggttcaagaagatcaaacctgaagccttcgaagccaacagattctacaccgtgatcaacaaaaagagcggcgagatcgtgcccatggaggtgaacttcaacttcgacgaccccaacctgatcatcctgcctctggcctttggcaagagacagggcagagaattcatctggaacgacctgctgtccctggaaaccggcagcctgaagctggccaacggaagagtgatcgagaagacactgtacaacagaagaacccggcaggatgagcctgccctgttcgtggccctgaccttcgagcggcgggaggtcctggactcctccaatatcaaaccaatgaacctgatcggcgtggcaagaggcgaaaacatccccgccgtgatcgccctgaccgaccccgagggctgcccactgagccggtttaaggatagcctgggaaacccaacccacatcctgagaatcggcgagagctataaggagaagcagcggaccatccaggccaagaaggaggtggagcagcggagagccggcggctacagccggaagtacgccagcaaagccaagaatctggcagacgatatggtgagaaacaccgctagagatctgctgtactacgccgtgacccaggatgccatgctgatcttcgccaacctgagccggggcttcggccggcagggcaagcggaccttcatggccgagagacagtacacacggatggaggactggctgaccgccaagctggcctacgagggcctgagcaagacctacctgtccaagacactggcccagtacacctccaagacatgcagcaactgtgggtttaccatcaccagcgccgactacgacagggtgctggagaagctgaagaagacagcaacaggctggatgaccacaattaacggcaaggagctgaaggtggagggccagattacctactacaacagatacaagagacagaacgtagtcaaggacctgtccgtcgagctggatagactgagcgaagaatctgtgaacaacgacatctcctcctggacaaagggcagaagcggagaagctctgagcctcctgaagaaaagattctcccatagacccgtgcaggagaagttcgtgtgcctgaactgcggcttcgagacacacgcagccgagcaagccgccctgaacatcgccagatcctggctgttcctgcggagccaggagtacaagaaataccagacaaacaagacaaccggcaacaccgataagagagccttcgtcgagacctggcagtccttttaccggaagaagcttaaggaggtgtggaaacctgccgtgcggtctggcggatctggcggaggctccacaagcatggccctgacccagggccaggtgaccttcagggacgtggccatcgagttcagccaggaggagtggacctgcctggaccccgcccagaggagcctgtacagggacgtgatgctggagaactacaggaacctggccagcctgggcatcagctgcttcgacctgagcatcatcagcatgctggagcagggcaagggccccttcgccctggagagccaggtgcagagggccggcaaccccgacggcaccagccccaagaaaaagagaaaagtctaagctgccttctgcggggcttgccttctggccatgcccttcttctctcccttgcacctgtacctcttggtctttgaataaagcctgagtaggaaggctagcaaaaaaaaaaaaaaaaaaaaaaaaaaaaaaaaaaaaaaaaaaaaaaaaaaaaaaaaaaaaaaaaaaaaaaaaaaaaaaaa

SEQ ID NO: 3538 - RNA, 5419 nt, synthetic construct
  source 1..5419: mol_type = other RNA
aggaaataagagagaaaagaagagtaagaagaaatataagagccaccatggcccctaagaagaagcgtaaagtgagccgggtgaacggcagcggcagcggcggcggcatgaaccacgaccaggagttcgacccccctaaggtgtaccctcccgtccccgccgagaagagaaagcccatccgggtcctgagcctgttcgatggcatcgccaccggtctgctggtgctgaaggacctgggcatccaggtggataggtacattgcctccgaggtgtgcgaggactccatcaccgtgggaatggtgcgtcatcagggcaagatcatgtacgtgggcgacgtgcggagcgtgacacagaagcatatccaggagtggggccctttcgacctggtgatcggcggcagcccttgcaatgacctgagcatcgtgaacccagcccggaagggcctgtacgagggaaccggcagactgttcttcgagttttacagactgctgcacgacgcccggcctaaggaaggcgacgaccggcccttcttttggctgttcgagaatgtggtggccatgggagtcagcgacaagcgggatattagccggttcctggagagcaaccccgtgatgatcgatgccaaggaagtgagcgccgcccaccgggccagatacttctggggcaatctgcctggcatgaacagacccctggccagcaccgtgaacgacaagctggagctgcaggagtgcctggagcacggccggatcgccaagttcagcaaggtgagaaccatcaccacccgaagcaacagcatcaaacaaggcaaggaccagcactttcctgtgttcatgaacgagaaggaggacatcctgtggtgtaccgagatggagagagtgttcgggttcccagtccactacacagatgtcagcaacatgtctagactggccagacagagactgctgggaagaagctggtccgtccctgtgatcagacacctgttcgcccctctgaaggagtacttcgcctgcgtgagcagcggcaacagcaacgccaacagccggggccccagcttctctagcggcctggtgccactgtccctgagagggagccacatgggccccatggagatctacaaaaccgtgagcgcctggaagcggcagcctgtgcgcgtgctgagcctgtttcggaatatcgataaagtcctgaaaagcctgggattcctggagagcggctctggctccggcggtggcaccctgaagtacgtggaggatgtgacaaacgtggtcagacgggatgtggagaagtggggccccttcgatctggtgtacggcagcacccaacccctgggcagctcttgtgaccggtgccctggctggtacatgtttcagttccaccggatcctgcagtacgccctgccgagacaggagtcccagcggccattcttttggattttcatggacaacttgctgctgaccgaggatgaccaggaaactaccactcggttcctgcagaccgaagccgtgaccctgcaggacgtgagaggccgggactaccagaacgccatgcgggtgtggtccaacatccctggactgaaaagcaagcacgcacctctgacccctaaagaagaggagtacctgcaggcccaggtgcggagcagaagcaagctggacgcccctaaggtggatctgctggtgaagaattgcctcctgcccctgagagagtacttcaagtatttcagccagaatagtctgcccctgggcggcccaagcagcggcgcccctcctcccagcggcggcagcccagccggctccccaacctctaccgaggagggcacctctgagtccgccacccccgagagcggccctggcacctccaccgagcccagcgagggcagcgcacccggcagccctgccggcagccccacctccacagaggagggaaccagcaccgagcccagcgaaggcagcgccccaggcaccagcaccgagcctagtgagggcggctctggcggcggcagcgcccaggagattaaacggatcaacaagatcagaagaagacttgtgaaagacagcaacaccaagaaggccggcaagacaggccccatgaaaaccctgctggttagagtgatgacacccgatctgagagagcggctggaaaacctgagaaagaagcctgaaaatatcccccagcccatcagcaatacatctagagccaacctgaataagctgctgaccgattacaccgaaatgaagaaggcgatcctgcatgtgtactgggaagagttccagaaggaccctgtgggcctgatgagccgggtggcccagcctgccagcaagaagatcgatcagaacaagctgaaacctgagatggacgagaagggcaacctgaccaccgccggctttgcctgctctcagtgtggccagcccctgttcgtgtacaagctggagcaggtgtctgagaagggcaaggcttacaccaactacttcggacggtgcaatgtggccgagcacgaaaagctgatcctgctggcccagctgaagcccgagaaggatagcgacgaagccgtgacatatagcctgggaaagtttgggcagagggccctggatttctacagcattcatgtgaccaaggagtccacccaccccgtgaagcccctggcccagatcgccggaaacagatacgcctccggacctgtgggaaaggccctgagcgacgcatgtatgggcacaatcgcctccttcctgtctaagtaccaggacatcatcatcgaacaccagaaggtggtgaagggcaaccagaagagactggagagcctgcgggagctggccggcaaggaaaacctggaataccctagcgtgaccctgccacctcagcctcacaccaaggagggcgttgatgcctacaacgaagtgatcgcccgggtgcgaatgtgggtgaacctgaacctgtggcagaagctgaagctaagcagagatgatgccaagcctctgctgagactgaagggattcccttcctttcctctggtcgagagacaggccaacgaagtggactggtgggacatggtgtgtaacgtgaagaagctgatcaacgagaaaaaggaggatggcaaggtgttttggcagaatctggctggctacaagagacaggaagccctgagaccatacctgagcagcgaggaagatcggaagaagggaaagaaattcgctcggtaccagctgggcgacctgctgctgcacctggaaaagaagcacggcgaggactggggaaaggtgtacgacgaggcctgggagcggattgacaagaaagtggaaggcctgagcaagcacatcaagctggaagaggaacggagaagcgaggacgcccagagcaaggccgccctgaccgactggctgcgggctaaggccagcttcgtgatcgagggcctgaaggaggccgacaaggacgagttctgcagatgcgagctgaagctgcagaagtggtacggggacctgcggggaaagcccttcgccatcgaagccgagaacagcatcctggacatcagcggcttcagcaagcagtacaactgtgccttcatctggcagaaggacggcgtgaagaagctgaacctgtacctgatcatcaactacttcaagggcggcaagctgcggttcaagaagatcaaacctgaagccttcgaagccaacagattctacaccgtgatcaacaaaaagagcggcgagatcgtgcccatggaggtgaacttcaacttcgacgaccccaacctgatcatcctgcctctggcctttggcaagagacagggcagagaattcatctggaacgacctgctgtccctggaaaccggcagcctgaagctggccaacggaagagtgatcgagaagacactgtacaacagaagaacccggcaggatgagcctgccctgttcgtggccctgaccttcgagcggcgggaggtcctggactcctccaatatcaaaccaatgaacctgatcggcgtggcaagaggcgaaaacatccccgccgtgatcgccctgaccgaccccgagggctgcccactgagccggtttaaggatagcctgggaaacccaacccacatcctgagaatcggcgagagctataaggagaagcagcggaccatccaggccaagaaggaggtggagcagcggagagccggcggctacagccggaagtacgccagcaaagccaagaatctggcagacgatatggtgagaaacaccgctagagatctgctgtactacgccgtgacccaggatgccatgctgatcttcgccaacctgagccggggcttcggccggcagggcaagcggaccttcatggccgagagacagtacacacggatggaggactggctgaccgccaagctggcctacgagggcctgagcaagacctacctgtccaagacactggcccagtacacctccaagacatgcagcaactgtgggtttaccatcaccagcgccgactacgacagggtgctggagaagctgaagaagacagcaacaggctggatgaccacaattaacggcaaggagctgaaggtggagggccagattacctactacaacagatacaagagacagaacgtagtcaaggacctgtccgtcgagctggatagactgagcgaagaatctgtgaacaacgacatctcctcctggacaaagggcagaagcggagaagctctgagcctcctgaagaaaagattctcccatagacccgtgcaggagaagttcgtgtgcctgaactgcggcttcgagacacacgcagccgagcaagccgccctgaacatcgccagatcctggctgttcctgcggagccaggagtacaagaaataccagacaaacaagacaaccggcaacaccgataagagagccttcgtcgagacctggcagtccttttaccggaagaagcttaaggaggtgtggaaacctgccgtgcggtctggcggatctggcggaggctccacaagcctggcccccgacgaccacggcagcagctacgagggcagcgtgagcttcagggacgtggccatcgacttcagcagggaggagtggaggcacctggaccccagccagaggaacctgtacagggacgtgatgctggagacctacagccacctgctgagcgtgggctaccaggtgcccgaggccgaggtggtgatgctggagcagggcaaggagccctgggccctgcagggcgagaggcccaggcacaccagccccaagaaaaagagaaaagtctaagctgccttctgcggggcttgccttctggccatgcccttcttctctcccttgcacctgtacctcttggtctttgaataaagcctgagtaggaaggctagcaaaaaaaaaaaaaaaaaaaaaaaaaaaaaaaaaaaaaaaaaaaaaaaaaaaaaaaaaaaaaaaaaaaaaaaaaaaaaaaa

SEQ ID NO: 3539 - RNA, 5419 nt, synthetic construct
  source 1..5419: mol_type = other RNA
aggaaataagagagaaaagaagagtaagaagaaatataagagccaccatggcccctaagaagaagcgtaaagtgagccgggtgaacggcagcggcagcggcggcggcatgaaccacgaccaggagttcgacccccctaaggtgtaccctcccgtccccgccgagaagagaaagcccatccgggtcctgagcctgttcgatggcatcgccaccggtctgctggtgctgaaggacctgggcatccaggtggataggtacattgcctccgaggtgtgcgaggactccatcaccgtgggaatggtgcgtcatcagggcaagatcatgtacgtgggcgacgtgcggagcgtgacacagaagcatatccaggagtggggccctttcgacctggtgatcggcggcagcccttgcaatgacctgagcatcgtgaacccagcccggaagggcctgtacgagggaaccggcagactgttcttcgagttttacagactgctgcacgacgcccggcctaaggaaggcgacgaccggcccttcttttggctgttcgagaatgtggtggccatgggagtcagcgacaagcgggatattagccggttcctggagagcaaccccgtgatgatcgatgccaaggaagtgagcgccgcccaccgggccagatacttctggggcaatctgcctggcatgaacagacccctggccagcaccgtgaacgacaagctggagctgcaggagtgcctggagcacggccggatcgccaagttcagcaaggtgagaaccatcaccacccgaagcaacagcatcaaacaaggcaaggaccagcactttcctgtgttcatgaacgagaaggaggacatcctgtggtgtaccgagatggagagagtgttcgggttcccagtccactacacagatgtcagcaacatgtctagactggccagacagagactgctgggaagaagctggtccgtccctgtgatcagacacctgttcgcccctctgaaggagtacttcgcctgcgtgagcagcggcaacagcaacgccaacagccggggccccagcttctctagcggcctggtgccactgtccctgagagggagccacatgggccccatggagatctacaaaaccgtgagcgcctggaagcggcagcctgtgcgcgtgctgagcctgtttcggaatatcgataaagtcctgaaaagcctgggattcctggagagcggctctggctccggcggtggcaccctgaagtacgtggaggatgtgacaaacgtggtcagacgggatgtggagaagtggggccccttcgatctggtgtacggcagcacccaacccctgggcagctcttgtgaccggtgccctggctggtacatgtttcagttccaccggatcctgcagtacgccctgccgagacaggagtcccagcggccattcttttggattttcatggacaacttgctgctgaccgaggatgaccaggaaactaccactcggttcctgcagaccgaagccgtgaccctgcaggacgtgagaggccgggactaccagaacgccatgcgggtgtggtccaacatccctggactgaaaagcaagcacgcacctctgacccctaaagaagaggagtacctgcaggcccaggtgcggagcagaagcaagctggacgcccctaaggtggatctgctggtgaagaattgcctcctgcccctgagagagtacttcaagtatttcagccagaatagtctgcccctgggcggcccaagcagcggcgcccctcctcccagcggcggcagcccagccggctccccaacctctaccgaggagggcacctctgagtccgccacccccgagagcggccctggcacctccaccgagcccagcgagggcagcgcacccggcagccctgccggcagccccacctccacagaggagggaaccagcaccgagcccagcgaaggcagcgccccaggcaccagcaccgagcctagtgagggcggctctggcggcggcagcgcccaggagattaaacggatcaacaagatcagaagaagacttgtgaaagacagcaacaccaagaaggccggcaagacaggccccatgaaaaccctgctggttagagtgatgacacccgatctgagagagcggctggaaaacctgagaaagaagcctgaaaatatcccccagcccatcagcaatacatctagagccaacctgaataagctgctgaccgattacaccgaaatgaagaaggcgatcctgcatgtgtactgggaagagttccagaaggaccctgtgggcctgatgagccgggtggcccagcctgccagcaagaagatcgatcagaacaagctgaaacctgagatggacgagaagggcaacctgaccaccgccggctttgcctgctctcagtgtggccagcccctgttcgtgtacaagctggagcaggtgtctgagaagggcaaggcttacaccaactacttcggacggtgcaatgtggccgagcacgaaaagctgatcctgctggcccagctgaagcccgagaaggatagcgacgaagccgtgacatatagcctgggaaagtttgggcagagggccctggatttctacagcattcatgtgaccaaggagtccacccaccccgtgaagcccctggcccagatcgccggaaacagatacgcctccggacctgtgggaaaggccctgagcgacgcatgtatgggcacaatcgcctccttcctgtctaagtaccaggacatcatcatcgaacaccagaaggtggtgaagggcaaccagaagagactggagagcctgcgggagctggccggcaaggaaaacctggaataccctagcgtgaccctgccacctcagcctcacaccaaggagggcgttgatgcctacaacgaagtgatcgcccgggtgcgaatgtgggtgaacctgaacctgtggcagaagctgaagctaagcagagatgatgccaagcctctgctgagactgaagggattcccttcctttcctctggtcgagagacaggccaacgaagtggactggtgggacatggtgtgtaacgtgaagaagctgatcaacgagaaaaaggaggatggcaaggtgttttggcagaatctggctggctacaagagacaggaagccctgagaccatacctgagcagcgaggaagatcggaagaagggaaagaaattcgctcggtaccagctgggcgacctgctgctgcacctggaaaagaagcacggcgaggactggggaaaggtgtacgacgaggcctgggagcggattgacaagaaagtggaaggcctgagcaagcacatcaagctggaagaggaacggagaagcgaggacgcccagagcaaggccgccctgaccgactggctgcgggctaaggccagcttcgtgatcgagggcctgaaggaggccgacaaggacgagttctgcagatgcgagctgaagctgcagaagtggtacggggacctgcggggaaagcccttcgccatcgaagccgagaacagcatcctggacatcagcggcttcagcaagcagtacaactgtgccttcatctggcagaaggacggcgtgaagaagctgaacctgtacctgatcatcaactacttcaagggcggcaagctgcggttcaagaagatcaaacctgaagccttcgaagccaacagattctacaccgtgatcaacaaaaagagcggcgagatcgtgcccatggaggtgaacttcaacttcgacgaccccaacctgatcatcctgcctctggcctttggcaagagacagggcagagaattcatctggaacgacctgctgtccctggaaaccggcagcctgaagctggccaacggaagagtgatcgagaagacactgtacaacagaagaacccggcaggatgagcctgccctgttcgtggccctgaccttcgagcggcgggaggtcctggactcctccaatatcaaaccaatgaacctgatcggcgtggcaagaggcgaaaacatccccgccgtgatcgccctgaccgaccccgagggctgcccactgagccggtttaaggatagcctgggaaacccaacccacatcctgagaatcggcgagagctataaggagaagcagcggaccatccaggccaagaaggaggtggagcagcggagagccggcggctacagccggaagtacgccagcaaagccaagaatctggcagacgatatggtgagaaacaccgctagagatctgctgtactacgccgtgacccaggatgccatgctgatcttcgccaacctgagccggggcttcggccggcagggcaagcggaccttcatggccgagagacagtacacacggatggaggactggctgaccgccaagctggcctacgagggcctgagcaagacctacctgtccaagacactggcccagtacacctccaagacatgcagcaactgtgggtttaccatcaccagcgccgactacgacagggtgctggagaagctgaagaagacagcaacaggctggatgaccacaattaacggcaaggagctgaaggtggagggccagattacctactacaacagatacaagagacagaacgtagtcaaggacctgtccgtcgagctggatagactgagcgaagaatctgtgaacaacgacatctcctcctggacaaagggcagaagcggagaagctctgagcctcctgaagaaaagattctcccatagacccgtgcaggagaagttcgtgtgcctgaactgcggcttcgagacacacgcagccgagcaagccgccctgaacatcgccagatcctggctgttcctgcggagccaggagtacaagaaataccagacaaacaagacaaccggcaacaccgataagagagccttcgtcgagacctggcagtccttttaccggaagaagcttaaggaggtgtggaaacctgccgtgcggtctggcggatctggcggaggctccacaagcatccaggagcccgtgaccttcaaggacgtggccgtggacttcacccaggaggagtggggcaggctggaccccgtgcagaggaccctgtacagggacgtgatgctggagacctacaggcacctgctgagcgtgggcaaccagatcgccaagcccgaggtgatcagcctgctggagcagggcgaggagccctggagcgtggagcaggcctacccccagagcacctgccccgccgtggacaccgagaccagccccaagaaaaagagaaaagtctaagctgccttctgcggggcttgccttctggccatgcccttcttctctcccttgcacctgtacctcttggtctttgaataaagcctgagtaggaaggctagcaaaaaaaaaaaaaaaaaaaaaaaaaaaaaaaaaaaaaaaaaaaaaaaaaaaaaaaaaaaaaaaaaaaaaaaaaaaaaaaa

SEQ ID NO: 3540 - RNA, 5425 nt, synthetic construct
  source 1..5425: mol_type = other RNA
aggaaataagagagaaaagaagagtaagaagaaatataagagccaccatggcccctaagaagaagcgtaaagtgagccgggtgaacggcagcggcagcggcggcggcatgaaccacgaccaggagttcgacccccctaaggtgtaccctcccgtccccgccgagaagagaaagcccatccgggtcctgagcctgttcgatggcatcgccaccggtctgctggtgctgaaggacctgggcatccaggtggataggtacattgcctccgaggtgtgcgaggactccatcaccgtgggaatggtgcgtcatcagggcaagatcatgtacgtgggcgacgtgcggagcgtgacacagaagcatatccaggagtggggccctttcgacctggtgatcggcggcagcccttgcaatgacctgagcatcgtgaacccagcccggaagggcctgtacgagggaaccggcagactgttcttcgagttttacagactgctgcacgacgcccggcctaaggaaggcgacgaccggcccttcttttggctgttcgagaatgtggtggccatgggagtcagcgacaagcgggatattagccggttcctggagagcaaccccgtgatgatcgatgccaaggaagtgagcgccgcccaccgggccagatacttctggggcaatctgcctggcatgaacagacccctggccagcaccgtgaacgacaagctggagctgcaggagtgcctggagcacggccggatcgccaagttcagcaaggtgagaaccatcaccacccgaagcaacagcatcaaacaaggcaaggaccagcactttcctgtgttcatgaacgagaaggaggacatcctgtggtgtaccgagatggagagagtgttcgggttcccagtccactacacagatgtcagcaacatgtctagactggccagacagagactgctgggaagaagctggtccgtccctgtgatcagacacctgttcgcccctctgaaggagtacttcgcctgcgtgagcagcggcaacagcaacgccaacagccggggccccagcttctctagcggcctggtgccactgtccctgagagggagccacatgggccccatggagatctacaaaaccgtgagcgcctggaagcggcagcctgtgcgcgtgctgagcctgtttcggaatatcgataaagtcctgaaaagcctgggattcctggagagcggctctggctccggcggtggcaccctgaagtacgtggaggatgtgacaaacgtggtcagacgggatgtggagaagtggggccccttcgatctggtgtacggcagcacccaacccctgggcagctcttgtgaccggtgccctggctggtacatgtttcagttccaccggatcctgcagtacgccctgccgagacaggagtcccagcggccattcttttggattttcatggacaacttgctgctgaccgaggatgaccaggaaactaccactcggttcctgcagaccgaagccgtgaccctgcaggacgtgagaggccgggactaccagaacgccatgcgggtgtggtccaacatccctggactgaaaagcaagcacgcacctctgacccctaaagaagaggagtacctgcaggcccaggtgcggagcagaagcaagctggacgcccctaaggtggatctgctggtgaagaattgcctcctgcccctgagagagtacttcaagtatttcagccagaatagtctgcccctgggcggcccaagcagcggcgcccctcctcccagcggcggcagcccagccggctccccaacctctaccgaggagggcacctctgagtccgccacccccgagagcggccctggcacctccaccgagcccagcgagggcagcgcacccggcagccctgccggcagccccacctccacagaggagggaaccagcaccgagcccagcgaaggcagcgccccaggcaccagcaccgagcctagtgagggcggctctggcggcggcagcgcccaggagattaaacggatcaacaagatcagaagaagacttgtgaaagacagcaacaccaagaaggccggcaagacaggccccatgaaaaccctgctggttagagtgatgacacccgatctgagagagcggctggaaaacctgagaaagaagcctgaaaatatcccccagcccatcagcaatacatctagagccaacctgaataagctgctgaccgattacaccgaaatgaagaaggcgatcctgcatgtgtactgggaagagttccagaaggaccctgtgggcctgatgagccgggtggcccagcctgccagcaagaagatcgatcagaacaagctgaaacctgagatggacgagaagggcaacctgaccaccgccggctttgcctgctctcagtgtggccagcccctgttcgtgtacaagctggagcaggtgtctgagaagggcaaggcttacaccaactacttcggacggtgcaatgtggccgagcacgaaaagctgatcctgctggcccagctgaagcccgagaaggatagcgacgaagccgtgacatatagcctgggaaagtttgggcagagggccctggatttctacagcattcatgtgaccaaggagtccacccaccccgtgaagcccctggcccagatcgccggaaacagatacgcctccggacctgtgggaaaggccctgagcgacgcatgtatgggcacaatcgcctccttcctgtctaagtaccaggacatcatcatcgaacaccagaaggtggtgaagggcaaccagaagagactggagagcctgcgggagctggccggcaaggaaaacctggaataccctagcgtgaccctgccacctcagcctcacaccaaggagggcgttgatgcctacaacgaagtgatcgcccgggtgcgaatgtgggtgaacctgaacctgtggcagaagctgaagctaagcagagatgatgccaagcctctgctgagactgaagggattcccttcctttcctctggtcgagagacaggccaacgaagtggactggtgggacatggtgtgtaacgtgaagaagctgatcaacgagaaaaaggaggatggcaaggtgttttggcagaatctggctggctacaagagacaggaagccctgagaccatacctgagcagcgaggaagatcggaagaagggaaagaaattcgctcggtaccagctgggcgacctgctgctgcacctggaaaagaagcacggcgaggactggggaaaggtgtacgacgaggcctgggagcggattgacaagaaagtggaaggcctgagcaagcacatcaagctggaagaggaacggagaagcgaggacgcccagagcaaggccgccctgaccgactggctgcgggctaaggccagcttcgtgatcgagggcctgaaggaggccgacaaggacgagttctgcagatgcgagctgaagctgcagaagtggtacggggacctgcggggaaagcccttcgccatcgaagccgagaacagcatcctggacatcagcggcttcagcaagcagtacaactgtgccttcatctggcagaaggacggcgtgaagaagctgaacctgtacctgatcatcaactacttcaagggcggcaagctgcggttcaagaagatcaaacctgaagccttcgaagccaacagattctacaccgtgatcaacaaaaagagcggcgagatcgtgcccatggaggtgaacttcaacttcgacgaccccaacctgatcatcctgcctctggcctttggcaagagacagggcagagaattcatctggaacgacctgctgtccctggaaaccggcagcctgaagctggccaacggaagagtgatcgagaagacactgtacaacagaagaacccggcaggatgagcctgccctgttcgtggccctgaccttcgagcggcgggaggtcctggactcctccaatatcaaaccaatgaacctgatcggcgtggcaagaggcgaaaacatccccgccgtgatcgccctgaccgaccccgagggctgcccactgagccggtttaaggatagcctgggaaacccaacccacatcctgagaatcggcgagagctataaggagaagcagcggaccatccaggccaagaaggaggtggagcagcggagagccggcggctacagccggaagtacgccagcaaagccaagaatctggcagacgatatggtgagaaacaccgctagagatctgctgtactacgccgtgacccaggatgccatgctgatcttcgccaacctgagccggggcttcggccggcagggcaagcggaccttcatggccgagagacagtacacacggatggaggactggctgaccgccaagctggcctacgagggcctgagcaagacctacctgtccaagacactggcccagtacacctccaagacatgcagcaactgtgggtttaccatcaccagcgccgactacgacagggtgctggagaagctgaagaagacagcaacaggctggatgaccacaattaacggcaaggagctgaaggtggagggccagattacctactacaacagatacaagagacagaacgtagtcaaggacctgtccgtcgagctggatagactgagcgaagaatctgtgaacaacgacatctcctcctggacaaagggcagaagcggagaagctctgagcctcctgaagaaaagattctcccatagacccgtgcaggagaagttcgtgtgcctgaactgcggcttcgagacacacgcagccgagcaagccgccctgaacatcgccagatcctggctgttcctgcggagccaggagtacaagaaataccagacaaacaagacaaccggcaacaccgataagagagccttcgtcgagacctggcagtccttttaccggaagaagcttaaggaggtgtggaaacctgccgtgcggtctggcggatctggcggaggctccacaagcgtgacctacgacgacgtgtgcatcgacttcacctgggaggagtggaccctgctggaccccagccagaagaagctgtacaaggacgtgatgctggagacctacaggaacctgaccgccatcggctacaactgggagaaccaccacgtggaggagtactaccagagcagcaggaggaacgccaggaacgagaagagccagaccgccgagaagcccagcgtgaacacccagtgcgtgaaggccttcacccacaccagccccaagaaaaagagaaaagtctaagctgccttctgcggggcttgccttctggccatgcccttcttctctcccttgcacctgtacctcttggtctttgaataaagcctgagtaggaaggctagcaaaaaaaaaaaaaaaaaaaaaaaaaaaaaaaaaaaaaaaaaaaaaaaaaaaaaaaaaaaaaaaaaaaaaaaaaaaaaaaa

SEQ ID NO: 3541 - RNA, 5419 nt, synthetic construct
  source 1..5419: mol_type = other RNA
aggaaataagagagaaaagaagagtaagaagaaatataagagccaccatggcccctaagaagaagcgtaaagtgagccgggtgaacggcagcggcagcggcggcggcatgaaccacgaccaggagttcgacccccctaaggtgtaccctcccgtccccgccgagaagagaaagcccatccgggtcctgagcctgttcgatggcatcgccaccggtctgctggtgctgaaggacctgggcatccaggtggataggtacattgcctccgaggtgtgcgaggactccatcaccgtgggaatggtgcgtcatcagggcaagatcatgtacgtgggcgacgtgcggagcgtgacacagaagcatatccaggagtggggccctttcgacctggtgatcggcggcagcccttgcaatgacctgagcatcgtgaacccagcccggaagggcctgtacgagggaaccggcagactgttcttcgagttttacagactgctgcacgacgcccggcctaaggaaggcgacgaccggcccttcttttggctgttcgagaatgtggtggccatgggagtcagcgacaagcgggatattagccggttcctggagagcaaccccgtgatgatcgatgccaaggaagtgagcgccgcccaccgggccagatacttctggggcaatctgcctggcatgaacagacccctggccagcaccgtgaacgacaagctggagctgcaggagtgcctggagcacggccggatcgccaagttcagcaaggtgagaaccatcaccacccgaagcaacagcatcaaacaaggcaaggaccagcactttcctgtgttcatgaacgagaaggaggacatcctgtggtgtaccgagatggagagagtgttcgggttcccagtccactacacagatgtcagcaacatgtctagactggccagacagagactgctgggaagaagctggtccgtccctgtgatcagacacctgttcgcccctctgaaggagtacttcgcctgcgtgagcagcggcaacagcaacgccaacagccggggccccagcttctctagcggcctggtgccactgtccctgagagggagccacatgggccccatggagatctacaaaaccgtgagcgcctggaagcggcagcctgtgcgcgtgctgagcctgtttcggaatatcgataaagtcctgaaaagcctgggattcctggagagcggctctggctccggcggtggcaccctgaagtacgtggaggatgtgacaaacgtggtcagacgggatgtggagaagtggggccccttcgatctggtgtacggcagcacccaacccctgggcagctcttgtgaccggtgccctggctggtacatgtttcagttccaccggatcctgcagtacgccctgccgagacaggagtcccagcggccattcttttggattttcatggacaacttgctgctgaccgaggatgaccaggaaactaccactcggttcctgcagaccgaagccgtgaccctgcaggacgtgagaggccgggactaccagaacgccatgcgggtgtggtccaacatccctggactgaaaagcaagcacgcacctctgacccctaaagaagaggagtacctgcaggcccaggtgcggagcagaagcaagctggacgcccctaaggtggatctgctggtgaagaattgcctcctgcccctgagagagtacttcaagtatttcagccagaatagtctgcccctgggcggcccaagcagcggcgcccctcctcccagcggcggcagcccagccggctccccaacctctaccgaggagggcacctctgagtccgccacccccgagagcggccctggcacctccaccgagcccagcgagggcagcgcacccggcagccctgccggcagccccacctccacagaggagggaaccagcaccgagcccagcgaaggcagcgccccaggcaccagcaccgagcctagtgagggcggctctggcggcggcagcgcccaggagattaaacggatcaacaagatcagaagaagacttgtgaaagacagcaacaccaagaaggccggcaagacaggccccatgaaaaccctgctggttagagtgatgacacccgatctgagagagcggctggaaaacctgagaaagaagcctgaaaatatcccccagcccatcagcaatacatctagagccaacctgaataagctgctgaccgattacaccgaaatgaagaaggcgatcctgcatgtgtactgggaagagttccagaaggaccctgtgggcctgatgagccgggtggcccagcctgccagcaagaagatcgatcagaacaagctgaaacctgagatggacgagaagggcaacctgaccaccgccggctttgcctgctctcagtgtggccagcccctgttcgtgtacaagctggagcaggtgtctgagaagggcaaggcttacaccaactacttcggacggtgcaatgtggccgagcacgaaaagctgatcctgctggcccagctgaagcccgagaaggatagcgacgaagccgtgacatatagcctgggaaagtttgggcagagggccctggatttctacagcattcatgtgaccaaggagtccacccaccccgtgaagcccctggcccagatcgccggaaacagatacgcctccggacctgtgggaaaggccctgagcgacgcatgtatgggcacaatcgcctccttcctgtctaagtaccaggacatcatcatcgaacaccagaaggtggtgaagggcaaccagaagagactggagagcctgcgggagctggccggcaaggaaaacctggaataccctagcgtgaccctgccacctcagcctcacaccaaggagggcgttgatgcctacaacgaagtgatcgcccgggtgcgaatgtgggtgaacctgaacctgtggcagaagctgaagctaagcagagatgatgccaagcctctgctgagactgaagggattcccttcctttcctctggtcgagagacaggccaacgaagtggactggtgggacatggtgtgtaacgtgaagaagctgatcaacgagaaaaaggaggatggcaaggtgttttggcagaatctggctggctacaagagacaggaagccctgagaccatacctgagcagcgaggaagatcggaagaagggaaagaaattcgctcggtaccagctgggcgacctgctgctgcacctggaaaagaagcacggcgaggactggggaaaggtgtacgacgaggcctgggagcggattgacaagaaagtggaaggcctgagcaagcacatcaagctggaagaggaacggagaagcgaggacgcccagagcaaggccgccctgaccgactggctgcgggctaaggccagcttcgtgatcgagggcctgaaggaggccgacaaggacgagttctgcagatgcgagctgaagctgcagaagtggtacggggacctgcggggaaagcccttcgccatcgaagccgagaacagcatcctggacatcagcggcttcagcaagcagtacaactgtgccttcatctggcagaaggacggcgtgaagaagctgaacctgtacctgatcatcaactacttcaagggcggcaagctgcggttcaagaagatcaaacctgaagccttcgaagccaacagattctacaccgtgatcaacaaaaagagcggcgagatcgtgcccatggaggtgaacttcaacttcgacgaccccaacctgatcatcctgcctctggcctttggcaagagacagggcagagaattcatctggaacgacctgctgtccctggaaaccggcagcctgaagctggccaacggaagagtgatcgagaagacactgtacaacagaagaacccggcaggatgagcctgccctgttcgtggccctgaccttcgagcggcgggaggtcctggactcctccaatatcaaaccaatgaacctgatcggcgtggcaagaggcgaaaacatccccgccgtgatcgccctgaccgaccccgagggctgcccactgagccggtttaaggatagcctgggaaacccaacccacatcctgagaatcggcgagagctataaggagaagcagcggaccatccaggccaagaaggaggtggagcagcggagagccggcggctacagccggaagtacgccagcaaagccaagaatctggcagacgatatggtgagaaacaccgctagagatctgctgtactacgccgtgacccaggatgccatgctgatcttcgccaacctgagccggggcttcggccggcagggcaagcggaccttcatggccgagagacagtacacacggatggaggactggctgaccgccaagctggcctacgagggcctgagcaagacctacctgtccaagacactggcccagtacacctccaagacatgcagcaactgtgggtttaccatcaccagcgccgactacgacagggtgctggagaagctgaagaagacagcaacaggctggatgaccacaattaacggcaaggagctgaaggtggagggccagattacctactacaacagatacaagagacagaacgtagtcaaggacctgtccgtcgagctggatagactgagcgaagaatctgtgaacaacgacatctcctcctggacaaagggcagaagcggagaagctctgagcctcctgaagaaaagattctcccatagacccgtgcaggagaagttcgtgtgcctgaactgcggcttcgagacacacgcagccgagcaagccgccctgaacatcgccagatcctggctgttcctgcggagccaggagtacaagaaataccagacaaacaagacaaccggcaacaccgataagagagccttcgtcgagacctggcagtccttttaccggaagaagcttaaggaggtgtggaaacctgccgtgcggtctggcggatctggcggaggctccacaagcatggagggcctggtgatgttcagggacgtggccgtggacttcagccaggaggagtgggcctgcctggaccccgcccagaggggcctgtacagggacgtgatgctggagaactaccaccacctggtgagcctgggcctgagcctgagcaagcccgacgtgatcagcctgctggagcagggcaaggagccctggatggtgagcaggaacatggccggcggctggtgccccgacaggctgaagaacaccagccccaagaaaaagagaaaagtctaagctgccttctgcggggcttgccttctggccatgcccttcttctctcccttgcacctgtacctcttggtctttgaataaagcctgagtaggaaggctagcaaaaaaaaaaaaaaaaaaaaaaaaaaaaaaaaaaaaaaaaaaaaaaaaaaaaaaaaaaaaaaaaaaaaaaaaaaaaaaaa

SEQ ID NO: 3542 - RNA, 5419 nt, synthetic construct
  source 1..5419: mol_type = other RNA
aggaaataagagagaaaagaagagtaagaagaaatataagagccaccatggcccctaagaagaagcgtaaagtgagccgggtgaacggcagcggcagcggcggcggcatgaaccacgaccaggagttcgacccccctaaggtgtaccctcccgtccccgccgagaagagaaagcccatccgggtcctgagcctgttcgatggcatcgccaccggtctgctggtgctgaaggacctgggcatccaggtggataggtacattgcctccgaggtgtgcgaggactccatcaccgtgggaatggtgcgtcatcagggcaagatcatgtacgtgggcgacgtgcggagcgtgacacagaagcatatccaggagtggggccctttcgacctggtgatcggcggcagcccttgcaatgacctgagcatcgtgaacccagcccggaagggcctgtacgagggaaccggcagactgttcttcgagttttacagactgctgcacgacgcccggcctaaggaaggcgacgaccggcccttcttttggctgttcgagaatgtggtggccatgggagtcagcgacaagcgggatattagccggttcctggagagcaaccccgtgatgatcgatgccaaggaagtgagcgccgcccaccgggccagatacttctggggcaatctgcctggcatgaacagacccctggccagcaccgtgaacgacaagctggagctgcaggagtgcctggagcacggccggatcgccaagttcagcaaggtgagaaccatcaccacccgaagcaacagcatcaaacaaggcaaggaccagcactttcctgtgttcatgaacgagaaggaggacatcctgtggtgtaccgagatggagagagtgttcgggttcccagtccactacacagatgtcagcaacatgtctagactggccagacagagactgctgggaagaagctggtccgtccctgtgatcagacacctgttcgcccctctgaaggagtacttcgcctgcgtgagcagcggcaacagcaacgccaacagccggggccccagcttctctagcggcctggtgccactgtccctgagagggagccacatgggccccatggagatctacaaaaccgtgagcgcctggaagcggcagcctgtgcgcgtgctgagcctgtttcggaatatcgataaagtcctgaaaagcctgggattcctggagagcggctctggctccggcggtggcaccctgaagtacgtggaggatgtgacaaacgtggtcagacgggatgtggagaagtggggccccttcgatctggtgtacggcagcacccaacccctgggcagctcttgtgaccggtgccctggctggtacatgtttcagttccaccggatcctgcagtacgccctgccgagacaggagtcccagcggccattcttttggattttcatggacaacttgctgctgaccgaggatgaccaggaaactaccactcggttcctgcagaccgaagccgtgaccctgcaggacgtgagaggccgggactaccagaacgccatgcgggtgtggtccaacatccctggactgaaaagcaagcacgcacctctgacccctaaagaagaggagtacctgcaggcccaggtgcggagcagaagcaagctggacgcccctaaggtggatctgctggtgaagaattgcctcctgcccctgagagagtacttcaagtatttcagccagaatagtctgcccctgggcggcccaagcagcggcgcccctcctcccagcggcggcagcccagccggctccccaacctctaccgaggagggcacctctgagtccgccacccccgagagcggccctggcacctccaccgagcccagcgagggcagcgcacccggcagccctgccggcagccccacctccacagaggagggaaccagcaccgagcccagcgaaggcagcgccccaggcaccagcaccgagcctagtgagggcggctctggcggcggcagcgcccaggagattaaacggatcaacaagatcagaagaagacttgtgaaagacagcaacaccaagaaggccggcaagacaggccccatgaaaaccctgctggttagagtgatgacacccgatctgagagagcggctggaaaacctgagaaagaagcctgaaaatatcccccagcccatcagcaatacatctagagccaacctgaataagctgctgaccgattacaccgaaatgaagaaggcgatcctgcatgtgtactgggaagagttccagaaggaccctgtgggcctgatgagccgggtggcccagcctgccagcaagaagatcgatcagaacaagctgaaacctgagatggacgagaagggcaacctgaccaccgccggctttgcctgctctcagtgtggccagcccctgttcgtgtacaagctggagcaggtgtctgagaagggcaaggcttacaccaactacttcggacggtgcaatgtggccgagcacgaaaagctgatcctgctggcccagctgaagcccgagaaggatagcgacgaagccgtgacatatagcctgggaaagtttgggcagagggccctggatttctacagcattcatgtgaccaaggagtccacccaccccgtgaagcccctggcccagatcgccggaaacagatacgcctccggacctgtgggaaaggccctgagcgacgcatgtatgggcacaatcgcctccttcctgtctaagtaccaggacatcatcatcgaacaccagaaggtggtgaagggcaaccagaagagactggagagcctgcgggagctggccggcaaggaaaacctggaataccctagcgtgaccctgccacctcagcctcacaccaaggagggcgttgatgcctacaacgaagtgatcgcccgggtgcgaatgtgggtgaacctgaacctgtggcagaagctgaagctaagcagagatgatgccaagcctctgctgagactgaagggattcccttcctttcctctggtcgagagacaggccaacgaagtggactggtgggacatggtgtgtaacgtgaagaagctgatcaacgagaaaaaggaggatggcaaggtgttttggcagaatctggctggctacaagagacaggaagccctgagaccatacctgagcagcgaggaagatcggaagaagggaaagaaattcgctcggtaccagctgggcgacctgctgctgcacctggaaaagaagcacggcgaggactggggaaaggtgtacgacgaggcctgggagcggattgacaagaaagtggaaggcctgagcaagcacatcaagctggaagaggaacggagaagcgaggacgcccagagcaaggccgccctgaccgactggctgcgggctaaggccagcttcgtgatcgagggcctgaaggaggccgacaaggacgagttctgcagatgcgagctgaagctgcagaagtggtacggggacctgcggggaaagcccttcgccatcgaagccgagaacagcatcctggacatcagcggcttcagcaagcagtacaactgtgccttcatctggcagaaggacggcgtgaagaagctgaacctgtacctgatcatcaactacttcaagggcggcaagctgcggttcaagaagatcaaacctgaagccttcgaagccaacagattctacaccgtgatcaacaaaaagagcggcgagatcgtgcccatggaggtgaacttcaacttcgacgaccccaacctgatcatcctgcctctggcctttggcaagagacagggcagagaattcatctggaacgacctgctgtccctggaaaccggcagcctgaagctggccaacggaagagtgatcgagaagacactgtacaacagaagaacccggcaggatgagcctgccctgttcgtggccctgaccttcgagcggcgggaggtcctggactcctccaatatcaaaccaatgaacctgatcggcgtggcaagaggcgaaaacatccccgccgtgatcgccctgaccgaccccgagggctgcccactgagccggtttaaggatagcctgggaaacccaacccacatcctgagaatcggcgagagctataaggagaagcagcggaccatccaggccaagaaggaggtggagcagcggagagccggcggctacagccggaagtacgccagcaaagccaagaatctggcagacgatatggtgagaaacaccgctagagatctgctgtactacgccgtgacccaggatgccatgctgatcttcgccaacctgagccggggcttcggccggcagggcaagcggaccttcatggccgagagacagtacacacggatggaggactggctgaccgccaagctggcctacgagggcctgagcaagacctacctgtccaagacactggcccagtacacctccaagacatgcagcaactgtgggtttaccatcaccagcgccgactacgacagggtgctggagaagctgaagaagacagcaacaggctggatgaccacaattaacggcaaggagctgaaggtggagggccagattacctactacaacagatacaagagacagaacgtagtcaaggacctgtccgtcgagctggatagactgagcgaagaatctgtgaacaacgacatctcctcctggacaaagggcagaagcggagaagctctgagcctcctgaagaaaagattctcccatagacccgtgcaggagaagttcgtgtgcctgaactgcggcttcgagacacacgcagccgagcaagccgccctgaacatcgccagatcctggctgttcctgcggagccaggagtacaagaaataccagacaaacaagacaaccggcaacaccgataagagagccttcgtcgagacctggcagtccttttaccggaagaagcttaaggaggtgtggaaacctgccgtgcggtctggcggatctggcggaggctccacaagcgccagggagcccgtgagcttcgtggaggtggccgtgtacttcagcagggaggagtgggccctgctggaccccgcccagagggccctgtacagggacgtgatgctggagacctacgagagcgtggccagcctgggccccttccccgcccccaagcccgtggtgatcagcctgctggagggcggcgacgacccctggatccccgacgtgcacagccccgaggccgtgagcggcgacttcagccccaccagccccaagaaaaagagaaaagtctaagctgccttctgcggggcttgccttctggccatgcccttcttctctcccttgcacctgtacctcttggtctttgaataaagcctgagtaggaaggctagcaaaaaaaaaaaaaaaaaaaaaaaaaaaaaaaaaaaaaaaaaaaaaaaaaaaaaaaaaaaaaaaaaaaaaaaaaaaaaaaa

SEQ ID NO: 3543 - RNA, 5419 nt, synthetic construct
  source 1..5419: mol_type = other RNA
aggaaataagagagaaaagaagagtaagaagaaatataagagccaccatggcccctaagaagaagcgtaaagtgagccgggtgaacggcagcggcagcggcggcggcatgaaccacgaccaggagttcgacccccctaaggtgtaccctcccgtccccgccgagaagagaaagcccatccgggtcctgagcctgttcgatggcatcgccaccggtctgctggtgctgaaggacctgggcatccaggtggataggtacattgcctccgaggtgtgcgaggactccatcaccgtgggaatggtgcgtcatcagggcaagatcatgtacgtgggcgacgtgcggagcgtgacacagaagcatatccaggagtggggccctttcgacctggtgatcggcggcagcccttgcaatgacctgagcatcgtgaacccagcccggaagggcctgtacgagggaaccggcagactgttcttcgagttttacagactgctgcacgacgcccggcctaaggaaggcgacgaccggcccttcttttggctgttcgagaatgtggtggccatgggagtcagcgacaagcgggatattagccggttcctggagagcaaccccgtgatgatcgatgccaaggaagtgagcgccgcccaccgggccagatacttctggggcaatctgcctggcatgaacagacccctggccagcaccgtgaacgacaagctggagctgcaggagtgcctggagcacggccggatcgccaagttcagcaaggtgagaaccatcaccacccgaagcaacagcatcaaacaaggcaaggaccagcactttcctgtgttcatgaacgagaaggaggacatcctgtggtgtaccgagatggagagagtgttcgggttcccagtccactacacagatgtcagcaacatgtctagactggccagacagagactgctgggaagaagctggtccgtccctgtgatcagacacctgttcgcccctctgaaggagtacttcgcctgcgtgagcagcggcaacagcaacgccaacagccggggccccagcttctctagcggcctggtgccactgtccctgagagggagccacatgggccccatggagatctacaaaaccgtgagcgcctggaagcggcagcctgtgcgcgtgctgagcctgtttcggaatatcgataaagtcctgaaaagcctgggattcctggagagcggctctggctccggcggtggcaccctgaagtacgtggaggatgtgacaaacgtggtcagacgggatgtggagaagtggggccccttcgatctggtgtacggcagcacccaacccctgggcagctcttgtgaccggtgccctggctggtacatgtttcagttccaccggatcctgcagtacgccctgccgagacaggagtcccagcggccattcttttggattttcatggacaacttgctgctgaccgaggatgaccaggaaactaccactcggttcctgcagaccgaagccgtgaccctgcaggacgtgagaggccgggactaccagaacgccatgcgggtgtggtccaacatccctggactgaaaagcaagcacgcacctctgacccctaaagaagaggagtacctgcaggcccaggtgcggagcagaagcaagctggacgcccctaaggtggatctgctggtgaagaattgcctcctgcccctgagagagtacttcaagtatttcagccagaatagtctgcccctgggcggcccaagcagcggcgcccctcctcccagcggcggcagcccagccggctccccaacctctaccgaggagggcacctctgagtccgccacccccgagagcggccctggcacctccaccgagcccagcgagggcagcgcacccggcagccctgccggcagccccacctccacagaggagggaaccagcaccgagcccagcgaaggcagcgccccaggcaccagcaccgagcctagtgagggcggctctggcggcggcagcgcccaggagattaaacggatcaacaagatcagaagaagacttgtgaaagacagcaacaccaagaaggccggcaagacaggccccatgaaaaccctgctggttagagtgatgacacccgatctgagagagcggctggaaaacctgagaaagaagcctgaaaatatcccccagcccatcagcaatacatctagagccaacctgaataagctgctgaccgattacaccgaaatgaagaaggcgatcctgcatgtgtactgggaagagttccagaaggaccctgtgggcctgatgagccgggtggcccagcctgccagcaagaagatcgatcagaacaagctgaaacctgagatggacgagaagggcaacctgaccaccgccggctttgcctgctctcagtgtggccagcccctgttcgtgtacaagctggagcaggtgtctgagaagggcaaggcttacaccaactacttcggacggtgcaatgtggccgagcacgaaaagctgatcctgctggcccagctgaagcccgagaaggatagcgacgaagccgtgacatatagcctgggaaagtttgggcagagggccctggatttctacagcattcatgtgaccaaggagtccacccaccccgtgaagcccctggcccagatcgccggaaacagatacgcctccggacctgtgggaaaggccctgagcgacgcatgtatgggcacaatcgcctccttcctgtctaagtaccaggacatcatcatcgaacaccagaaggtggtgaagggcaaccagaagagactggagagcctgcgggagctggccggcaaggaaaacctggaataccctagcgtgaccctgccacctcagcctcacaccaaggagggcgttgatgcctacaacgaagtgatcgcccgggtgcgaatgtgggtgaacctgaacctgtggcagaagctgaagctaagcagagatgatgccaagcctctgctgagactgaagggattcccttcctttcctctggtcgagagacaggccaacgaagtggactggtgggacatggtgtgtaacgtgaagaagctgatcaacgagaaaaaggaggatggcaaggtgttttggcagaatctggctggctacaagagacaggaagccctgagaccatacctgagcagcgaggaagatcggaagaagggaaagaaattcgctcggtaccagctgggcgacctgctgctgcacctggaaaagaagcacggcgaggactggggaaaggtgtacgacgaggcctgggagcggattgacaagaaagtggaaggcctgagcaagcacatcaagctggaagaggaacggagaagcgaggacgcccagagcaaggccgccctgaccgactggctgcgggctaaggccagcttcgtgatcgagggcctgaaggaggccgacaaggacgagttctgcagatgcgagctgaagctgcagaagtggtacggggacctgcggggaaagcccttcgccatcgaagccgagaacagcatcctggacatcagcggcttcagcaagcagtacaactgtgccttcatctggcagaaggacggcgtgaagaagctgaacctgtacctgatcatcaactacttcaagggcggcaagctgcggttcaagaagatcaaacctgaagccttcgaagccaacagattctacaccgtgatcaacaaaaagagcggcgagatcgtgcccatggaggtgaacttcaacttcgacgaccccaacctgatcatcctgcctctggcctttggcaagagacagggcagagaattcatctggaacgacctgctgtccctggaaaccggcagcctgaagctggccaacggaagagtgatcgagaagacactgtacaacagaagaacccggcaggatgagcctgccctgttcgtggccctgaccttcgagcggcgggaggtcctggactcctccaatatcaaaccaatgaacctgatcggcgtggcaagaggcgaaaacatccccgccgtgatcgccctgaccgaccccgagggctgcccactgagccggtttaaggatagcctgggaaacccaacccacatcctgagaatcggcgagagctataaggagaagcagcggaccatccaggccaagaaggaggtggagcagcggagagccggcggctacagccggaagtacgccagcaaagccaagaatctggcagacgatatggtgagaaacaccgctagagatctgctgtactacgccgtgacccaggatgccatgctgatcttcgccaacctgagccggggcttcggccggcagggcaagcggaccttcatggccgagagacagtacacacggatggaggactggctgaccgccaagctggcctacgagggcctgagcaagacctacctgtccaagacactggcccagtacacctccaagacatgcagcaactgtgggtttaccatcaccagcgccgactacgacagggtgctggagaagctgaagaagacagcaacaggctggatgaccacaattaacggcaaggagctgaaggtggagggccagattacctactacaacagatacaagagacagaacgtagtcaaggacctgtccgtcgagctggatagactgagcgaagaatctgtgaacaacgacatctcctcctggacaaagggcagaagcggagaagctctgagcctcctgaagaaaagattctcccatagacccgtgcaggagaagttcgtgtgcctgaactgcggcttcgagacacacgcagccgagcaagccgccctgaacatcgccagatcctggctgttcctgcggagccaggagtacaagaaataccagacaaacaagacaaccggcaacaccgataagagagccttcgtcgagacctggcagtccttttaccggaagaagcttaaggaggtgtggaaacctgccgtgcggtctggcggatctggcggaggctccacaagcgccagggccagcctgagcttcgaggacgtggccgtgggcttcagctgggaggagtggcagctgctggcccccagccagaaggacctgtacagggaggtgatgctggagaactacaggaacctggtgagcgtgggctaccaggccagcaagcccgacagcctgttccagctggagcagggcgagcccccctggaccgtggtgggcgccgcccagagccagacctgccaggaggagatctgggagaccagccccaagaaaaagagaaaagtctaagctgccttctgcggggcttgccttctggccatgcccttcttctctcccttgcacctgtacctcttggtctttgaataaagcctgagtaggaaggctagcaaaaaaaaaaaaaaaaaaaaaaaaaaaaaaaaaaaaaaaaaaaaaaaaaaaaaaaaaaaaaaaaaaaaaaaaaaaaaaaa

SEQ ID NO: 3544 - RNA, 5419 nt, synthetic construct
  source 1..5419: mol_type = other RNA
aggaaataagagagaaaagaagagtaagaagaaatataagagccaccatggcccctaagaagaagcgtaaagtgagccgggtgaacggcagcggcagcggcggcggcatgaaccacgaccaggagttcgacccccctaaggtgtaccctcccgtccccgccgagaagagaaagcccatccgggtcctgagcctgttcgatggcatcgccaccggtctgctggtgctgaaggacctgggcatccaggtggataggtacattgcctccgaggtgtgcgaggactccatcaccgtgggaatggtgcgtcatcagggcaagatcatgtacgtgggcgacgtgcggagcgtgacacagaagcatatccaggagtggggccctttcgacctggtgatcggcggcagcccttgcaatgacctgagcatcgtgaacccagcccggaagggcctgtacgagggaaccggcagactgttcttcgagttttacagactgctgcacgacgcccggcctaaggaaggcgacgaccggcccttcttttggctgttcgagaatgtggtggccatgggagtcagcgacaagcgggatattagccggttcctggagagcaaccccgtgatgatcgatgccaaggaagtgagcgccgcccaccgggccagatacttctggggcaatctgcctggcatgaacagacccctggccagcaccgtgaacgacaagctggagctgcaggagtgcctggagcacggccggatcgccaagttcagcaaggtgagaaccatcaccacccgaagcaacagcatcaaacaaggcaaggaccagcactttcctgtgttcatgaacgagaaggaggacatcctgtggtgtaccgagatggagagagtgttcgggttcccagtccactacacagatgtcagcaacatgtctagactggccagacagagactgctgggaagaagctggtccgtccctgtgatcagacacctgttcgcccctctgaaggagtacttcgcctgcgtgagcagcggcaacagcaacgccaacagccggggccccagcttctctagcggcctggtgccactgtccctgagagggagccacatgggccccatggagatctacaaaaccgtgagcgcctggaagcggcagcctgtgcgcgtgctgagcctgtttcggaatatcgataaagtcctgaaaagcctgggattcctggagagcggctctggctccggcggtggcaccctgaagtacgtggaggatgtgacaaacgtggtcagacgggatgtggagaagtggggccccttcgatctggtgtacggcagcacccaacccctgggcagctcttgtgaccggtgccctggctggtacatgtttcagttccaccggatcctgcagtacgccctgccgagacaggagtcccagcggccattcttttggattttcatggacaacttgctgctgaccgaggatgaccaggaaactaccactcggttcctgcagaccgaagccgtgaccctgcaggacgtgagaggccgggactaccagaacgccatgcgggtgtggtccaacatccctggactgaaaagcaagcacgcacctctgacccctaaagaagaggagtacctgcaggcccaggtgcggagcagaagcaagctggacgcccctaaggtggatctgctggtgaagaattgcctcctgcccctgagagagtacttcaagtatttcagccagaatagtctgcccctgggcggcccaagcagcggcgcccctcctcccagcggcggcagcccagccggctccccaacctctaccgaggagggcacctctgagtccgccacccccgagagcggccctggcacctccaccgagcccagcgagggcagcgcacccggcagccctgccggcagccccacctccacagaggagggaaccagcaccgagcccagcgaaggcagcgccccaggcaccagcaccgagcctagtgagggcggctctggcggcggcagcgcccaggagattaaacggatcaacaagatcagaagaagacttgtgaaagacagcaacaccaagaaggccggcaagacaggccccatgaaaaccctgctggttagagtgatgacacccgatctgagagagcggctggaaaacctgagaaagaagcctgaaaatatcccccagcccatcagcaatacatctagagccaacctgaataagctgctgaccgattacaccgaaatgaagaaggcgatcctgcatgtgtactgggaagagttccagaaggaccctgtgggcctgatgagccgggtggcccagcctgccagcaagaagatcgatcagaacaagctgaaacctgagatggacgagaagggcaacctgaccaccgccggctttgcctgctctcagtgtggccagcccctgttcgtgtacaagctggagcaggtgtctgagaagggcaaggcttacaccaactacttcggacggtgcaatgtggccgagcacgaaaagctgatcctgctggcccagctgaagcccgagaaggatagcgacgaagccgtgacatatagcctgggaaagtttgggcagagggccctggatttctacagcattcatgtgaccaaggagtccacccaccccgtgaagcccctggcccagatcgccggaaacagatacgcctccggacctgtgggaaaggccctgagcgacgcatgtatgggcacaatcgcctccttcctgtctaagtaccaggacatcatcatcgaacaccagaaggtggtgaagggcaaccagaagagactggagagcctgcgggagctggccggcaaggaaaacctggaataccctagcgtgaccctgccacctcagcctcacaccaaggagggcgttgatgcctacaacgaagtgatcgcccgggtgcgaatgtgggtgaacctgaacctgtggcagaagctgaagctaagcagagatgatgccaagcctctgctgagactgaagggattcccttcctttcctctggtcgagagacaggccaacgaagtggactggtgggacatggtgtgtaacgtgaagaagctgatcaacgagaaaaaggaggatggcaaggtgttttggcagaatctggctggctacaagagacaggaagccctgagaccatacctgagcagcgaggaagatcggaagaagggaaagaaattcgctcggtaccagctgggcgacctgctgctgcacctggaaaagaagcacggcgaggactggggaaaggtgtacgacgaggcctgggagcggattgacaagaaagtggaaggcctgagcaagcacatcaagctggaagaggaacggagaagcgaggacgcccagagcaaggccgccctgaccgactggctgcgggctaaggccagcttcgtgatcgagggcctgaaggaggccgacaaggacgagttctgcagatgcgagctgaagctgcagaagtggtacggggacctgcggggaaagcccttcgccatcgaagccgagaacagcatcctggacatcagcggcttcagcaagcagtacaactgtgccttcatctggcagaaggacggcgtgaagaagctgaacctgtacctgatcatcaactacttcaagggcggcaagctgcggttcaagaagatcaaacctgaagccttcgaagccaacagattctacaccgtgatcaacaaaaagagcggcgagatcgtgcccatggaggtgaacttcaacttcgacgaccccaacctgatcatcctgcctctggcctttggcaagagacagggcagagaattcatctggaacgacctgctgtccctggaaaccggcagcctgaagctggccaacggaagagtgatcgagaagacactgtacaacagaagaacccggcaggatgagcctgccctgttcgtggccctgaccttcgagcggcgggaggtcctggactcctccaatatcaaaccaatgaacctgatcggcgtggcaagaggcgaaaacatccccgccgtgatcgccctgaccgaccccgagggctgcccactgagccggtttaaggatagcctgggaaacccaacccacatcctgagaatcggcgagagctataaggagaagcagcggaccatccaggccaagaaggaggtggagcagcggagagccggcggctacagccggaagtacgccagcaaagccaagaatctggcagacgatatggtgagaaacaccgctagagatctgctgtactacgccgtgacccaggatgccatgctgatcttcgccaacctgagccggggcttcggccggcagggcaagcggaccttcatggccgagagacagtacacacggatggaggactggctgaccgccaagctggcctacgagggcctgagcaagacctacctgtccaagacactggcccagtacacctccaagacatgcagcaactgtgggtttaccatcaccagcgccgactacgacagggtgctggagaagctgaagaagacagcaacaggctggatgaccacaattaacggcaaggagctgaaggtggagggccagattacctactacaacagatacaagagacagaacgtagtcaaggacctgtccgtcgagctggatagactgagcgaagaatctgtgaacaacgacatctcctcctggacaaagggcagaagcggagaagctctgagcctcctgaagaaaagattctcccatagacccgtgcaggagaagttcgtgtgcctgaactgcggcttcgagacacacgcagccgagcaagccgccctgaacatcgccagatcctggctgttcctgcggagccaggagtacaagaaataccagacaaacaagacaaccggcaacaccgataagagagccttcgtcgagacctggcagtccttttaccggaagaagcttaaggaggtgtggaaacctgccgtgcggtctggcggatctggcggaggctccacaagcagccagggcctggtgaccttcgaggacgtggccgtgtacttcagcctggaggagtgggagaggctgaacgtggagcagagggccctgtaccaggaggtgatgcagggcaactacggcatcctggtgagcctgggctaccccatccccaagcccgacctgatcttcaggctggagcagggcgaggagccctgggtgcccgacagcccccaccccgaggagggcgacatcgtgaccggcgtgtacaccagccccaagaaaaagagaaaagtctaagctgccttctgcggggcttgccttctggccatgcccttcttctctcccttgcacctgtacctcttggtctttgaataaagcctgagtaggaaggctagcaaaaaaaaaaaaaaaaaaaaaaaaaaaaaaaaaaaaaaaaaaaaaaaaaaaaaaaaaaaaaaaaaaaaaaaaaaaaaaaa

SEQ ID NO: 3545 - RNA, 5419 nt, synthetic construct
  source 1..5419: mol_type = other RNA
aggaaataagagagaaaagaagagtaagaagaaatataagagccaccatggcccctaagaagaagcgtaaagtgagccgggtgaacggcagcggcagcggcggcggcatgaaccacgaccaggagttcgacccccctaaggtgtaccctcccgtccccgccgagaagagaaagcccatccgggtcctgagcctgttcgatggcatcgccaccggtctgctggtgctgaaggacctgggcatccaggtggataggtacattgcctccgaggtgtgcgaggactccatcaccgtgggaatggtgcgtcatcagggcaagatcatgtacgtgggcgacgtgcggagcgtgacacagaagcatatccaggagtggggccctttcgacctggtgatcggcggcagcccttgcaatgacctgagcatcgtgaacccagcccggaagggcctgtacgagggaaccggcagactgttcttcgagttttacagactgctgcacgacgcccggcctaaggaaggcgacgaccggcccttcttttggctgttcgagaatgtggtggccatgggagtcagcgacaagcgggatattagccggttcctggagagcaaccccgtgatgatcgatgccaaggaagtgagcgccgcccaccgggccagatacttctggggcaatctgcctggcatgaacagacccctggccagcaccgtgaacgacaagctggagctgcaggagtgcctggagcacggccggatcgccaagttcagcaaggtgagaaccatcaccacccgaagcaacagcatcaaacaaggcaaggaccagcactttcctgtgttcatgaacgagaaggaggacatcctgtggtgtaccgagatggagagagtgttcgggttcccagtccactacacagatgtcagcaacatgtctagactggccagacagagactgctgggaagaagctggtccgtccctgtgatcagacacctgttcgcccctctgaaggagtacttcgcctgcgtgagcagcggcaacagcaacgccaacagccggggccccagcttctctagcggcctggtgccactgtccctgagagggagccacatgggccccatggagatctacaaaaccgtgagcgcctggaagcggcagcctgtgcgcgtgctgagcctgtttcggaatatcgataaagtcctgaaaagcctgggattcctggagagcggctctggctccggcggtggcaccctgaagtacgtggaggatgtgacaaacgtggtcagacgggatgtggagaagtggggccccttcgatctggtgtacggcagcacccaacccctgggcagctcttgtgaccggtgccctggctggtacatgtttcagttccaccggatcctgcagtacgccctgccgagacaggagtcccagcggccattcttttggattttcatggacaacttgctgctgaccgaggatgaccaggaaactaccactcggttcctgcagaccgaagccgtgaccctgcaggacgtgagaggccgggactaccagaacgccatgcgggtgtggtccaacatccctggactgaaaagcaagcacgcacctctgacccctaaagaagaggagtacctgcaggcccaggtgcggagcagaagcaagctggacgcccctaaggtggatctgctggtgaagaattgcctcctgcccctgagagagtacttcaagtatttcagccagaatagtctgcccctgggcggcccaagcagcggcgcccctcctcccagcggcggcagcccagccggctccccaacctctaccgaggagggcacctctgagtccgccacccccgagagcggccctggcacctccaccgagcccagcgagggcagcgcacccggcagccctgccggcagccccacctccacagaggagggaaccagcaccgagcccagcgaaggcagcgccccaggcaccagcaccgagcctagtgagggcggctctggcggcggcagcgcccaggagattaaacggatcaacaagatcagaagaagacttgtgaaagacagcaacaccaagaaggccggcaagacaggccccatgaaaaccctgctggttagagtgatgacacccgatctgagagagcggctggaaaacctgagaaagaagcctgaaaatatcccccagcccatcagcaatacatctagagccaacctgaataagctgctgaccgattacaccgaaatgaagaaggcgatcctgcatgtgtactgggaagagttccagaaggaccctgtgggcctgatgagccgggtggcccagcctgccagcaagaagatcgatcagaacaagctgaaacctgagatggacgagaagggcaacctgaccaccgccggctttgcctgctctcagtgtggccagcccctgttcgtgtacaagctggagcaggtgtctgagaagggcaaggcttacaccaactacttcggacggtgcaatgtggccgagcacgaaaagctgatcctgctggcccagctgaagcccgagaaggatagcgacgaagccgtgacatatagcctgggaaagtttgggcagagggccctggatttctacagcattcatgtgaccaaggagtccacccaccccgtgaagcccctggcccagatcgccggaaacagatacgcctccggacctgtgggaaaggccctgagcgacgcatgtatgggcacaatcgcctccttcctgtctaagtaccaggacatcatcatcgaacaccagaaggtggtgaagggcaaccagaagagactggagagcctgcgggagctggccggcaaggaaaacctggaataccctagcgtgaccctgccacctcagcctcacaccaaggagggcgttgatgcctacaacgaagtgatcgcccgggtgcgaatgtgggtgaacctgaacctgtggcagaagctgaagctaagcagagatgatgccaagcctctgctgagactgaagggattcccttcctttcctctggtcgagagacaggccaacgaagtggactggtgggacatggtgtgtaacgtgaagaagctgatcaacgagaaaaaggaggatggcaaggtgttttggcagaatctggctggctacaagagacaggaagccctgagaccatacctgagcagcgaggaagatcggaagaagggaaagaaattcgctcggtaccagctgggcgacctgctgctgcacctggaaaagaagcacggcgaggactggggaaaggtgtacgacgaggcctgggagcggattgacaagaaagtggaaggcctgagcaagcacatcaagctggaagaggaacggagaagcgaggacgcccagagcaaggccgccctgaccgactggctgcgggctaaggccagcttcgtgatcgagggcctgaaggaggccgacaaggacgagttctgcagatgcgagctgaagctgcagaagtggtacggggacctgcggggaaagcccttcgccatcgaagccgagaacagcatcctggacatcagcggcttcagcaagcagtacaactgtgccttcatctggcagaaggacggcgtgaagaagctgaacctgtacctgatcatcaactacttcaagggcggcaagctgcggttcaagaagatcaaacctgaagccttcgaagccaacagattctacaccgtgatcaacaaaaagagcggcgagatcgtgcccatggaggtgaacttcaacttcgacgaccccaacctgatcatcctgcctctggcctttggcaagagacagggcagagaattcatctggaacgacctgctgtccctggaaaccggcagcctgaagctggccaacggaagagtgatcgagaagacactgtacaacagaagaacccggcaggatgagcctgccctgttcgtggccctgaccttcgagcggcgggaggtcctggactcctccaatatcaaaccaatgaacctgatcggcgtggcaagaggcgaaaacatccccgccgtgatcgccctgaccgaccccgagggctgcccactgagccggtttaaggatagcctgggaaacccaacccacatcctgagaatcggcgagagctataaggagaagcagcggaccatccaggccaagaaggaggtggagcagcggagagccggcggctacagccggaagtacgccagcaaagccaagaatctggcagacgatatggtgagaaacaccgctagagatctgctgtactacgccgtgacccaggatgccatgctgatcttcgccaacctgagccggggcttcggccggcagggcaagcggaccttcatggccgagagacagtacacacggatggaggactggctgaccgccaagctggcctacgagggcctgagcaagacctacctgtccaagacactggcccagtacacctccaagacatgcagcaactgtgggtttaccatcaccagcgccgactacgacagggtgctggagaagctgaagaagacagcaacaggctggatgaccacaattaacggcaaggagctgaaggtggagggccagattacctactacaacagatacaagagacagaacgtagtcaaggacctgtccgtcgagctggatagactgagcgaagaatctgtgaacaacgacatctcctcctggacaaagggcagaagcggagaagctctgagcctcctgaagaaaagattctcccatagacccgtgcaggagaagttcgtgtgcctgaactgcggcttcgagacacacgcagccgagcaagccgccctgaacatcgccagatcctggctgttcctgcggagccaggagtacaagaaataccagacaaacaagacaaccggcaacaccgataagagagccttcgtcgagacctggcagtccttttaccggaagaagcttaaggaggtgtggaaacctgccgtgcggtctggcggatctggcggaggctccacaagcccccagaagagcgtgaccttcgaggacgtggccgtgtacttcacccagaccgagtgggacggcctgagccccgcccagagggccctgtacagggacgtgatgctggagaactacggcaacgtggccagcctgggcttcagcctgctgaagcccgccgtgatcagccagctggagggcgccgacgagctggagggccccagccccctggtggccggcaccgagatcggcccccagggcctgtggaccagccccaagaaaaagagaaaagtctaagctgccttctgcggggcttgccttctggccatgcccttcttctctcccttgcacctgtacctcttggtctttgaataaagcctgagtaggaaggctagcaaaaaaaaaaaaaaaaaaaaaaaaaaaaaaaaaaaaaaaaaaaaaaaaaaaaaaaaaaaaaaaaaaaaaaaaaaaaaaaa

SEQ ID NO: 3546 - RNA, 5419 nt, synthetic construct
  source 1..5419: mol_type = other RNA
aggaaataagagagaaaagaagagtaagaagaaatataagagccaccatggcccctaagaagaagcgtaaagtgagccgggtgaacggcagcggcagcggcggcggcatgaaccacgaccaggagttcgacccccctaaggtgtaccctcccgtccccgccgagaagagaaagcccatccgggtcctgagcctgttcgatggcatcgccaccggtctgctggtgctgaaggacctgggcatccaggtggataggtacattgcctccgaggtgtgcgaggactccatcaccgtgggaatggtgcgtcatcagggcaagatcatgtacgtgggcgacgtgcggagcgtgacacagaagcatatccaggagtggggccctttcgacctggtgatcggcggcagcccttgcaatgacctgagcatcgtgaacccagcccggaagggcctgtacgagggaaccggcagactgttcttcgagttttacagactgctgcacgacgcccggcctaaggaaggcgacgaccggcccttcttttggctgttcgagaatgtggtggccatgggagtcagcgacaagcgggatattagccggttcctggagagcaaccccgtgatgatcgatgccaaggaagtgagcgccgcccaccgggccagatacttctggggcaatctgcctggcatgaacagacccctggccagcaccgtgaacgacaagctggagctgcaggagtgcctggagcacggccggatcgccaagttcagcaaggtgagaaccatcaccacccgaagcaacagcatcaaacaaggcaaggaccagcactttcctgtgttcatgaacgagaaggaggacatcctgtggtgtaccgagatggagagagtgttcgggttcccagtccactacacagatgtcagcaacatgtctagactggccagacagagactgctgggaagaagctggtccgtccctgtgatcagacacctgttcgcccctctgaaggagtacttcgcctgcgtgagcagcggcaacagcaacgccaacagccggggccccagcttctctagcggcctggtgccactgtccctgagagggagccacatgggccccatggagatctacaaaaccgtgagcgcctggaagcggcagcctgtgcgcgtgctgagcctgtttcggaatatcgataaagtcctgaaaagcctgggattcctggagagcggctctggctccggcggtggcaccctgaagtacgtggaggatgtgacaaacgtggtcagacgggatgtggagaagtggggccccttcgatctggtgtacggcagcacccaacccctgggcagctcttgtgaccggtgccctggctggtacatgtttcagttccaccggatcctgcagtacgccctgccgagacaggagtcccagcggccattcttttggattttcatggacaacttgctgctgaccgaggatgaccaggaaactaccactcggttcctgcagaccgaagccgtgaccctgcaggacgtgagaggccgggactaccagaacgccatgcgggtgtggtccaacatccctggactgaaaagcaagcacgcacctctgacccctaaagaagaggagtacctgcaggcccaggtgcggagcagaagcaagctggacgcccctaaggtggatctgctggtgaagaattgcctcctgcccctgagagagtacttcaagtatttcagccagaatagtctgcccctgggcggcccaagcagcggcgcccctcctcccagcggcggcagcccagccggctccccaacctctaccgaggagggcacctctgagtccgccacccccgagagcggccctggcacctccaccgagcccagcgagggcagcgcacccggcagccctgccggcagccccacctccacagaggagggaaccagcaccgagcccagcgaaggcagcgccccaggcaccagcaccgagcctagtgagggcggctctggcggcggcagcgcccaggagattaaacggatcaacaagatcagaagaagacttgtgaaagacagcaacaccaagaaggccggcaagacaggccccatgaaaaccctgctggttagagtgatgacacccgatctgagagagcggctggaaaacctgagaaagaagcctgaaaatatcccccagcccatcagcaatacatctagagccaacctgaataagctgctgaccgattacaccgaaatgaagaaggcgatcctgcatgtgtactgggaagagttccagaaggaccctgtgggcctgatgagccgggtggcccagcctgccagcaagaagatcgatcagaacaagctgaaacctgagatggacgagaagggcaacctgaccaccgccggctttgcctgctctcagtgtggccagcccctgttcgtgtacaagctggagcaggtgtctgagaagggcaaggcttacaccaactacttcggacggtgcaatgtggccgagcacgaaaagctgatcctgctggcccagctgaagcccgagaaggatagcgacgaagccgtgacatatagcctgggaaagtttgggcagagggccctggatttctacagcattcatgtgaccaaggagtccacccaccccgtgaagcccctggcccagatcgccggaaacagatacgcctccggacctgtgggaaaggccctgagcgacgcatgtatgggcacaatcgcctccttcctgtctaagtaccaggacatcatcatcgaacaccagaaggtggtgaagggcaaccagaagagactggagagcctgcgggagctggccggcaaggaaaacctggaataccctagcgtgaccctgccacctcagcctcacaccaaggagggcgttgatgcctacaacgaagtgatcgcccgggtgcgaatgtgggtgaacctgaacctgtggcagaagctgaagctaagcagagatgatgccaagcctctgctgagactgaagggattcccttcctttcctctggtcgagagacaggccaacgaagtggactggtgggacatggtgtgtaacgtgaagaagctgatcaacgagaaaaaggaggatggcaaggtgttttggcagaatctggctggctacaagagacaggaagccctgagaccatacctgagcagcgaggaagatcggaagaagggaaagaaattcgctcggtaccagctgggcgacctgctgctgcacctggaaaagaagcacggcgaggactggggaaaggtgtacgacgaggcctgggagcggattgacaagaaagtggaaggcctgagcaagcacatcaagctggaagaggaacggagaagcgaggacgcccagagcaaggccgccctgaccgactggctgcgggctaaggccagcttcgtgatcgagggcctgaaggaggccgacaaggacgagttctgcagatgcgagctgaagctgcagaagtggtacggggacctgcggggaaagcccttcgccatcgaagccgagaacagcatcctggacatcagcggcttcagcaagcagtacaactgtgccttcatctggcagaaggacggcgtgaagaagctgaacctgtacctgatcatcaactacttcaagggcggcaagctgcggttcaagaagatcaaacctgaagccttcgaagccaacagattctacaccgtgatcaacaaaaagagcggcgagatcgtgcccatggaggtgaacttcaacttcgacgaccccaacctgatcatcctgcctctggcctttggcaagagacagggcagagaattcatctggaacgacctgctgtccctggaaaccggcagcctgaagctggccaacggaagagtgatcgagaagacactgtacaacagaagaacccggcaggatgagcctgccctgttcgtggccctgaccttcgagcggcgggaggtcctggactcctccaatatcaaaccaatgaacctgatcggcgtggcaagaggcgaaaacatccccgccgtgatcgccctgaccgaccccgagggctgcccactgagccggtttaaggatagcctgggaaacccaacccacatcctgagaatcggcgagagctataaggagaagcagcggaccatccaggccaagaaggaggtggagcagcggagagccggcggctacagccggaagtacgccagcaaagccaagaatctggcagacgatatggtgagaaacaccgctagagatctgctgtactacgccgtgacccaggatgccatgctgatcttcgccaacctgagccggggcttcggccggcagggcaagcggaccttcatggccgagagacagtacacacggatggaggactggctgaccgccaagctggcctacgagggcctgagcaagacctacctgtccaagacactggcccagtacacctccaagacatgcagcaactgtgggtttaccatcaccagcgccgactacgacagggtgctggagaagctgaagaagacagcaacaggctggatgaccacaattaacggcaaggagctgaaggtggagggccagattacctactacaacagatacaagagacagaacgtagtcaaggacctgtccgtcgagctggatagactgagcgaagaatctgtgaacaacgacatctcctcctggacaaagggcagaagcggagaagctctgagcctcctgaagaaaagattctcccatagacccgtgcaggagaagttcgtgtgcctgaactgcggcttcgagacacacgcagccgagcaagccgccctgaacatcgccagatcctggctgttcctgcggagccaggagtacaagaaataccagacaaacaagacaaccggcaacaccgataagagagccttcgtcgagacctggcagtccttttaccggaagaagcttaaggaggtgtggaaacctgccgtgcggtctggcggatctggcggaggctccacaagcaggcccagggccgtgaagttcgccgacgtggccgtgtacttcagccccgaggagtggggctgcctgaggcccgcccagagggccctgtacagggacgtgatgagggagacctacggccacctgggcgccctgggctgcgccggccccaagcccgccctgatcagctggctggagaggaacaccgacgactgggagcccgccgccctggacccccaggagtgccccaggggcctgaccgtgcagaccagccccaagaaaaagagaaaagtctaagctgccttctgcggggcttgccttctggccatgcccttcttctctcccttgcacctgtacctcttggtctttgaataaagcctgagtaggaaggctagcaaaaaaaaaaaaaaaaaaaaaaaaaaaaaaaaaaaaaaaaaaaaaaaaaaaaaaaaaaaaaaaaaaaaaaaaaaaaaaaa

SEQ ID NO: 3547 - RNA, 5419 nt, synthetic construct
  source 1..5419: mol_type = other RNA
aggaaataagagagaaaagaagagtaagaagaaatataagagccaccatggcccctaagaagaagcgtaaagtgagccgggtgaacggcagcggcagcggcggcggcatgaaccacgaccaggagttcgacccccctaaggtgtaccctcccgtccccgccgagaagagaaagcccatccgggtcctgagcctgttcgatggcatcgccaccggtctgctggtgctgaaggacctgggcatccaggtggataggtacattgcctccgaggtgtgcgaggactccatcaccgtgggaatggtgcgtcatcagggcaagatcatgtacgtgggcgacgtgcggagcgtgacacagaagcatatccaggagtggggccctttcgacctggtgatcggcggcagcccttgcaatgacctgagcatcgtgaacccagcccggaagggcctgtacgagggaaccggcagactgttcttcgagttttacagactgctgcacgacgcccggcctaaggaaggcgacgaccggcccttcttttggctgttcgagaatgtggtggccatgggagtcagcgacaagcgggatattagccggttcctggagagcaaccccgtgatgatcgatgccaaggaagtgagcgccgcccaccgggccagatacttctggggcaatctgcctggcatgaacagacccctggccagcaccgtgaacgacaagctggagctgcaggagtgcctggagcacggccggatcgccaagttcagcaaggtgagaaccatcaccacccgaagcaacagcatcaaacaaggcaaggaccagcactttcctgtgttcatgaacgagaaggaggacatcctgtggtgtaccgagatggagagagtgttcgggttcccagtccactacacagatgtcagcaacatgtctagactggccagacagagactgctgggaagaagctggtccgtccctgtgatcagacacctgttcgcccctctgaaggagtacttcgcctgcgtgagcagcggcaacagcaacgccaacagccggggccccagcttctctagcggcctggtgccactgtccctgagagggagccacatgggccccatggagatctacaaaaccgtgagcgcctggaagcggcagcctgtgcgcgtgctgagcctgtttcggaatatcgataaagtcctgaaaagcctgggattcctggagagcggctctggctccggcggtggcaccctgaagtacgtggaggatgtgacaaacgtggtcagacgggatgtggagaagtggggccccttcgatctggtgtacggcagcacccaacccctgggcagctcttgtgaccggtgccctggctggtacatgtttcagttccaccggatcctgcagtacgccctgccgagacaggagtcccagcggccattcttttggattttcatggacaacttgctgctgaccgaggatgaccaggaaactaccactcggttcctgcagaccgaagccgtgaccctgcaggacgtgagaggccgggactaccagaacgccatgcgggtgtggtccaacatccctggactgaaaagcaagcacgcacctctgacccctaaagaagaggagtacctgcaggcccaggtgcggagcagaagcaagctggacgcccctaaggtggatctgctggtgaagaattgcctcctgcccctgagagagtacttcaagtatttcagccagaatagtctgcccctgggcggcccaagcagcggcgcccctcctcccagcggcggcagcccagccggctccccaacctctaccgaggagggcacctctgagtccgccacccccgagagcggccctggcacctccaccgagcccagcgagggcagcgcacccggcagccctgccggcagccccacctccacagaggagggaaccagcaccgagcccagcgaaggcagcgccccaggcaccagcaccgagcctagtgagggcggctctggcggcggcagcgcccaggagattaaacggatcaacaagatcagaagaagacttgtgaaagacagcaacaccaagaaggccggcaagacaggccccatgaaaaccctgctggttagagtgatgacacccgatctgagagagcggctggaaaacctgagaaagaagcctgaaaatatcccccagcccatcagcaatacatctagagccaacctgaataagctgctgaccgattacaccgaaatgaagaaggcgatcctgcatgtgtactgggaagagttccagaaggaccctgtgggcctgatgagccgggtggcccagcctgccagcaagaagatcgatcagaacaagctgaaacctgagatggacgagaagggcaacctgaccaccgccggctttgcctgctctcagtgtggccagcccctgttcgtgtacaagctggagcaggtgtctgagaagggcaaggcttacaccaactacttcggacggtgcaatgtggccgagcacgaaaagctgatcctgctggcccagctgaagcccgagaaggatagcgacgaagccgtgacatatagcctgggaaagtttgggcagagggccctggatttctacagcattcatgtgaccaaggagtccacccaccccgtgaagcccctggcccagatcgccggaaacagatacgcctccggacctgtgggaaaggccctgagcgacgcatgtatgggcacaatcgcctccttcctgtctaagtaccaggacatcatcatcgaacaccagaaggtggtgaagggcaaccagaagagactggagagcctgcgggagctggccggcaaggaaaacctggaataccctagcgtgaccctgccacctcagcctcacaccaaggagggcgttgatgcctacaacgaagtgatcgcccgggtgcgaatgtgggtgaacctgaacctgtggcagaagctgaagctaagcagagatgatgccaagcctctgctgagactgaagggattcccttcctttcctctggtcgagagacaggccaacgaagtggactggtgggacatggtgtgtaacgtgaagaagctgatcaacgagaaaaaggaggatggcaaggtgttttggcagaatctggctggctacaagagacaggaagccctgagaccatacctgagcagcgaggaagatcggaagaagggaaagaaattcgctcggtaccagctgggcgacctgctgctgcacctggaaaagaagcacggcgaggactggggaaaggtgtacgacgaggcctgggagcggattgacaagaaagtggaaggcctgagcaagcacatcaagctggaagaggaacggagaagcgaggacgcccagagcaaggccgccctgaccgactggctgcgggctaaggccagcttcgtgatcgagggcctgaaggaggccgacaaggacgagttctgcagatgcgagctgaagctgcagaagtggtacggggacctgcggggaaagcccttcgccatcgaagccgagaacagcatcctggacatcagcggcttcagcaagcagtacaactgtgccttcatctggcagaaggacggcgtgaagaagctgaacctgtacctgatcatcaactacttcaagggcggcaagctgcggttcaagaagatcaaacctgaagccttcgaagccaacagattctacaccgtgatcaacaaaaagagcggcgagatcgtgcccatggaggtgaacttcaacttcgacgaccccaacctgatcatcctgcctctggcctttggcaagagacagggcagagaattcatctggaacgacctgctgtccctggaaaccggcagcctgaagctggccaacggaagagtgatcgagaagacactgtacaacagaagaacccggcaggatgagcctgccctgttcgtggccctgaccttcgagcggcgggaggtcctggactcctccaatatcaaaccaatgaacctgatcggcgtggcaagaggcgaaaacatccccgccgtgatcgccctgaccgaccccgagggctgcccactgagccggtttaaggatagcctgggaaacccaacccacatcctgagaatcggcgagagctataaggagaagcagcggaccatccaggccaagaaggaggtggagcagcggagagccggcggctacagccggaagtacgccagcaaagccaagaatctggcagacgatatggtgagaaacaccgctagagatctgctgtactacgccgtgacccaggatgccatgctgatcttcgccaacctgagccggggcttcggccggcagggcaagcggaccttcatggccgagagacagtacacacggatggaggactggctgaccgccaagctggcctacgagggcctgagcaagacctacctgtccaagacactggcccagtacacctccaagacatgcagcaactgtgggtttaccatcaccagcgccgactacgacagggtgctggagaagctgaagaagacagcaacaggctggatgaccacaattaacggcaaggagctgaaggtggagggccagattacctactacaacagatacaagagacagaacgtagtcaaggacctgtccgtcgagctggatagactgagcgaagaatctgtgaacaacgacatctcctcctggacaaagggcagaagcggagaagctctgagcctcctgaagaaaagattctcccatagacccgtgcaggagaagttcgtgtgcctgaactgcggcttcgagacacacgcagccgagcaagccgccctgaacatcgccagatcctggctgttcctgcggagccaggagtacaagaaataccagacaaacaagacaaccggcaacaccgataagagagccttcgtcgagacctggcagtccttttaccggaagaagcttaaggaggtgtggaaacctgccgtgcggtctggcggatctggcggaggctccacaagccaccaggaggtggtgaccttcgaggacgtggccgtgtacttcacccagaccgagtgggccggcctgagccccgcccagagggccctgtacaggagcgtgatgctggagatctacggcaacctgaccagcctgggctaccccgtgcccaagcccgagctggtgagcctgctggagaggggcgacctgcccgtgggcctggagacccaggacaacccccccgcccagggcaccagggacatctacaccagccccaagaaaaagagaaaagtctaagctgccttctgcggggcttgccttctggccatgcccttcttctctcccttgcacctgtacctcttggtctttgaataaagcctgagtaggaaggctagcaaaaaaaaaaaaaaaaaaaaaaaaaaaaaaaaaaaaaaaaaaaaaaaaaaaaaaaaaaaaaaaaaaaaaaaaaaaaaaaa

SEQ ID NO: 3548 - RNA, 5419 nt, synthetic construct
  source 1..5419: mol_type = other RNA
aggaaataagagagaaaagaagagtaagaagaaatataagagccaccatggcccctaagaagaagcgtaaagtgagccgggtgaacggcagcggcagcggcggcggcatgaaccacgaccaggagttcgacccccctaaggtgtaccctcccgtccccgccgagaagagaaagcccatccgggtcctgagcctgttcgatggcatcgccaccggtctgctggtgctgaaggacctgggcatccaggtggataggtacattgcctccgaggtgtgcgaggactccatcaccgtgggaatggtgcgtcatcagggcaagatcatgtacgtgggcgacgtgcggagcgtgacacagaagcatatccaggagtggggccctttcgacctggtgatcggcggcagcccttgcaatgacctgagcatcgtgaacccagcccggaagggcctgtacgagggaaccggcagactgttcttcgagttttacagactgctgcacgacgcccggcctaaggaaggcgacgaccggcccttcttttggctgttcgagaatgtggtggccatgggagtcagcgacaagcgggatattagccggttcctggagagcaaccccgtgatgatcgatgccaaggaagtgagcgccgcccaccgggccagatacttctggggcaatctgcctggcatgaacagacccctggccagcaccgtgaacgacaagctggagctgcaggagtgcctggagcacggccggatcgccaagttcagcaaggtgagaaccatcaccacccgaagcaacagcatcaaacaaggcaaggaccagcactttcctgtgttcatgaacgagaaggaggacatcctgtggtgtaccgagatggagagagtgttcgggttcccagtccactacacagatgtcagcaacatgtctagactggccagacagagactgctgggaagaagctggtccgtccctgtgatcagacacctgttcgcccctctgaaggagtacttcgcctgcgtgagcagcggcaacagcaacgccaacagccggggccccagcttctctagcggcctggtgccactgtccctgagagggagccacatgggccccatggagatctacaaaaccgtgagcgcctggaagcggcagcctgtgcgcgtgctgagcctgtttcggaatatcgataaagtcctgaaaagcctgggattcctggagagcggctctggctccggcggtggcaccctgaagtacgtggaggatgtgacaaacgtggtcagacgggatgtggagaagtggggccccttcgatctggtgtacggcagcacccaacccctgggcagctcttgtgaccggtgccctggctggtacatgtttcagttccaccggatcctgcagtacgccctgccgagacaggagtcccagcggccattcttttggattttcatggacaacttgctgctgaccgaggatgaccaggaaactaccactcggttcctgcagaccgaagccgtgaccctgcaggacgtgagaggccgggactaccagaacgccatgcgggtgtggtccaacatccctggactgaaaagcaagcacgcacctctgacccctaaagaagaggagtacctgcaggcccaggtgcggagcagaagcaagctggacgcccctaaggtggatctgctggtgaagaattgcctcctgcccctgagagagtacttcaagtatttcagccagaatagtctgcccctgggcggcccaagcagcggcgcccctcctcccagcggcggcagcccagccggctccccaacctctaccgaggagggcacctctgagtccgccacccccgagagcggccctggcacctccaccgagcccagcgagggcagcgcacccggcagccctgccggcagccccacctccacagaggagggaaccagcaccgagcccagcgaaggcagcgccccaggcaccagcaccgagcctagtgagggcggctctggcggcggcagcgcccaggagattaaacggatcaacaagatcagaagaagacttgtgaaagacagcaacaccaagaaggccggcaagacaggccccatgaaaaccctgctggttagagtgatgacacccgatctgagagagcggctggaaaacctgagaaagaagcctgaaaatatcccccagcccatcagcaatacatctagagccaacctgaataagctgctgaccgattacaccgaaatgaagaaggcgatcctgcatgtgtactgggaagagttccagaaggaccctgtgggcctgatgagccgggtggcccagcctgccagcaagaagatcgatcagaacaagctgaaacctgagatggacgagaagggcaacctgaccaccgccggctttgcctgctctcagtgtggccagcccctgttcgtgtacaagctggagcaggtgtctgagaagggcaaggcttacaccaactacttcggacggtgcaatgtggccgagcacgaaaagctgatcctgctggcccagctgaagcccgagaaggatagcgacgaagccgtgacatatagcctgggaaagtttgggcagagggccctggatttctacagcattcatgtgaccaaggagtccacccaccccgtgaagcccctggcccagatcgccggaaacagatacgcctccggacctgtgggaaaggccctgagcgacgcatgtatgggcacaatcgcctccttcctgtctaagtaccaggacatcatcatcgaacaccagaaggtggtgaagggcaaccagaagagactggagagcctgcgggagctggccggcaaggaaaacctggaataccctagcgtgaccctgccacctcagcctcacaccaaggagggcgttgatgcctacaacgaagtgatcgcccgggtgcgaatgtgggtgaacctgaacctgtggcagaagctgaagctaagcagagatgatgccaagcctctgctgagactgaagggattcccttcctttcctctggtcgagagacaggccaacgaagtggactggtgggacatggtgtgtaacgtgaagaagctgatcaacgagaaaaaggaggatggcaaggtgttttggcagaatctggctggctacaagagacaggaagccctgagaccatacctgagcagcgaggaagatcggaagaagggaaagaaattcgctcggtaccagctgggcgacctgctgctgcacctggaaaagaagcacggcgaggactggggaaaggtgtacgacgaggcctgggagcggattgacaagaaagtggaaggcctgagcaagcacatcaagctggaagaggaacggagaagcgaggacgcccagagcaaggccgccctgaccgactggctgcgggctaaggccagcttcgtgatcgagggcctgaaggaggccgacaaggacgagttctgcagatgcgagctgaagctgcagaagtggtacggggacctgcggggaaagcccttcgccatcgaagccgagaacagcatcctggacatcagcggcttcagcaagcagtacaactgtgccttcatctggcagaaggacggcgtgaagaagctgaacctgtacctgatcatcaactacttcaagggcggcaagctgcggttcaagaagatcaaacctgaagccttcgaagccaacagattctacaccgtgatcaacaaaaagagcggcgagatcgtgcccatggaggtgaacttcaacttcgacgaccccaacctgatcatcctgcctctggcctttggcaagagacagggcagagaattcatctggaacgacctgctgtccctggaaaccggcagcctgaagctggccaacggaagagtgatcgagaagacactgtacaacagaagaacccggcaggatgagcctgccctgttcgtggccctgaccttcgagcggcgggaggtcctggactcctccaatatcaaaccaatgaacctgatcggcgtggcaagaggcgaaaacatccccgccgtgatcgccctgaccgaccccgagggctgcccactgagccggtttaaggatagcctgggaaacccaacccacatcctgagaatcggcgagagctataaggagaagcagcggaccatccaggccaagaaggaggtggagcagcggagagccggcggctacagccggaagtacgccagcaaagccaagaatctggcagacgatatggtgagaaacaccgctagagatctgctgtactacgccgtgacccaggatgccatgctgatcttcgccaacctgagccggggcttcggccggcagggcaagcggaccttcatggccgagagacagtacacacggatggaggactggctgaccgccaagctggcctacgagggcctgagcaagacctacctgtccaagacactggcccagtacacctccaagacatgcagcaactgtgggtttaccatcaccagcgccgactacgacagggtgctggagaagctgaagaagacagcaacaggctggatgaccacaattaacggcaaggagctgaaggtggagggccagattacctactacaacagatacaagagacagaacgtagtcaaggacctgtccgtcgagctggatagactgagcgaagaatctgtgaacaacgacatctcctcctggacaaagggcagaagcggagaagctctgagcctcctgaagaaaagattctcccatagacccgtgcaggagaagttcgtgtgcctgaactgcggcttcgagacacacgcagccgagcaagccgccctgaacatcgccagatcctggctgttcctgcggagccaggagtacaagaaataccagacaaacaagacaaccggcaacaccgataagagagccttcgtcgagacctggcagtccttttaccggaagaagcttaaggaggtgtggaaacctgccgtgcggtctggcggatctggcggaggctccacaagcagccacggccccctgagcttcgaggacgtggccatcgccttcaccaaggaggagtggcagcagctggaccccgcccagaggaccctgtacagggacgtgatgctggagaacttcagccacctggtgagcctgggccaccccgtgagcaagcccgacatcatcagcaggctggagcagggcgaggagccctggatcatcaagagggacatcagcgactggatctgccccgagagggagaccaggaccagccccaagaaaaagagaaaagtctaagctgccttctgcggggcttgccttctggccatgcccttcttctctcccttgcacctgtacctcttggtctttgaataaagcctgagtaggaaggctagcaaaaaaaaaaaaaaaaaaaaaaaaaaaaaaaaaaaaaaaaaaaaaaaaaaaaaaaaaaaaaaaaaaaaaaaaaaaaaaaa

SEQ ID NO: 3549 - RNA, 5419 nt, synthetic construct
  source 1..5419: mol_type = other RNA
aggaaataagagagaaaagaagagtaagaagaaatataagagccaccatggcccctaagaagaagcgtaaagtgagccgggtgaacggcagcggcagcggcggcggcatgaaccacgaccaggagttcgacccccctaaggtgtaccctcccgtccccgccgagaagagaaagcccatccgggtcctgagcctgttcgatggcatcgccaccggtctgctggtgctgaaggacctgggcatccaggtggataggtacattgcctccgaggtgtgcgaggactccatcaccgtgggaatggtgcgtcatcagggcaagatcatgtacgtgggcgacgtgcggagcgtgacacagaagcatatccaggagtggggccctttcgacctggtgatcggcggcagcccttgcaatgacctgagcatcgtgaacccagcccggaagggcctgtacgagggaaccggcagactgttcttcgagttttacagactgctgcacgacgcccggcctaaggaaggcgacgaccggcccttcttttggctgttcgagaatgtggtggccatgggagtcagcgacaagcgggatattagccggttcctggagagcaaccccgtgatgatcgatgccaaggaagtgagcgccgcccaccgggccagatacttctggggcaatctgcctggcatgaacagacccctggccagcaccgtgaacgacaagctggagctgcaggagtgcctggagcacggccggatcgccaagttcagcaaggtgagaaccatcaccacccgaagcaacagcatcaaacaaggcaaggaccagcactttcctgtgttcatgaacgagaaggaggacatcctgtggtgtaccgagatggagagagtgttcgggttcccagtccactacacagatgtcagcaacatgtctagactggccagacagagactgctgggaagaagctggtccgtccctgtgatcagacacctgttcgcccctctgaaggagtacttcgcctgcgtgagcagcggcaacagcaacgccaacagccggggccccagcttctctagcggcctggtgccactgtccctgagagggagccacatgggccccatggagatctacaaaaccgtgagcgcctggaagcggcagcctgtgcgcgtgctgagcctgtttcggaatatcgataaagtcctgaaaagcctgggattcctggagagcggctctggctccggcggtggcaccctgaagtacgtggaggatgtgacaaacgtggtcagacgggatgtggagaagtggggccccttcgatctggtgtacggcagcacccaacccctgggcagctcttgtgaccggtgccctggctggtacatgtttcagttccaccggatcctgcagtacgccctgccgagacaggagtcccagcggccattcttttggattttcatggacaacttgctgctgaccgaggatgaccaggaaactaccactcggttcctgcagaccgaagccgtgaccctgcaggacgtgagaggccgggactaccagaacgccatgcgggtgtggtccaacatccctggactgaaaagcaagcacgcacctctgacccctaaagaagaggagtacctgcaggcccaggtgcggagcagaagcaagctggacgcccctaaggtggatctgctggtgaagaattgcctcctgcccctgagagagtacttcaagtatttcagccagaatagtctgcccctgggcggcccaagcagcggcgcccctcctcccagcggcggcagcccagccggctccccaacctctaccgaggagggcacctctgagtccgccacccccgagagcggccctggcacctccaccgagcccagcgagggcagcgcacccggcagccctgccggcagccccacctccacagaggagggaaccagcaccgagcccagcgaaggcagcgccccaggcaccagcaccgagcctagtgagggcggctctggcggcggcagcgcccaggagattaaacggatcaacaagatcagaagaagacttgtgaaagacagcaacaccaagaaggccggcaagacaggccccatgaaaaccctgctggttagagtgatgacacccgatctgagagagcggctggaaaacctgagaaagaagcctgaaaatatcccccagcccatcagcaatacatctagagccaacctgaataagctgctgaccgattacaccgaaatgaagaaggcgatcctgcatgtgtactgggaagagttccagaaggaccctgtgggcctgatgagccgggtggcccagcctgccagcaagaagatcgatcagaacaagctgaaacctgagatggacgagaagggcaacctgaccaccgccggctttgcctgctctcagtgtggccagcccctgttcgtgtacaagctggagcaggtgtctgagaagggcaaggcttacaccaactacttcggacggtgcaatgtggccgagcacgaaaagctgatcctgctggcccagctgaagcccgagaaggatagcgacgaagccgtgacatatagcctgggaaagtttgggcagagggccctggatttctacagcattcatgtgaccaaggagtccacccaccccgtgaagcccctggcccagatcgccggaaacagatacgcctccggacctgtgggaaaggccctgagcgacgcatgtatgggcacaatcgcctccttcctgtctaagtaccaggacatcatcatcgaacaccagaaggtggtgaagggcaaccagaagagactggagagcctgcgggagctggccggcaaggaaaacctggaataccctagcgtgaccctgccacctcagcctcacaccaaggagggcgttgatgcctacaacgaagtgatcgcccgggtgcgaatgtgggtgaacctgaacctgtggcagaagctgaagctaagcagagatgatgccaagcctctgctgagactgaagggattcccttcctttcctctggtcgagagacaggccaacgaagtggactggtgggacatggtgtgtaacgtgaagaagctgatcaacgagaaaaaggaggatggcaaggtgttttggcagaatctggctggctacaagagacaggaagccctgagaccatacctgagcagcgaggaagatcggaagaagggaaagaaattcgctcggtaccagctgggcgacctgctgctgcacctggaaaagaagcacggcgaggactggggaaaggtgtacgacgaggcctgggagcggattgacaagaaagtggaaggcctgagcaagcacatcaagctggaagaggaacggagaagcgaggacgcccagagcaaggccgccctgaccgactggctgcgggctaaggccagcttcgtgatcgagggcctgaaggaggccgacaaggacgagttctgcagatgcgagctgaagctgcagaagtggtacggggacctgcggggaaagcccttcgccatcgaagccgagaacagcatcctggacatcagcggcttcagcaagcagtacaactgtgccttcatctggcagaaggacggcgtgaagaagctgaacctgtacctgatcatcaactacttcaagggcggcaagctgcggttcaagaagatcaaacctgaagccttcgaagccaacagattctacaccgtgatcaacaaaaagagcggcgagatcgtgcccatggaggtgaacttcaacttcgacgaccccaacctgatcatcctgcctctggcctttggcaagagacagggcagagaattcatctggaacgacctgctgtccctggaaaccggcagcctgaagctggccaacggaagagtgatcgagaagacactgtacaacagaagaacccggcaggatgagcctgccctgttcgtggccctgaccttcgagcggcgggaggtcctggactcctccaatatcaaaccaatgaacctgatcggcgtggcaagaggcgaaaacatccccgccgtgatcgccctgaccgaccccgagggctgcccactgagccggtttaaggatagcctgggaaacccaacccacatcctgagaatcggcgagagctataaggagaagcagcggaccatccaggccaagaaggaggtggagcagcggagagccggcggctacagccggaagtacgccagcaaagccaagaatctggcagacgatatggtgagaaacaccgctagagatctgctgtactacgccgtgacccaggatgccatgctgatcttcgccaacctgagccggggcttcggccggcagggcaagcggaccttcatggccgagagacagtacacacggatggaggactggctgaccgccaagctggcctacgagggcctgagcaagacctacctgtccaagacactggcccagtacacctccaagacatgcagcaactgtgggtttaccatcaccagcgccgactacgacagggtgctggagaagctgaagaagacagcaacaggctggatgaccacaattaacggcaaggagctgaaggtggagggccagattacctactacaacagatacaagagacagaacgtagtcaaggacctgtccgtcgagctggatagactgagcgaagaatctgtgaacaacgacatctcctcctggacaaagggcagaagcggagaagctctgagcctcctgaagaaaagattctcccatagacccgtgcaggagaagttcgtgtgcctgaactgcggcttcgagacacacgcagccgagcaagccgccctgaacatcgccagatcctggctgttcctgcggagccaggagtacaagaaataccagacaaacaagacaaccggcaacaccgataagagagccttcgtcgagacctggcagtccttttaccggaagaagcttaaggaggtgtggaaacctgccgtgcggtctggcggatctggcggaggctccacaagccccgccgacagggacgccgtgacctacgacgacgtgcacatcggcttcacccaggaggagtgggtgctgctgaaccccagccagaagagcctgtacaaggacgtgatgctggacacctacaggaacctgaccgccatcggctacaggtggcaggaccacaacatcgaggagcactgcgagaacagcaggaggcacaggaggaagttcagctgcaccaccaagccctacgagagcctgcagaacaccagccccaagaaaaagagaaaagtctaagctgccttctgcggggcttgccttctggccatgcccttcttctctcccttgcacctgtacctcttggtctttgaataaagcctgagtaggaaggctagcaaaaaaaaaaaaaaaaaaaaaaaaaaaaaaaaaaaaaaaaaaaaaaaaaaaaaaaaaaaaaaaaaaaaaaaaaaaaaaaa

SEQ ID NO: 3550 - RNA, 5419 nt, synthetic construct
  source 1..5419: mol_type = other RNA
aggaaataagagagaaaagaagagtaagaagaaatataagagccaccatggcccctaagaagaagcgtaaagtgagccgggtgaacggcagcggcagcggcggcggcatgaaccacgaccaggagttcgacccccctaaggtgtaccctcccgtccccgccgagaagagaaagcccatccgggtcctgagcctgttcgatggcatcgccaccggtctgctggtgctgaaggacctgggcatccaggtggataggtacattgcctccgaggtgtgcgaggactccatcaccgtgggaatggtgcgtcatcagggcaagatcatgtacgtgggcgacgtgcggagcgtgacacagaagcatatccaggagtggggccctttcgacctggtgatcggcggcagcccttgcaatgacctgagcatcgtgaacccagcccggaagggcctgtacgagggaaccggcagactgttcttcgagttttacagactgctgcacgacgcccggcctaaggaaggcgacgaccggcccttcttttggctgttcgagaatgtggtggccatgggagtcagcgacaagcgggatattagccggttcctggagagcaaccccgtgatgatcgatgccaaggaagtgagcgccgcccaccgggccagatacttctggggcaatctgcctggcatgaacagacccctggccagcaccgtgaacgacaagctggagctgcaggagtgcctggagcacggccggatcgccaagttcagcaaggtgagaaccatcaccacccgaagcaacagcatcaaacaaggcaaggaccagcactttcctgtgttcatgaacgagaaggaggacatcctgtggtgtaccgagatggagagagtgttcgggttcccagtccactacacagatgtcagcaacatgtctagactggccagacagagactgctgggaagaagctggtccgtccctgtgatcagacacctgttcgcccctctgaaggagtacttcgcctgcgtgagcagcggcaacagcaacgccaacagccggggccccagcttctctagcggcctggtgccactgtccctgagagggagccacatgggccccatggagatctacaaaaccgtgagcgcctggaagcggcagcctgtgcgcgtgctgagcctgtttcggaatatcgataaagtcctgaaaagcctgggattcctggagagcggctctggctccggcggtggcaccctgaagtacgtggaggatgtgacaaacgtggtcagacgggatgtggagaagtggggccccttcgatctggtgtacggcagcacccaacccctgggcagctcttgtgaccggtgccctggctggtacatgtttcagttccaccggatcctgcagtacgccctgccgagacaggagtcccagcggccattcttttggattttcatggacaacttgctgctgaccgaggatgaccaggaaactaccactcggttcctgcagaccgaagccgtgaccctgcaggacgtgagaggccgggactaccagaacgccatgcgggtgtggtccaacatccctggactgaaaagcaagcacgcacctctgacccctaaagaagaggagtacctgcaggcccaggtgcggagcagaagcaagctggacgcccctaaggtggatctgctggtgaagaattgcctcctgcccctgagagagtacttcaagtatttcagccagaatagtctgcccctgggcggcccaagcagcggcgcccctcctcccagcggcggcagcccagccggctccccaacctctaccgaggagggcacctctgagtccgccacccccgagagcggccctggcacctccaccgagcccagcgagggcagcgcacccggcagccctgccggcagccccacctccacagaggagggaaccagcaccgagcccagcgaaggcagcgccccaggcaccagcaccgagcctagtgagggcggctctggcggcggcagcgcccaggagattaaacggatcaacaagatcagaagaagacttgtgaaagacagcaacaccaagaaggccggcaagacaggccccatgaaaaccctgctggttagagtgatgacacccgatctgagagagcggctggaaaacctgagaaagaagcctgaaaatatcccccagcccatcagcaatacatctagagccaacctgaataagctgctgaccgattacaccgaaatgaagaaggcgatcctgcatgtgtactgggaagagttccagaaggaccctgtgggcctgatgagccgggtggcccagcctgccagcaagaagatcgatcagaacaagctgaaacctgagatggacgagaagggcaacctgaccaccgccggctttgcctgctctcagtgtggccagcccctgttcgtgtacaagctggagcaggtgtctgagaagggcaaggcttacaccaactacttcggacggtgcaatgtggccgagcacgaaaagctgatcctgctggcccagctgaagcccgagaaggatagcgacgaagccgtgacatatagcctgggaaagtttgggcagagggccctggatttctacagcattcatgtgaccaaggagtccacccaccccgtgaagcccctggcccagatcgccggaaacagatacgcctccggacctgtgggaaaggccctgagcgacgcatgtatgggcacaatcgcctccttcctgtctaagtaccaggacatcatcatcgaacaccagaaggtggtgaagggcaaccagaagagactggagagcctgcgggagctggccggcaaggaaaacctggaataccctagcgtgaccctgccacctcagcctcacaccaaggagggcgttgatgcctacaacgaagtgatcgcccgggtgcgaatgtgggtgaacctgaacctgtggcagaagctgaagctaagcagagatgatgccaagcctctgctgagactgaagggattcccttcctttcctctggtcgagagacaggccaacgaagtggactggtgggacatggtgtgtaacgtgaagaagctgatcaacgagaaaaaggaggatggcaaggtgttttggcagaatctggctggctacaagagacaggaagccctgagaccatacctgagcagcgaggaagatcggaagaagggaaagaaattcgctcggtaccagctgggcgacctgctgctgcacctggaaaagaagcacggcgaggactggggaaaggtgtacgacgaggcctgggagcggattgacaagaaagtggaaggcctgagcaagcacatcaagctggaagaggaacggagaagcgaggacgcccagagcaaggccgccctgaccgactggctgcgggctaaggccagcttcgtgatcgagggcctgaaggaggccgacaaggacgagttctgcagatgcgagctgaagctgcagaagtggtacggggacctgcggggaaagcccttcgccatcgaagccgagaacagcatcctggacatcagcggcttcagcaagcagtacaactgtgccttcatctggcagaaggacggcgtgaagaagctgaacctgtacctgatcatcaactacttcaagggcggcaagctgcggttcaagaagatcaaacctgaagccttcgaagccaacagattctacaccgtgatcaacaaaaagagcggcgagatcgtgcccatggaggtgaacttcaacttcgacgaccccaacctgatcatcctgcctctggcctttggcaagagacagggcagagaattcatctggaacgacctgctgtccctggaaaccggcagcctgaagctggccaacggaagagtgatcgagaagacactgtacaacagaagaacccggcaggatgagcctgccctgttcgtggccctgaccttcgagcggcgggaggtcctggactcctccaatatcaaaccaatgaacctgatcggcgtggcaagaggcgaaaacatccccgccgtgatcgccctgaccgaccccgagggctgcccactgagccggtttaaggatagcctgggaaacccaacccacatcctgagaatcggcgagagctataaggagaagcagcggaccatccaggccaagaaggaggtggagcagcggagagccggcggctacagccggaagtacgccagcaaagccaagaatctggcagacgatatggtgagaaacaccgctagagatctgctgtactacgccgtgacccaggatgccatgctgatcttcgccaacctgagccggggcttcggccggcagggcaagcggaccttcatggccgagagacagtacacacggatggaggactggctgaccgccaagctggcctacgagggcctgagcaagacctacctgtccaagacactggcccagtacacctccaagacatgcagcaactgtgggtttaccatcaccagcgccgactacgacagggtgctggagaagctgaagaagacagcaacaggctggatgaccacaattaacggcaaggagctgaaggtggagggccagattacctactacaacagatacaagagacagaacgtagtcaaggacctgtccgtcgagctggatagactgagcgaagaatctgtgaacaacgacatctcctcctggacaaagggcagaagcggagaagctctgagcctcctgaagaaaagattctcccatagacccgtgcaggagaagttcgtgtgcctgaactgcggcttcgagacacacgcagccgagcaagccgccctgaacatcgccagatcctggctgttcctgcggagccaggagtacaagaaataccagacaaacaagacaaccggcaacaccgataagagagccttcgtcgagacctggcagtccttttaccggaagaagcttaaggaggtgtggaaacctgccgtgcggtctggcggatctggcggaggctccacaagcagccaggagctgctgaccttcaaggacatcagcgtggacttcacccaggaggagtggggccagctgcccctggcccacaggaacctgtacagggaggtgatgctggagaactacggcaacctggtgagcgtggccggctaccagctgagcaagcccagcgtgatcagccagctggagaagggccaggagccctggatgaccgagaaggaggtgcccgaggaccccagcagcgacctgaggaccaccagccccaagaaaaagagaaaagtctaagctgccttctgcggggcttgccttctggccatgcccttcttctctcccttgcacctgtacctcttggtctttgaataaagcctgagtaggaaggctagcaaaaaaaaaaaaaaaaaaaaaaaaaaaaaaaaaaaaaaaaaaaaaaaaaaaaaaaaaaaaaaaaaaaaaaaaaaaaaaaa

SEQ ID NO: 3551 - RNA, 5419 nt, synthetic construct
  source 1..5419: mol_type = other RNA
aggaaataagagagaaaagaagagtaagaagaaatataagagccaccatggcccctaagaagaagcgtaaagtgagccgggtgaacggcagcggcagcggcggcggcatgaaccacgaccaggagttcgacccccctaaggtgtaccctcccgtccccgccgagaagagaaagcccatccgggtcctgagcctgttcgatggcatcgccaccggtctgctggtgctgaaggacctgggcatccaggtggataggtacattgcctccgaggtgtgcgaggactccatcaccgtgggaatggtgcgtcatcagggcaagatcatgtacgtgggcgacgtgcggagcgtgacacagaagcatatccaggagtggggccctttcgacctggtgatcggcggcagcccttgcaatgacctgagcatcgtgaacccagcccggaagggcctgtacgagggaaccggcagactgttcttcgagttttacagactgctgcacgacgcccggcctaaggaaggcgacgaccggcccttcttttggctgttcgagaatgtggtggccatgggagtcagcgacaagcgggatattagccggttcctggagagcaaccccgtgatgatcgatgccaaggaagtgagcgccgcccaccgggccagatacttctggggcaatctgcctggcatgaacagacccctggccagcaccgtgaacgacaagctggagctgcaggagtgcctggagcacggccggatcgccaagttcagcaaggtgagaaccatcaccacccgaagcaacagcatcaaacaaggcaaggaccagcactttcctgtgttcatgaacgagaaggaggacatcctgtggtgtaccgagatggagagagtgttcgggttcccagtccactacacagatgtcagcaacatgtctagactggccagacagagactgctgggaagaagctggtccgtccctgtgatcagacacctgttcgcccctctgaaggagtacttcgcctgcgtgagcagcggcaacagcaacgccaacagccggggccccagcttctctagcggcctggtgccactgtccctgagagggagccacatgggccccatggagatctacaaaaccgtgagcgcctggaagcggcagcctgtgcgcgtgctgagcctgtttcggaatatcgataaagtcctgaaaagcctgggattcctggagagcggctctggctccggcggtggcaccctgaagtacgtggaggatgtgacaaacgtggtcagacgggatgtggagaagtggggccccttcgatctggtgtacggcagcacccaacccctgggcagctcttgtgaccggtgccctggctggtacatgtttcagttccaccggatcctgcagtacgccctgccgagacaggagtcccagcggccattcttttggattttcatggacaacttgctgctgaccgaggatgaccaggaaactaccactcggttcctgcagaccgaagccgtgaccctgcaggacgtgagaggccgggactaccagaacgccatgcgggtgtggtccaacatccctggactgaaaagcaagcacgcacctctgacccctaaagaagaggagtacctgcaggcccaggtgcggagcagaagcaagctggacgcccctaaggtggatctgctggtgaagaattgcctcctgcccctgagagagtacttcaagtatttcagccagaatagtctgcccctgggcggcccaagcagcggcgcccctcctcccagcggcggcagcccagccggctccccaacctctaccgaggagggcacctctgagtccgccacccccgagagcggccctggcacctccaccgagcccagcgagggcagcgcacccggcagccctgccggcagccccacctccacagaggagggaaccagcaccgagcccagcgaaggcagcgccccaggcaccagcaccgagcctagtgagggcggctctggcggcggcagcgcccaggagattaaacggatcaacaagatcagaagaagacttgtgaaagacagcaacaccaagaaggccggcaagacaggccccatgaaaaccctgctggttagagtgatgacacccgatctgagagagcggctggaaaacctgagaaagaagcctgaaaatatcccccagcccatcagcaatacatctagagccaacctgaataagctgctgaccgattacaccgaaatgaagaaggcgatcctgcatgtgtactgggaagagttccagaaggaccctgtgggcctgatgagccgggtggcccagcctgccagcaagaagatcgatcagaacaagctgaaacctgagatggacgagaagggcaacctgaccaccgccggctttgcctgctctcagtgtggccagcccctgttcgtgtacaagctggagcaggtgtctgagaagggcaaggcttacaccaactacttcggacggtgcaatgtggccgagcacgaaaagctgatcctgctggcccagctgaagcccgagaaggatagcgacgaagccgtgacatatagcctgggaaagtttgggcagagggccctggatttctacagcattcatgtgaccaaggagtccacccaccccgtgaagcccctggcccagatcgccggaaacagatacgcctccggacctgtgggaaaggccctgagcgacgcatgtatgggcacaatcgcctccttcctgtctaagtaccaggacatcatcatcgaacaccagaaggtggtgaagggcaaccagaagagactggagagcctgcgggagctggccggcaaggaaaacctggaataccctagcgtgaccctgccacctcagcctcacaccaaggagggcgttgatgcctacaacgaagtgatcgcccgggtgcgaatgtgggtgaacctgaacctgtggcagaagctgaagctaagcagagatgatgccaagcctctgctgagactgaagggattcccttcctttcctctggtcgagagacaggccaacgaagtggactggtgggacatggtgtgtaacgtgaagaagctgatcaacgagaaaaaggaggatggcaaggtgttttggcagaatctggctggctacaagagacaggaagccctgagaccatacctgagcagcgaggaagatcggaagaagggaaagaaattcgctcggtaccagctgggcgacctgctgctgcacctggaaaagaagcacggcgaggactggggaaaggtgtacgacgaggcctgggagcggattgacaagaaagtggaaggcctgagcaagcacatcaagctggaagaggaacggagaagcgaggacgcccagagcaaggccgccctgaccgactggctgcgggctaaggccagcttcgtgatcgagggcctgaaggaggccgacaaggacgagttctgcagatgcgagctgaagctgcagaagtggtacggggacctgcggggaaagcccttcgccatcgaagccgagaacagcatcctggacatcagcggcttcagcaagcagtacaactgtgccttcatctggcagaaggacggcgtgaagaagctgaacctgtacctgatcatcaactacttcaagggcggcaagctgcggttcaagaagatcaaacctgaagccttcgaagccaacagattctacaccgtgatcaacaaaaagagcggcgagatcgtgcccatggaggtgaacttcaacttcgacgaccccaacctgatcatcctgcctctggcctttggcaagagacagggcagagaattcatctggaacgacctgctgtccctggaaaccggcagcctgaagctggccaacggaagagtgatcgagaagacactgtacaacagaagaacccggcaggatgagcctgccctgttcgtggccctgaccttcgagcggcgggaggtcctggactcctccaatatcaaaccaatgaacctgatcggcgtggcaagaggcgaaaacatccccgccgtgatcgccctgaccgaccccgagggctgcccactgagccggtttaaggatagcctgggaaacccaacccacatcctgagaatcggcgagagctataaggagaagcagcggaccatccaggccaagaaggaggtggagcagcggagagccggcggctacagccggaagtacgccagcaaagccaagaatctggcagacgatatggtgagaaacaccgctagagatctgctgtactacgccgtgacccaggatgccatgctgatcttcgccaacctgagccggggcttcggccggcagggcaagcggaccttcatggccgagagacagtacacacggatggaggactggctgaccgccaagctggcctacgagggcctgagcaagacctacctgtccaagacactggcccagtacacctccaagacatgcagcaactgtgggtttaccatcaccagcgccgactacgacagggtgctggagaagctgaagaagacagcaacaggctggatgaccacaattaacggcaaggagctgaaggtggagggccagattacctactacaacagatacaagagacagaacgtagtcaaggacctgtccgtcgagctggatagactgagcgaagaatctgtgaacaacgacatctcctcctggacaaagggcagaagcggagaagctctgagcctcctgaagaaaagattctcccatagacccgtgcaggagaagttcgtgtgcctgaactgcggcttcgagacacacgcagccgagcaagccgccctgaacatcgccagatcctggctgttcctgcggagccaggagtacaagaaataccagacaaacaagacaaccggcaacaccgataagagagccttcgtcgagacctggcagtccttttaccggaagaagcttaaggaggtgtggaaacctgccgtgcggtctggcggatctggcggaggctccacaagcgcccaggagctggtgaccttccaggacgtggccgtggacttcaccgaggaggagtggggcctgctggaccacagccagaaggagctgtacaaggaggtgatgctggagaacgcccagaacctgctgagcctgggcctgcccgtgaccagggaggacctgatcagcttcttccagaagggcgaggccccctggatcctggagcccaagggcccctggaacttctgccccgacgccgtgaccaggaccagccccaagaaaaagagaaaagtctaagctgccttctgcggggcttgccttctggccatgcccttcttctctcccttgcacctgtacctcttggtctttgaataaagcctgagtaggaaggctagcaaaaaaaaaaaaaaaaaaaaaaaaaaaaaaaaaaaaaaaaaaaaaaaaaaaaaaaaaaaaaaaaaaaaaaaaaaaaaaaa

SEQ ID NO: 3552 - RNA, 5419 nt, synthetic construct
  source 1..5419: mol_type = other RNA
aggaaataagagagaaaagaagagtaagaagaaatataagagccaccatggcccctaagaagaagcgtaaagtgagccgggtgaacggcagcggcagcggcggcggcatgaaccacgaccaggagttcgacccccctaaggtgtaccctcccgtccccgccgagaagagaaagcccatccgggtcctgagcctgttcgatggcatcgccaccggtctgctggtgctgaaggacctgggcatccaggtggataggtacattgcctccgaggtgtgcgaggactccatcaccgtgggaatggtgcgtcatcagggcaagatcatgtacgtgggcgacgtgcggagcgtgacacagaagcatatccaggagtggggccctttcgacctggtgatcggcggcagcccttgcaatgacctgagcatcgtgaacccagcccggaagggcctgtacgagggaaccggcagactgttcttcgagttttacagactgctgcacgacgcccggcctaaggaaggcgacgaccggcccttcttttggctgttcgagaatgtggtggccatgggagtcagcgacaagcgggatattagccggttcctggagagcaaccccgtgatgatcgatgccaaggaagtgagcgccgcccaccgggccagatacttctggggcaatctgcctggcatgaacagacccctggccagcaccgtgaacgacaagctggagctgcaggagtgcctggagcacggccggatcgccaagttcagcaaggtgagaaccatcaccacccgaagcaacagcatcaaacaaggcaaggaccagcactttcctgtgttcatgaacgagaaggaggacatcctgtggtgtaccgagatggagagagtgttcgggttcccagtccactacacagatgtcagcaacatgtctagactggccagacagagactgctgggaagaagctggtccgtccctgtgatcagacacctgttcgcccctctgaaggagtacttcgcctgcgtgagcagcggcaacagcaacgccaacagccggggccccagcttctctagcggcctggtgccactgtccctgagagggagccacatgggccccatggagatctacaaaaccgtgagcgcctggaagcggcagcctgtgcgcgtgctgagcctgtttcggaatatcgataaagtcctgaaaagcctgggattcctggagagcggctctggctccggcggtggcaccctgaagtacgtggaggatgtgacaaacgtggtcagacgggatgtggagaagtggggccccttcgatctggtgtacggcagcacccaacccctgggcagctcttgtgaccggtgccctggctggtacatgtttcagttccaccggatcctgcagtacgccctgccgagacaggagtcccagcggccattcttttggattttcatggacaacttgctgctgaccgaggatgaccaggaaactaccactcggttcctgcagaccgaagccgtgaccctgcaggacgtgagaggccgggactaccagaacgccatgcgggtgtggtccaacatccctggactgaaaagcaagcacgcacctctgacccctaaagaagaggagtacctgcaggcccaggtgcggagcagaagcaagctggacgcccctaaggtggatctgctggtgaagaattgcctcctgcccctgagagagtacttcaagtatttcagccagaatagtctgcccctgggcggcccaagcagcggcgcccctcctcccagcggcggcagcccagccggctccccaacctctaccgaggagggcacctctgagtccgccacccccgagagcggccctggcacctccaccgagcccagcgagggcagcgcacccggcagccctgccggcagccccacctccacagaggagggaaccagcaccgagcccagcgaaggcagcgccccaggcaccagcaccgagcctagtgagggcggctctggcggcggcagcgcccaggagattaaacggatcaacaagatcagaagaagacttgtgaaagacagcaacaccaagaaggccggcaagacaggccccatgaaaaccctgctggttagagtgatgacacccgatctgagagagcggctggaaaacctgagaaagaagcctgaaaatatcccccagcccatcagcaatacatctagagccaacctgaataagctgctgaccgattacaccgaaatgaagaaggcgatcctgcatgtgtactgggaagagttccagaaggaccctgtgggcctgatgagccgggtggcccagcctgccagcaagaagatcgatcagaacaagctgaaacctgagatggacgagaagggcaacctgaccaccgccggctttgcctgctctcagtgtggccagcccctgttcgtgtacaagctggagcaggtgtctgagaagggcaaggcttacaccaactacttcggacggtgcaatgtggccgagcacgaaaagctgatcctgctggcccagctgaagcccgagaaggatagcgacgaagccgtgacatatagcctgggaaagtttgggcagagggccctggatttctacagcattcatgtgaccaaggagtccacccaccccgtgaagcccctggcccagatcgccggaaacagatacgcctccggacctgtgggaaaggccctgagcgacgcatgtatgggcacaatcgcctccttcctgtctaagtaccaggacatcatcatcgaacaccagaaggtggtgaagggcaaccagaagagactggagagcctgcgggagctggccggcaaggaaaacctggaataccctagcgtgaccctgccacctcagcctcacaccaaggagggcgttgatgcctacaacgaagtgatcgcccgggtgcgaatgtgggtgaacctgaacctgtggcagaagctgaagctaagcagagatgatgccaagcctctgctgagactgaagggattcccttcctttcctctggtcgagagacaggccaacgaagtggactggtgggacatggtgtgtaacgtgaagaagctgatcaacgagaaaaaggaggatggcaaggtgttttggcagaatctggctggctacaagagacaggaagccctgagaccatacctgagcagcgaggaagatcggaagaagggaaagaaattcgctcggtaccagctgggcgacctgctgctgcacctggaaaagaagcacggcgaggactggggaaaggtgtacgacgaggcctgggagcggattgacaagaaagtggaaggcctgagcaagcacatcaagctggaagaggaacggagaagcgaggacgcccagagcaaggccgccctgaccgactggctgcgggctaaggccagcttcgtgatcgagggcctgaaggaggccgacaaggacgagttctgcagatgcgagctgaagctgcagaagtggtacggggacctgcggggaaagcccttcgccatcgaagccgagaacagcatcctggacatcagcggcttcagcaagcagtacaactgtgccttcatctggcagaaggacggcgtgaagaagctgaacctgtacctgatcatcaactacttcaagggcggcaagctgcggttcaagaagatcaaacctgaagccttcgaagccaacagattctacaccgtgatcaacaaaaagagcggcgagatcgtgcccatggaggtgaacttcaacttcgacgaccccaacctgatcatcctgcctctggcctttggcaagagacagggcagagaattcatctggaacgacctgctgtccctggaaaccggcagcctgaagctggccaacggaagagtgatcgagaagacactgtacaacagaagaacccggcaggatgagcctgccctgttcgtggccctgaccttcgagcggcgggaggtcctggactcctccaatatcaaaccaatgaacctgatcggcgtggcaagaggcgaaaacatccccgccgtgatcgccctgaccgaccccgagggctgcccactgagccggtttaaggatagcctgggaaacccaacccacatcctgagaatcggcgagagctataaggagaagcagcggaccatccaggccaagaaggaggtggagcagcggagagccggcggctacagccggaagtacgccagcaaagccaagaatctggcagacgatatggtgagaaacaccgctagagatctgctgtactacgccgtgacccaggatgccatgctgatcttcgccaacctgagccggggcttcggccggcagggcaagcggaccttcatggccgagagacagtacacacggatggaggactggctgaccgccaagctggcctacgagggcctgagcaagacctacctgtccaagacactggcccagtacacctccaagacatgcagcaactgtgggtttaccatcaccagcgccgactacgacagggtgctggagaagctgaagaagacagcaacaggctggatgaccacaattaacggcaaggagctgaaggtggagggccagattacctactacaacagatacaagagacagaacgtagtcaaggacctgtccgtcgagctggatagactgagcgaagaatctgtgaacaacgacatctcctcctggacaaagggcagaagcggagaagctctgagcctcctgaagaaaagattctcccatagacccgtgcaggagaagttcgtgtgcctgaactgcggcttcgagacacacgcagccgagcaagccgccctgaacatcgccagatcctggctgttcctgcggagccaggagtacaagaaataccagacaaacaagacaaccggcaacaccgataagagagccttcgtcgagacctggcagtccttttaccggaagaagcttaaggaggtgtggaaacctgccgtgcggtctggcggatctggcggaggctccacaagcgccctgaggagcgtgatgttcagcgacgtgagcatcgacttcagccccgaggagtgggagtacctggacctggagcagaaggacctgtacagggacgtgatgctggagaactacagcaacctggtgagcctgggctgcttcatcagcaagcccgacgtgatcagcagcctggagcagggcaaggagccctggaaggtggtgaggaagggcaggaggcagtaccccgacctggagaccaagtacaccagccccaagaaaaagagaaaagtctaagctgccttctgcggggcttgccttctggccatgcccttcttctctcccttgcacctgtacctcttggtctttgaataaagcctgagtaggaaggctagcaaaaaaaaaaaaaaaaaaaaaaaaaaaaaaaaaaaaaaaaaaaaaaaaaaaaaaaaaaaaaaaaaaaaaaaaaaaaaaaa

SEQ ID NO: 3553 - RNA, 5419 nt, synthetic construct
  source 1..5419: mol_type = other RNA
aggaaataagagagaaaagaagagtaagaagaaatataagagccaccatggcccctaagaagaagcgtaaagtgagccgggtgaacggcagcggcagcggcggcggcatgaaccacgaccaggagttcgacccccctaaggtgtaccctcccgtccccgccgagaagagaaagcccatccgggtcctgagcctgttcgatggcatcgccaccggtctgctggtgctgaaggacctgggcatccaggtggataggtacattgcctccgaggtgtgcgaggactccatcaccgtgggaatggtgcgtcatcagggcaagatcatgtacgtgggcgacgtgcggagcgtgacacagaagcatatccaggagtggggccctttcgacctggtgatcggcggcagcccttgcaatgacctgagcatcgtgaacccagcccggaagggcctgtacgagggaaccggcagactgttcttcgagttttacagactgctgcacgacgcccggcctaaggaaggcgacgaccggcccttcttttggctgttcgagaatgtggtggccatgggagtcagcgacaagcgggatattagccggttcctggagagcaaccccgtgatgatcgatgccaaggaagtgagcgccgcccaccgggccagatacttctggggcaatctgcctggcatgaacagacccctggccagcaccgtgaacgacaagctggagctgcaggagtgcctggagcacggccggatcgccaagttcagcaaggtgagaaccatcaccacccgaagcaacagcatcaaacaaggcaaggaccagcactttcctgtgttcatgaacgagaaggaggacatcctgtggtgtaccgagatggagagagtgttcgggttcccagtccactacacagatgtcagcaacatgtctagactggccagacagagactgctgggaagaagctggtccgtccctgtgatcagacacctgttcgcccctctgaaggagtacttcgcctgcgtgagcagcggcaacagcaacgccaacagccggggccccagcttctctagcggcctggtgccactgtccctgagagggagccacatgggccccatggagatctacaaaaccgtgagcgcctggaagcggcagcctgtgcgcgtgctgagcctgtttcggaatatcgataaagtcctgaaaagcctgggattcctggagagcggctctggctccggcggtggcaccctgaagtacgtggaggatgtgacaaacgtggtcagacgggatgtggagaagtggggccccttcgatctggtgtacggcagcacccaacccctgggcagctcttgtgaccggtgccctggctggtacatgtttcagttccaccggatcctgcagtacgccctgccgagacaggagtcccagcggccattcttttggattttcatggacaacttgctgctgaccgaggatgaccaggaaactaccactcggttcctgcagaccgaagccgtgaccctgcaggacgtgagaggccgggactaccagaacgccatgcgggtgtggtccaacatccctggactgaaaagcaagcacgcacctctgacccctaaagaagaggagtacctgcaggcccaggtgcggagcagaagcaagctggacgcccctaaggtggatctgctggtgaagaattgcctcctgcccctgagagagtacttcaagtatttcagccagaatagtctgcccctgggcggcccaagcagcggcgcccctcctcccagcggcggcagcccagccggctccccaacctctaccgaggagggcacctctgagtccgccacccccgagagcggccctggcacctccaccgagcccagcgagggcagcgcacccggcagccctgccggcagccccacctccacagaggagggaaccagcaccgagcccagcgaaggcagcgccccaggcaccagcaccgagcctagtgagggcggctctggcggcggcagcgcccaggagattaaacggatcaacaagatcagaagaagacttgtgaaagacagcaacaccaagaaggccggcaagacaggccccatgaaaaccctgctggttagagtgatgacacccgatctgagagagcggctggaaaacctgagaaagaagcctgaaaatatcccccagcccatcagcaatacatctagagccaacctgaataagctgctgaccgattacaccgaaatgaagaaggcgatcctgcatgtgtactgggaagagttccagaaggaccctgtgggcctgatgagccgggtggcccagcctgccagcaagaagatcgatcagaacaagctgaaacctgagatggacgagaagggcaacctgaccaccgccggctttgcctgctctcagtgtggccagcccctgttcgtgtacaagctggagcaggtgtctgagaagggcaaggcttacaccaactacttcggacggtgcaatgtggccgagcacgaaaagctgatcctgctggcccagctgaagcccgagaaggatagcgacgaagccgtgacatatagcctgggaaagtttgggcagagggccctggatttctacagcattcatgtgaccaaggagtccacccaccccgtgaagcccctggcccagatcgccggaaacagatacgcctccggacctgtgggaaaggccctgagcgacgcatgtatgggcacaatcgcctccttcctgtctaagtaccaggacatcatcatcgaacaccagaaggtggtgaagggcaaccagaagagactggagagcctgcgggagctggccggcaaggaaaacctggaataccctagcgtgaccctgccacctcagcctcacaccaaggagggcgttgatgcctacaacgaagtgatcgcccgggtgcgaatgtgggtgaacctgaacctgtggcagaagctgaagctaagcagagatgatgccaagcctctgctgagactgaagggattcccttcctttcctctggtcgagagacaggccaacgaagtggactggtgggacatggtgtgtaacgtgaagaagctgatcaacgagaaaaaggaggatggcaaggtgttttggcagaatctggctggctacaagagacaggaagccctgagaccatacctgagcagcgaggaagatcggaagaagggaaagaaattcgctcggtaccagctgggcgacctgctgctgcacctggaaaagaagcacggcgaggactggggaaaggtgtacgacgaggcctgggagcggattgacaagaaagtggaaggcctgagcaagcacatcaagctggaagaggaacggagaagcgaggacgcccagagcaaggccgccctgaccgactggctgcgggctaaggccagcttcgtgatcgagggcctgaaggaggccgacaaggacgagttctgcagatgcgagctgaagctgcagaagtggtacggggacctgcggggaaagcccttcgccatcgaagccgagaacagcatcctggacatcagcggcttcagcaagcagtacaactgtgccttcatctggcagaaggacggcgtgaagaagctgaacctgtacctgatcatcaactacttcaagggcggcaagctgcggttcaagaagatcaaacctgaagccttcgaagccaacagattctacaccgtgatcaacaaaaagagcggcgagatcgtgcccatggaggtgaacttcaacttcgacgaccccaacctgatcatcctgcctctggcctttggcaagagacagggcagagaattcatctggaacgacctgctgtccctggaaaccggcagcctgaagctggccaacggaagagtgatcgagaagacactgtacaacagaagaacccggcaggatgagcctgccctgttcgtggccctgaccttcgagcggcgggaggtcctggactcctccaatatcaaaccaatgaacctgatcggcgtggcaagaggcgaaaacatccccgccgtgatcgccctgaccgaccccgagggctgcccactgagccggtttaaggatagcctgggaaacccaacccacatcctgagaatcggcgagagctataaggagaagcagcggaccatccaggccaagaaggaggtggagcagcggagagccggcggctacagccggaagtacgccagcaaagccaagaatctggcagacgatatggtgagaaacaccgctagagatctgctgtactacgccgtgacccaggatgccatgctgatcttcgccaacctgagccggggcttcggccggcagggcaagcggaccttcatggccgagagacagtacacacggatggaggactggctgaccgccaagctggcctacgagggcctgagcaagacctacctgtccaagacactggcccagtacacctccaagacatgcagcaactgtgggtttaccatcaccagcgccgactacgacagggtgctggagaagctgaagaagacagcaacaggctggatgaccacaattaacggcaaggagctgaaggtggagggccagattacctactacaacagatacaagagacagaacgtagtcaaggacctgtccgtcgagctggatagactgagcgaagaatctgtgaacaacgacatctcctcctggacaaagggcagaagcggagaagctctgagcctcctgaagaaaagattctcccatagacccgtgcaggagaagttcgtgtgcctgaactgcggcttcgagacacacgcagccgagcaagccgccctgaacatcgccagatcctggctgttcctgcggagccaggagtacaagaaataccagacaaacaagacaaccggcaacaccgataagagagccttcgtcgagacctggcagtccttttaccggaagaagcttaaggaggtgtggaaacctgccgtgcggtctggcggatctggcggaggctccacaagcgtgaccttcgaggaggtggccgtgtacttcagcgaggaggagtgggccctgctggaccccggccagagggccctgtacagggacgtgatgcaggagaactacgagaccgtgatcagcctgggcaaggacttctgccccctgagccccgagcaggtggccctgtgcggcatgctgtgcggcaggagcgagggccacgtgagccagagccccgagcagagggagacctgcaagaggcagcacaagaccagccccaagaaaaagagaaaagtctaagctgccttctgcggggcttgccttctggccatgcccttcttctctcccttgcacctgtacctcttggtctttgaataaagcctgagtaggaaggctagcaaaaaaaaaaaaaaaaaaaaaaaaaaaaaaaaaaaaaaaaaaaaaaaaaaaaaaaaaaaaaaaaaaaaaaaaaaaaaaaa

SEQ ID NO: 3554 - RNA, 5419 nt, synthetic construct
  source 1..5419: mol_type = other RNA
aggaaataagagagaaaagaagagtaagaagaaatataagagccaccatggcccctaagaagaagcgtaaagtgagccgggtgaacggcagcggcagcggcggcggcatgaaccacgaccaggagttcgacccccctaaggtgtaccctcccgtccccgccgagaagagaaagcccatccgggtcctgagcctgttcgatggcatcgccaccggtctgctggtgctgaaggacctgggcatccaggtggataggtacattgcctccgaggtgtgcgaggactccatcaccgtgggaatggtgcgtcatcagggcaagatcatgtacgtgggcgacgtgcggagcgtgacacagaagcatatccaggagtggggccctttcgacctggtgatcggcggcagcccttgcaatgacctgagcatcgtgaacccagcccggaagggcctgtacgagggaaccggcagactgttcttcgagttttacagactgctgcacgacgcccggcctaaggaaggcgacgaccggcccttcttttggctgttcgagaatgtggtggccatgggagtcagcgacaagcgggatattagccggttcctggagagcaaccccgtgatgatcgatgccaaggaagtgagcgccgcccaccgggccagatacttctggggcaatctgcctggcatgaacagacccctggccagcaccgtgaacgacaagctggagctgcaggagtgcctggagcacggccggatcgccaagttcagcaaggtgagaaccatcaccacccgaagcaacagcatcaaacaaggcaaggaccagcactttcctgtgttcatgaacgagaaggaggacatcctgtggtgtaccgagatggagagagtgttcgggttcccagtccactacacagatgtcagcaacatgtctagactggccagacagagactgctgggaagaagctggtccgtccctgtgatcagacacctgttcgcccctctgaaggagtacttcgcctgcgtgagcagcggcaacagcaacgccaacagccggggccccagcttctctagcggcctggtgccactgtccctgagagggagccacatgggccccatggagatctacaaaaccgtgagcgcctggaagcggcagcctgtgcgcgtgctgagcctgtttcggaatatcgataaagtcctgaaaagcctgggattcctggagagcggctctggctccggcggtggcaccctgaagtacgtggaggatgtgacaaacgtggtcagacgggatgtggagaagtggggccccttcgatctggtgtacggcagcacccaacccctgggcagctcttgtgaccggtgccctggctggtacatgtttcagttccaccggatcctgcagtacgccctgccgagacaggagtcccagcggccattcttttggattttcatggacaacttgctgctgaccgaggatgaccaggaaactaccactcggttcctgcagaccgaagccgtgaccctgcaggacgtgagaggccgggactaccagaacgccatgcgggtgtggtccaacatccctggactgaaaagcaagcacgcacctctgacccctaaagaagaggagtacctgcaggcccaggtgcggagcagaagcaagctggacgcccctaaggtggatctgctggtgaagaattgcctcctgcccctgagagagtacttcaagtatttcagccagaatagtctgcccctgggcggcccaagcagcggcgcccctcctcccagcggcggcagcccagccggctccccaacctctaccgaggagggcacctctgagtccgccacccccgagagcggccctggcacctccaccgagcccagcgagggcagcgcacccggcagccctgccggcagccccacctccacagaggagggaaccagcaccgagcccagcgaaggcagcgccccaggcaccagcaccgagcctagtgagggcggctctggcggcggcagcgcccaggagattaaacggatcaacaagatcagaagaagacttgtgaaagacagcaacaccaagaaggccggcaagacaggccccatgaaaaccctgctggttagagtgatgacacccgatctgagagagcggctggaaaacctgagaaagaagcctgaaaatatcccccagcccatcagcaatacatctagagccaacctgaataagctgctgaccgattacaccgaaatgaagaaggcgatcctgcatgtgtactgggaagagttccagaaggaccctgtgggcctgatgagccgggtggcccagcctgccagcaagaagatcgatcagaacaagctgaaacctgagatggacgagaagggcaacctgaccaccgccggctttgcctgctctcagtgtggccagcccctgttcgtgtacaagctggagcaggtgtctgagaagggcaaggcttacaccaactacttcggacggtgcaatgtggccgagcacgaaaagctgatcctgctggcccagctgaagcccgagaaggatagcgacgaagccgtgacatatagcctgggaaagtttgggcagagggccctggatttctacagcattcatgtgaccaaggagtccacccaccccgtgaagcccctggcccagatcgccggaaacagatacgcctccggacctgtgggaaaggccctgagcgacgcatgtatgggcacaatcgcctccttcctgtctaagtaccaggacatcatcatcgaacaccagaaggtggtgaagggcaaccagaagagactggagagcctgcgggagctggccggcaaggaaaacctggaataccctagcgtgaccctgccacctcagcctcacaccaaggagggcgttgatgcctacaacgaagtgatcgcccgggtgcgaatgtgggtgaacctgaacctgtggcagaagctgaagctaagcagagatgatgccaagcctctgctgagactgaagggattcccttcctttcctctggtcgagagacaggccaacgaagtggactggtgggacatggtgtgtaacgtgaagaagctgatcaacgagaaaaaggaggatggcaaggtgttttggcagaatctggctggctacaagagacaggaagccctgagaccatacctgagcagcgaggaagatcggaagaagggaaagaaattcgctcggtaccagctgggcgacctgctgctgcacctggaaaagaagcacggcgaggactggggaaaggtgtacgacgaggcctgggagcggattgacaagaaagtggaaggcctgagcaagcacatcaagctggaagaggaacggagaagcgaggacgcccagagcaaggccgccctgaccgactggctgcgggctaaggccagcttcgtgatcgagggcctgaaggaggccgacaaggacgagttctgcagatgcgagctgaagctgcagaagtggtacggggacctgcggggaaagcccttcgccatcgaagccgagaacagcatcctggacatcagcggcttcagcaagcagtacaactgtgccttcatctggcagaaggacggcgtgaagaagctgaacctgtacctgatcatcaactacttcaagggcggcaagctgcggttcaagaagatcaaacctgaagccttcgaagccaacagattctacaccgtgatcaacaaaaagagcggcgagatcgtgcccatggaggtgaacttcaacttcgacgaccccaacctgatcatcctgcctctggcctttggcaagagacagggcagagaattcatctggaacgacctgctgtccctggaaaccggcagcctgaagctggccaacggaagagtgatcgagaagacactgtacaacagaagaacccggcaggatgagcctgccctgttcgtggccctgaccttcgagcggcgggaggtcctggactcctccaatatcaaaccaatgaacctgatcggcgtggcaagaggcgaaaacatccccgccgtgatcgccctgaccgaccccgagggctgcccactgagccggtttaaggatagcctgggaaacccaacccacatcctgagaatcggcgagagctataaggagaagcagcggaccatccaggccaagaaggaggtggagcagcggagagccggcggctacagccggaagtacgccagcaaagccaagaatctggcagacgatatggtgagaaacaccgctagagatctgctgtactacgccgtgacccaggatgccatgctgatcttcgccaacctgagccggggcttcggccggcagggcaagcggaccttcatggccgagagacagtacacacggatggaggactggctgaccgccaagctggcctacgagggcctgagcaagacctacctgtccaagacactggcccagtacacctccaagacatgcagcaactgtgggtttaccatcaccagcgccgactacgacagggtgctggagaagctgaagaagacagcaacaggctggatgaccacaattaacggcaaggagctgaaggtggagggccagattacctactacaacagatacaagagacagaacgtagtcaaggacctgtccgtcgagctggatagactgagcgaagaatctgtgaacaacgacatctcctcctggacaaagggcagaagcggagaagctctgagcctcctgaagaaaagattctcccatagacccgtgcaggagaagttcgtgtgcctgaactgcggcttcgagacacacgcagccgagcaagccgccctgaacatcgccagatcctggctgttcctgcggagccaggagtacaagaaataccagacaaacaagacaaccggcaacaccgataagagagccttcgtcgagacctggcagtccttttaccggaagaagcttaaggaggtgtggaaacctgccgtgcggtctggcggatctggcggaggctccacaagcgtgcaggagagcgtgaccttcaaggacgtggccgtgctgttcacccaggacgagtgggcccagctgagccccgcccagagggccctgtacagggacgtgatgctggagaactacagcaacctggtgagcctgggcctgctgggccccaagcccgacgtgttcagccagctgggcaagggcgaggagtggatgcccgaggacagcctgggcggcttctgcctggactggatgaccacccccgtgaccagccccaagaaaaagagaaaagtctaagctgccttctgcggggcttgccttctggccatgcccttcttctctcccttgcacctgtacctcttggtctttgaataaagcctgagtaggaaggctagcaaaaaaaaaaaaaaaaaaaaaaaaaaaaaaaaaaaaaaaaaaaaaaaaaaaaaaaaaaaaaaaaaaaaaaaaaaaaaaaa

SEQ ID NO: 3555 - RNA, 5419 nt, synthetic construct
  source 1..5419: mol_type = other RNA
aggaaataagagagaaaagaagagtaagaagaaatataagagccaccatggcccctaagaagaagcgtaaagtgagccgggtgaacggcagcggcagcggcggcggcatgaaccacgaccaggagttcgacccccctaaggtgtaccctcccgtccccgccgagaagagaaagcccatccgggtcctgagcctgttcgatggcatcgccaccggtctgctggtgctgaaggacctgggcatccaggtggataggtacattgcctccgaggtgtgcgaggactccatcaccgtgggaatggtgcgtcatcagggcaagatcatgtacgtgggcgacgtgcggagcgtgacacagaagcatatccaggagtggggccctttcgacctggtgatcggcggcagcccttgcaatgacctgagcatcgtgaacccagcccggaagggcctgtacgagggaaccggcagactgttcttcgagttttacagactgctgcacgacgcccggcctaaggaaggcgacgaccggcccttcttttggctgttcgagaatgtggtggccatgggagtcagcgacaagcgggatattagccggttcctggagagcaaccccgtgatgatcgatgccaaggaagtgagcgccgcccaccgggccagatacttctggggcaatctgcctggcatgaacagacccctggccagcaccgtgaacgacaagctggagctgcaggagtgcctggagcacggccggatcgccaagttcagcaaggtgagaaccatcaccacccgaagcaacagcatcaaacaaggcaaggaccagcactttcctgtgttcatgaacgagaaggaggacatcctgtggtgtaccgagatggagagagtgttcgggttcccagtccactacacagatgtcagcaacatgtctagactggccagacagagactgctgggaagaagctggtccgtccctgtgatcagacacctgttcgcccctctgaaggagtacttcgcctgcgtgagcagcggcaacagcaacgccaacagccggggccccagcttctctagcggcctggtgccactgtccctgagagggagccacatgggccccatggagatctacaaaaccgtgagcgcctggaagcggcagcctgtgcgcgtgctgagcctgtttcggaatatcgataaagtcctgaaaagcctgggattcctggagagcggctctggctccggcggtggcaccctgaagtacgtggaggatgtgacaaacgtggtcagacgggatgtggagaagtggggccccttcgatctggtgtacggcagcacccaacccctgggcagctcttgtgaccggtgccctggctggtacatgtttcagttccaccggatcctgcagtacgccctgccgagacaggagtcccagcggccattcttttggattttcatggacaacttgctgctgaccgaggatgaccaggaaactaccactcggttcctgcagaccgaagccgtgaccctgcaggacgtgagaggccgggactaccagaacgccatgcgggtgtggtccaacatccctggactgaaaagcaagcacgcacctctgacccctaaagaagaggagtacctgcaggcccaggtgcggagcagaagcaagctggacgcccctaaggtggatctgctggtgaagaattgcctcctgcccctgagagagtacttcaagtatttcagccagaatagtctgcccctgggcggcccaagcagcggcgcccctcctcccagcggcggcagcccagccggctccccaacctctaccgaggagggcacctctgagtccgccacccccgagagcggccctggcacctccaccgagcccagcgagggcagcgcacccggcagccctgccggcagccccacctccacagaggagggaaccagcaccgagcccagcgaaggcagcgccccaggcaccagcaccgagcctagtgagggcggctctggcggcggcagcgcccaggagattaaacggatcaacaagatcagaagaagacttgtgaaagacagcaacaccaagaaggccggcaagacaggccccatgaaaaccctgctggttagagtgatgacacccgatctgagagagcggctggaaaacctgagaaagaagcctgaaaatatcccccagcccatcagcaatacatctagagccaacctgaataagctgctgaccgattacaccgaaatgaagaaggcgatcctgcatgtgtactgggaagagttccagaaggaccctgtgggcctgatgagccgggtggcccagcctgccagcaagaagatcgatcagaacaagctgaaacctgagatggacgagaagggcaacctgaccaccgccggctttgcctgctctcagtgtggccagcccctgttcgtgtacaagctggagcaggtgtctgagaagggcaaggcttacaccaactacttcggacggtgcaatgtggccgagcacgaaaagctgatcctgctggcccagctgaagcccgagaaggatagcgacgaagccgtgacatatagcctgggaaagtttgggcagagggccctggatttctacagcattcatgtgaccaaggagtccacccaccccgtgaagcccctggcccagatcgccggaaacagatacgcctccggacctgtgggaaaggccctgagcgacgcatgtatgggcacaatcgcctccttcctgtctaagtaccaggacatcatcatcgaacaccagaaggtggtgaagggcaaccagaagagactggagagcctgcgggagctggccggcaaggaaaacctggaataccctagcgtgaccctgccacctcagcctcacaccaaggagggcgttgatgcctacaacgaagtgatcgcccgggtgcgaatgtgggtgaacctgaacctgtggcagaagctgaagctaagcagagatgatgccaagcctctgctgagactgaagggattcccttcctttcctctggtcgagagacaggccaacgaagtggactggtgggacatggtgtgtaacgtgaagaagctgatcaacgagaaaaaggaggatggcaaggtgttttggcagaatctggctggctacaagagacaggaagccctgagaccatacctgagcagcgaggaagatcggaagaagggaaagaaattcgctcggtaccagctgggcgacctgctgctgcacctggaaaagaagcacggcgaggactggggaaaggtgtacgacgaggcctgggagcggattgacaagaaagtggaaggcctgagcaagcacatcaagctggaagaggaacggagaagcgaggacgcccagagcaaggccgccctgaccgactggctgcgggctaaggccagcttcgtgatcgagggcctgaaggaggccgacaaggacgagttctgcagatgcgagctgaagctgcagaagtggtacggggacctgcggggaaagcccttcgccatcgaagccgagaacagcatcctggacatcagcggcttcagcaagcagtacaactgtgccttcatctggcagaaggacggcgtgaagaagctgaacctgtacctgatcatcaactacttcaagggcggcaagctgcggttcaagaagatcaaacctgaagccttcgaagccaacagattctacaccgtgatcaacaaaaagagcggcgagatcgtgcccatggaggtgaacttcaacttcgacgaccccaacctgatcatcctgcctctggcctttggcaagagacagggcagagaattcatctggaacgacctgctgtccctggaaaccggcagcctgaagctggccaacggaagagtgatcgagaagacactgtacaacagaagaacccggcaggatgagcctgccctgttcgtggccctgaccttcgagcggcgggaggtcctggactcctccaatatcaaaccaatgaacctgatcggcgtggcaagaggcgaaaacatccccgccgtgatcgccctgaccgaccccgagggctgcccactgagccggtttaaggatagcctgggaaacccaacccacatcctgagaatcggcgagagctataaggagaagcagcggaccatccaggccaagaaggaggtggagcagcggagagccggcggctacagccggaagtacgccagcaaagccaagaatctggcagacgatatggtgagaaacaccgctagagatctgctgtactacgccgtgacccaggatgccatgctgatcttcgccaacctgagccggggcttcggccggcagggcaagcggaccttcatggccgagagacagtacacacggatggaggactggctgaccgccaagctggcctacgagggcctgagcaagacctacctgtccaagacactggcccagtacacctccaagacatgcagcaactgtgggtttaccatcaccagcgccgactacgacagggtgctggagaagctgaagaagacagcaacaggctggatgaccacaattaacggcaaggagctgaaggtggagggccagattacctactacaacagatacaagagacagaacgtagtcaaggacctgtccgtcgagctggatagactgagcgaagaatctgtgaacaacgacatctcctcctggacaaagggcagaagcggagaagctctgagcctcctgaagaaaagattctcccatagacccgtgcaggagaagttcgtgtgcctgaactgcggcttcgagacacacgcagccgagcaagccgccctgaacatcgccagatcctggctgttcctgcggagccaggagtacaagaaataccagacaaacaagacaaccggcaacaccgataagagagccttcgtcgagacctggcagtccttttaccggaagaagcttaaggaggtgtggaaacctgccgtgcggtctggcggatctggcggaggctccacaagcttccagggcagcgtgagcttcgaggacgtgaccgtgggcttcagccaggaggagtggcagcacctggaccccagccagagggccctgtacagggacgtgatgctggagaactacagcaacctggtgagcgtgggctactgcgtgcacaagcccgaggtgatcttcaggctggagcagggcgaggagccctggaggctggaggaggagttccccagccagagcttccccgaggtgtggaccgccaccagccccaagaaaaagagaaaagtctaagctgccttctgcggggcttgccttctggccatgcccttcttctctcccttgcacctgtacctcttggtctttgaataaagcctgagtaggaaggctagcaaaaaaaaaaaaaaaaaaaaaaaaaaaaaaaaaaaaaaaaaaaaaaaaaaaaaaaaaaaaaaaaaaaaaaaaaaaaaaaa

SEQ ID NO: 3556 - RNA, 5419 nt, synthetic construct
  source 1..5419: mol_type = other RNA
aggaaataagagagaaaagaagagtaagaagaaatataagagccaccatggcccctaagaagaagcgtaaagtgagccgggtgaacggcagcggcagcggcggcggcatgaaccacgaccaggagttcgacccccctaaggtgtaccctcccgtccccgccgagaagagaaagcccatccgggtcctgagcctgttcgatggcatcgccaccggtctgctggtgctgaaggacctgggcatccaggtggataggtacattgcctccgaggtgtgcgaggactccatcaccgtgggaatggtgcgtcatcagggcaagatcatgtacgtgggcgacgtgcggagcgtgacacagaagcatatccaggagtggggccctttcgacctggtgatcggcggcagcccttgcaatgacctgagcatcgtgaacccagcccggaagggcctgtacgagggaaccggcagactgttcttcgagttttacagactgctgcacgacgcccggcctaaggaaggcgacgaccggcccttcttttggctgttcgagaatgtggtggccatgggagtcagcgacaagcgggatattagccggttcctggagagcaaccccgtgatgatcgatgccaaggaagtgagcgccgcccaccgggccagatacttctggggcaatctgcctggcatgaacagacccctggccagcaccgtgaacgacaagctggagctgcaggagtgcctggagcacggccggatcgccaagttcagcaaggtgagaaccatcaccacccgaagcaacagcatcaaacaaggcaaggaccagcactttcctgtgttcatgaacgagaaggaggacatcctgtggtgtaccgagatggagagagtgttcgggttcccagtccactacacagatgtcagcaacatgtctagactggccagacagagactgctgggaagaagctggtccgtccctgtgatcagacacctgttcgcccctctgaaggagtacttcgcctgcgtgagcagcggcaacagcaacgccaacagccggggccccagcttctctagcggcctggtgccactgtccctgagagggagccacatgggccccatggagatctacaaaaccgtgagcgcctggaagcggcagcctgtgcgcgtgctgagcctgtttcggaatatcgataaagtcctgaaaagcctgggattcctggagagcggctctggctccggcggtggcaccctgaagtacgtggaggatgtgacaaacgtggtcagacgggatgtggagaagtggggccccttcgatctggtgtacggcagcacccaacccctgggcagctcttgtgaccggtgccctggctggtacatgtttcagttccaccggatcctgcagtacgccctgccgagacaggagtcccagcggccattcttttggattttcatggacaacttgctgctgaccgaggatgaccaggaaactaccactcggttcctgcagaccgaagccgtgaccctgcaggacgtgagaggccgggactaccagaacgccatgcgggtgtggtccaacatccctggactgaaaagcaagcacgcacctctgacccctaaagaagaggagtacctgcaggcccaggtgcggagcagaagcaagctggacgcccctaaggtggatctgctggtgaagaattgcctcctgcccctgagagagtacttcaagtatttcagccagaatagtctgcccctgggcggcccaagcagcggcgcccctcctcccagcggcggcagcccagccggctccccaacctctaccgaggagggcacctctgagtccgccacccccgagagcggccctggcacctccaccgagcccagcgagggcagcgcacccggcagccctgccggcagccccacctccacagaggagggaaccagcaccgagcccagcgaaggcagcgccccaggcaccagcaccgagcctagtgagggcggctctggcggcggcagcgcccaggagattaaacggatcaacaagatcagaagaagacttgtgaaagacagcaacaccaagaaggccggcaagacaggccccatgaaaaccctgctggttagagtgatgacacccgatctgagagagcggctggaaaacctgagaaagaagcctgaaaatatcccccagcccatcagcaatacatctagagccaacctgaataagctgctgaccgattacaccgaaatgaagaaggcgatcctgcatgtgtactgggaagagttccagaaggaccctgtgggcctgatgagccgggtggcccagcctgccagcaagaagatcgatcagaacaagctgaaacctgagatggacgagaagggcaacctgaccaccgccggctttgcctgctctcagtgtggccagcccctgttcgtgtacaagctggagcaggtgtctgagaagggcaaggcttacaccaactacttcggacggtgcaatgtggccgagcacgaaaagctgatcctgctggcccagctgaagcccgagaaggatagcgacgaagccgtgacatatagcctgggaaagtttgggcagagggccctggatttctacagcattcatgtgaccaaggagtccacccaccccgtgaagcccctggcccagatcgccggaaacagatacgcctccggacctgtgggaaaggccctgagcgacgcatgtatgggcacaatcgcctccttcctgtctaagtaccaggacatcatcatcgaacaccagaaggtggtgaagggcaaccagaagagactggagagcctgcgggagctggccggcaaggaaaacctggaataccctagcgtgaccctgccacctcagcctcacaccaaggagggcgttgatgcctacaacgaagtgatcgcccgggtgcgaatgtgggtgaacctgaacctgtggcagaagctgaagctaagcagagatgatgccaagcctctgctgagactgaagggattcccttcctttcctctggtcgagagacaggccaacgaagtggactggtgggacatggtgtgtaacgtgaagaagctgatcaacgagaaaaaggaggatggcaaggtgttttggcagaatctggctggctacaagagacaggaagccctgagaccatacctgagcagcgaggaagatcggaagaagggaaagaaattcgctcggtaccagctgggcgacctgctgctgcacctggaaaagaagcacggcgaggactggggaaaggtgtacgacgaggcctgggagcggattgacaagaaagtggaaggcctgagcaagcacatcaagctggaagaggaacggagaagcgaggacgcccagagcaaggccgccctgaccgactggctgcgggctaaggccagcttcgtgatcgagggcctgaaggaggccgacaaggacgagttctgcagatgcgagctgaagctgcagaagtggtacggggacctgcggggaaagcccttcgccatcgaagccgagaacagcatcctggacatcagcggcttcagcaagcagtacaactgtgccttcatctggcagaaggacggcgtgaagaagctgaacctgtacctgatcatcaactacttcaagggcggcaagctgcggttcaagaagatcaaacctgaagccttcgaagccaacagattctacaccgtgatcaacaaaaagagcggcgagatcgtgcccatggaggtgaacttcaacttcgacgaccccaacctgatcatcctgcctctggcctttggcaagagacagggcagagaattcatctggaacgacctgctgtccctggaaaccggcagcctgaagctggccaacggaagagtgatcgagaagacactgtacaacagaagaacccggcaggatgagcctgccctgttcgtggccctgaccttcgagcggcgggaggtcctggactcctccaatatcaaaccaatgaacctgatcggcgtggcaagaggcgaaaacatccccgccgtgatcgccctgaccgaccccgagggctgcccactgagccggtttaaggatagcctgggaaacccaacccacatcctgagaatcggcgagagctataaggagaagcagcggaccatccaggccaagaaggaggtggagcagcggagagccggcggctacagccggaagtacgccagcaaagccaagaatctggcagacgatatggtgagaaacaccgctagagatctgctgtactacgccgtgacccaggatgccatgctgatcttcgccaacctgagccggggcttcggccggcagggcaagcggaccttcatggccgagagacagtacacacggatggaggactggctgaccgccaagctggcctacgagggcctgagcaagacctacctgtccaagacactggcccagtacacctccaagacatgcagcaactgtgggtttaccatcaccagcgccgactacgacagggtgctggagaagctgaagaagacagcaacaggctggatgaccacaattaacggcaaggagctgaaggtggagggccagattacctactacaacagatacaagagacagaacgtagtcaaggacctgtccgtcgagctggatagactgagcgaagaatctgtgaacaacgacatctcctcctggacaaagggcagaagcggagaagctctgagcctcctgaagaaaagattctcccatagacccgtgcaggagaagttcgtgtgcctgaactgcggcttcgagacacacgcagccgagcaagccgccctgaacatcgccagatcctggctgttcctgcggagccaggagtacaagaaataccagacaaacaagacaaccggcaacaccgataagagagccttcgtcgagacctggcagtccttttaccggaagaagcttaaggaggtgtggaaacctgccgtgcggtctggcggatctggcggaggctccacaagcgacagcgtggccttcgaggacgtggccatcaacttcacctgcgaggagtgggccctgctgggccccagccagaagagcctgtacagggacgtgatgcaggagaccatcaggaacctggactgcatcggcatgaagtggcagaacctggacatcgaggaggacgagtacaagaaccccggcaggaacctgaggtgcttcatggtggagaggagctgcgagatcaaggacaacagccagtgcggcaccagccccaagaaaaagagaaaagtctaagctgccttctgcggggcttgccttctggccatgcccttcttctctcccttgcacctgtacctcttggtctttgaataaagcctgagtaggaaggctagcaaaaaaaaaaaaaaaaaaaaaaaaaaaaaaaaaaaaaaaaaaaaaaaaaaaaaaaaaaaaaaaaaaaaaaaaaaaaaaaa

SEQ ID NO: 3557 - RNA, 5419 nt, synthetic construct
  source 1..5419: mol_type = other RNA
aggaaataagagagaaaagaagagtaagaagaaatataagagccaccatggcccctaagaagaagcgtaaagtgagccgggtgaacggcagcggcagcggcggcggcatgaaccacgaccaggagttcgacccccctaaggtgtaccctcccgtccccgccgagaagagaaagcccatccgggtcctgagcctgttcgatggcatcgccaccggtctgctggtgctgaaggacctgggcatccaggtggataggtacattgcctccgaggtgtgcgaggactccatcaccgtgggaatggtgcgtcatcagggcaagatcatgtacgtgggcgacgtgcggagcgtgacacagaagcatatccaggagtggggccctttcgacctggtgatcggcggcagcccttgcaatgacctgagcatcgtgaacccagcccggaagggcctgtacgagggaaccggcagactgttcttcgagttttacagactgctgcacgacgcccggcctaaggaaggcgacgaccggcccttcttttggctgttcgagaatgtggtggccatgggagtcagcgacaagcgggatattagccggttcctggagagcaaccccgtgatgatcgatgccaaggaagtgagcgccgcccaccgggccagatacttctggggcaatctgcctggcatgaacagacccctggccagcaccgtgaacgacaagctggagctgcaggagtgcctggagcacggccggatcgccaagttcagcaaggtgagaaccatcaccacccgaagcaacagcatcaaacaaggcaaggaccagcactttcctgtgttcatgaacgagaaggaggacatcctgtggtgtaccgagatggagagagtgttcgggttcccagtccactacacagatgtcagcaacatgtctagactggccagacagagactgctgggaagaagctggtccgtccctgtgatcagacacctgttcgcccctctgaaggagtacttcgcctgcgtgagcagcggcaacagcaacgccaacagccggggccccagcttctctagcggcctggtgccactgtccctgagagggagccacatgggccccatggagatctacaaaaccgtgagcgcctggaagcggcagcctgtgcgcgtgctgagcctgtttcggaatatcgataaagtcctgaaaagcctgggattcctggagagcggctctggctccggcggtggcaccctgaagtacgtggaggatgtgacaaacgtggtcagacgggatgtggagaagtggggccccttcgatctggtgtacggcagcacccaacccctgggcagctcttgtgaccggtgccctggctggtacatgtttcagttccaccggatcctgcagtacgccctgccgagacaggagtcccagcggccattcttttggattttcatggacaacttgctgctgaccgaggatgaccaggaaactaccactcggttcctgcagaccgaagccgtgaccctgcaggacgtgagaggccgggactaccagaacgccatgcgggtgtggtccaacatccctggactgaaaagcaagcacgcacctctgacccctaaagaagaggagtacctgcaggcccaggtgcggagcagaagcaagctggacgcccctaaggtggatctgctggtgaagaattgcctcctgcccctgagagagtacttcaagtatttcagccagaatagtctgcccctgggcggcccaagcagcggcgcccctcctcccagcggcggcagcccagccggctccccaacctctaccgaggagggcacctctgagtccgccacccccgagagcggccctggcacctccaccgagcccagcgagggcagcgcacccggcagccctgccggcagccccacctccacagaggagggaaccagcaccgagcccagcgaaggcagcgccccaggcaccagcaccgagcctagtgagggcggctctggcggcggcagcgcccaggagattaaacggatcaacaagatcagaagaagacttgtgaaagacagcaacaccaagaaggccggcaagacaggccccatgaaaaccctgctggttagagtgatgacacccgatctgagagagcggctggaaaacctgagaaagaagcctgaaaatatcccccagcccatcagcaatacatctagagccaacctgaataagctgctgaccgattacaccgaaatgaagaaggcgatcctgcatgtgtactgggaagagttccagaaggaccctgtgggcctgatgagccgggtggcccagcctgccagcaagaagatcgatcagaacaagctgaaacctgagatggacgagaagggcaacctgaccaccgccggctttgcctgctctcagtgtggccagcccctgttcgtgtacaagctggagcaggtgtctgagaagggcaaggcttacaccaactacttcggacggtgcaatgtggccgagcacgaaaagctgatcctgctggcccagctgaagcccgagaaggatagcgacgaagccgtgacatatagcctgggaaagtttgggcagagggccctggatttctacagcattcatgtgaccaaggagtccacccaccccgtgaagcccctggcccagatcgccggaaacagatacgcctccggacctgtgggaaaggccctgagcgacgcatgtatgggcacaatcgcctccttcctgtctaagtaccaggacatcatcatcgaacaccagaaggtggtgaagggcaaccagaagagactggagagcctgcgggagctggccggcaaggaaaacctggaataccctagcgtgaccctgccacctcagcctcacaccaaggagggcgttgatgcctacaacgaagtgatcgcccgggtgcgaatgtgggtgaacctgaacctgtggcagaagctgaagctaagcagagatgatgccaagcctctgctgagactgaagggattcccttcctttcctctggtcgagagacaggccaacgaagtggactggtgggacatggtgtgtaacgtgaagaagctgatcaacgagaaaaaggaggatggcaaggtgttttggcagaatctggctggctacaagagacaggaagccctgagaccatacctgagcagcgaggaagatcggaagaagggaaagaaattcgctcggtaccagctgggcgacctgctgctgcacctggaaaagaagcacggcgaggactggggaaaggtgtacgacgaggcctgggagcggattgacaagaaagtggaaggcctgagcaagcacatcaagctggaagaggaacggagaagcgaggacgcccagagcaaggccgccctgaccgactggctgcgggctaaggccagcttcgtgatcgagggcctgaaggaggccgacaaggacgagttctgcagatgcgagctgaagctgcagaagtggtacggggacctgcggggaaagcccttcgccatcgaagccgagaacagcatcctggacatcagcggcttcagcaagcagtacaactgtgccttcatctggcagaaggacggcgtgaagaagctgaacctgtacctgatcatcaactacttcaagggcggcaagctgcggttcaagaagatcaaacctgaagccttcgaagccaacagattctacaccgtgatcaacaaaaagagcggcgagatcgtgcccatggaggtgaacttcaacttcgacgaccccaacctgatcatcctgcctctggcctttggcaagagacagggcagagaattcatctggaacgacctgctgtccctggaaaccggcagcctgaagctggccaacggaagagtgatcgagaagacactgtacaacagaagaacccggcaggatgagcctgccctgttcgtggccctgaccttcgagcggcgggaggtcctggactcctccaatatcaaaccaatgaacctgatcggcgtggcaagaggcgaaaacatccccgccgtgatcgccctgaccgaccccgagggctgcccactgagccggtttaaggatagcctgggaaacccaacccacatcctgagaatcggcgagagctataaggagaagcagcggaccatccaggccaagaaggaggtggagcagcggagagccggcggctacagccggaagtacgccagcaaagccaagaatctggcagacgatatggtgagaaacaccgctagagatctgctgtactacgccgtgacccaggatgccatgctgatcttcgccaacctgagccggggcttcggccggcagggcaagcggaccttcatggccgagagacagtacacacggatggaggactggctgaccgccaagctggcctacgagggcctgagcaagacctacctgtccaagacactggcccagtacacctccaagacatgcagcaactgtgggtttaccatcaccagcgccgactacgacagggtgctggagaagctgaagaagacagcaacaggctggatgaccacaattaacggcaaggagctgaaggtggagggccagattacctactacaacagatacaagagacagaacgtagtcaaggacctgtccgtcgagctggatagactgagcgaagaatctgtgaacaacgacatctcctcctggacaaagggcagaagcggagaagctctgagcctcctgaagaaaagattctcccatagacccgtgcaggagaagttcgtgtgcctgaactgcggcttcgagacacacgcagccgagcaagccgccctgaacatcgccagatcctggctgttcctgcggagccaggagtacaagaaataccagacaaacaagacaaccggcaacaccgataagagagccttcgtcgagacctggcagtccttttaccggaagaagcttaaggaggtgtggaaacctgccgtgcggtctggcggatctggcggaggctccacaagccacggcagcagctacgagggcagcgtgagcttcagggacgtggccatcaacttcagcagggaggagtggaggcacctggacctgagccagaggaacctgtactgggacgtgatgctggagacctacagccacctgctgagcgtgggctaccagttccccaagcccgaggtggtgatgctggagcagggcaacgagccctgggccctgcagggcgagaggcccaggcacagctgccccggcgagaccagccccaagaaaaagagaaaagtctaagctgccttctgcggggcttgccttctggccatgcccttcttctctcccttgcacctgtacctcttggtctttgaataaagcctgagtaggaaggctagcaaaaaaaaaaaaaaaaaaaaaaaaaaaaaaaaaaaaaaaaaaaaaaaaaaaaaaaaaaaaaaaaaaaaaaaaaaaaaaaa

SEQ ID NO: 3558 - RNA, 5419 nt, synthetic construct
  source 1..5419: mol_type = other RNA
aggaaataagagagaaaagaagagtaagaagaaatataagagccaccatggcccctaagaagaagcgtaaagtgagccgggtgaacggcagcggcagcggcggcggcatgaaccacgaccaggagttcgacccccctaaggtgtaccctcccgtccccgccgagaagagaaagcccatccgggtcctgagcctgttcgatggcatcgccaccggtctgctggtgctgaaggacctgggcatccaggtggataggtacattgcctccgaggtgtgcgaggactccatcaccgtgggaatggtgcgtcatcagggcaagatcatgtacgtgggcgacgtgcggagcgtgacacagaagcatatccaggagtggggccctttcgacctggtgatcggcggcagcccttgcaatgacctgagcatcgtgaacccagcccggaagggcctgtacgagggaaccggcagactgttcttcgagttttacagactgctgcacgacgcccggcctaaggaaggcgacgaccggcccttcttttggctgttcgagaatgtggtggccatgggagtcagcgacaagcgggatattagccggttcctggagagcaaccccgtgatgatcgatgccaaggaagtgagcgccgcccaccgggccagatacttctggggcaatctgcctggcatgaacagacccctggccagcaccgtgaacgacaagctggagctgcaggagtgcctggagcacggccggatcgccaagttcagcaaggtgagaaccatcaccacccgaagcaacagcatcaaacaaggcaaggaccagcactttcctgtgttcatgaacgagaaggaggacatcctgtggtgtaccgagatggagagagtgttcgggttcccagtccactacacagatgtcagcaacatgtctagactggccagacagagactgctgggaagaagctggtccgtccctgtgatcagacacctgttcgcccctctgaaggagtacttcgcctgcgtgagcagcggcaacagcaacgccaacagccggggccccagcttctctagcggcctggtgccactgtccctgagagggagccacatgggccccatggagatctacaaaaccgtgagcgcctggaagcggcagcctgtgcgcgtgctgagcctgtttcggaatatcgataaagtcctgaaaagcctgggattcctggagagcggctctggctccggcggtggcaccctgaagtacgtggaggatgtgacaaacgtggtcagacgggatgtggagaagtggggccccttcgatctggtgtacggcagcacccaacccctgggcagctcttgtgaccggtgccctggctggtacatgtttcagttccaccggatcctgcagtacgccctgccgagacaggagtcccagcggccattcttttggattttcatggacaacttgctgctgaccgaggatgaccaggaaactaccactcggttcctgcagaccgaagccgtgaccctgcaggacgtgagaggccgggactaccagaacgccatgcgggtgtggtccaacatccctggactgaaaagcaagcacgcacctctgacccctaaagaagaggagtacctgcaggcccaggtgcggagcagaagcaagctggacgcccctaaggtggatctgctggtgaagaattgcctcctgcccctgagagagtacttcaagtatttcagccagaatagtctgcccctgggcggcccaagcagcggcgcccctcctcccagcggcggcagcccagccggctccccaacctctaccgaggagggcacctctgagtccgccacccccgagagcggccctggcacctccaccgagcccagcgagggcagcgcacccggcagccctgccggcagccccacctccacagaggagggaaccagcaccgagcccagcgaaggcagcgccccaggcaccagcaccgagcctagtgagggcggctctggcggcggcagcgcccaggagattaaacggatcaacaagatcagaagaagacttgtgaaagacagcaacaccaagaaggccggcaagacaggccccatgaaaaccctgctggttagagtgatgacacccgatctgagagagcggctggaaaacctgagaaagaagcctgaaaatatcccccagcccatcagcaatacatctagagccaacctgaataagctgctgaccgattacaccgaaatgaagaaggcgatcctgcatgtgtactgggaagagttccagaaggaccctgtgggcctgatgagccgggtggcccagcctgccagcaagaagatcgatcagaacaagctgaaacctgagatggacgagaagggcaacctgaccaccgccggctttgcctgctctcagtgtggccagcccctgttcgtgtacaagctggagcaggtgtctgagaagggcaaggcttacaccaactacttcggacggtgcaatgtggccgagcacgaaaagctgatcctgctggcccagctgaagcccgagaaggatagcgacgaagccgtgacatatagcctgggaaagtttgggcagagggccctggatttctacagcattcatgtgaccaaggagtccacccaccccgtgaagcccctggcccagatcgccggaaacagatacgcctccggacctgtgggaaaggccctgagcgacgcatgtatgggcacaatcgcctccttcctgtctaagtaccaggacatcatcatcgaacaccagaaggtggtgaagggcaaccagaagagactggagagcctgcgggagctggccggcaaggaaaacctggaataccctagcgtgaccctgccacctcagcctcacaccaaggagggcgttgatgcctacaacgaagtgatcgcccgggtgcgaatgtgggtgaacctgaacctgtggcagaagctgaagctaagcagagatgatgccaagcctctgctgagactgaagggattcccttcctttcctctggtcgagagacaggccaacgaagtggactggtgggacatggtgtgtaacgtgaagaagctgatcaacgagaaaaaggaggatggcaaggtgttttggcagaatctggctggctacaagagacaggaagccctgagaccatacctgagcagcgaggaagatcggaagaagggaaagaaattcgctcggtaccagctgggcgacctgctgctgcacctggaaaagaagcacggcgaggactggggaaaggtgtacgacgaggcctgggagcggattgacaagaaagtggaaggcctgagcaagcacatcaagctggaagaggaacggagaagcgaggacgcccagagcaaggccgccctgaccgactggctgcgggctaaggccagcttcgtgatcgagggcctgaaggaggccgacaaggacgagttctgcagatgcgagctgaagctgcagaagtggtacggggacctgcggggaaagcccttcgccatcgaagccgagaacagcatcctggacatcagcggcttcagcaagcagtacaactgtgccttcatctggcagaaggacggcgtgaagaagctgaacctgtacctgatcatcaactacttcaagggcggcaagctgcggttcaagaagatcaaacctgaagccttcgaagccaacagattctacaccgtgatcaacaaaaagagcggcgagatcgtgcccatggaggtgaacttcaacttcgacgaccccaacctgatcatcctgcctctggcctttggcaagagacagggcagagaattcatctggaacgacctgctgtccctggaaaccggcagcctgaagctggccaacggaagagtgatcgagaagacactgtacaacagaagaacccggcaggatgagcctgccctgttcgtggccctgaccttcgagcggcgggaggtcctggactcctccaatatcaaaccaatgaacctgatcggcgtggcaagaggcgaaaacatccccgccgtgatcgccctgaccgaccccgagggctgcccactgagccggtttaaggatagcctgggaaacccaacccacatcctgagaatcggcgagagctataaggagaagcagcggaccatccaggccaagaaggaggtggagcagcggagagccggcggctacagccggaagtacgccagcaaagccaagaatctggcagacgatatggtgagaaacaccgctagagatctgctgtactacgccgtgacccaggatgccatgctgatcttcgccaacctgagccggggcttcggccggcagggcaagcggaccttcatggccgagagacagtacacacggatggaggactggctgaccgccaagctggcctacgagggcctgagcaagacctacctgtccaagacactggcccagtacacctccaagacatgcagcaactgtgggtttaccatcaccagcgccgactacgacagggtgctggagaagctgaagaagacagcaacaggctggatgaccacaattaacggcaaggagctgaaggtggagggccagattacctactacaacagatacaagagacagaacgtagtcaaggacctgtccgtcgagctggatagactgagcgaagaatctgtgaacaacgacatctcctcctggacaaagggcagaagcggagaagctctgagcctcctgaagaaaagattctcccatagacccgtgcaggagaagttcgtgtgcctgaactgcggcttcgagacacacgcagccgagcaagccgccctgaacatcgccagatcctggctgttcctgcggagccaggagtacaagaaataccagacaaacaagacaaccggcaacaccgataagagagccttcgtcgagacctggcagtccttttaccggaagaagcttaaggaggtgtggaaacctgccgtgcggtctggcggatctggcggaggctccacaagccagcccggcgccgtgaggttcgccgacgtggccgtgtacttcagccccgaggagtggggctgcctgaggcccgtgcagagggccctgtacagggacgtgatgagggagacctacagccacctggtggccctgggcgtgggcggcaccaagcccaagctgatcagctgggtggaggaggaggccgagctgtggggccccgaggcccaggacctggagggcgccaagtgcctgaccgaggccaacaccagccccaagaaaaagagaaaagtctaagctgccttctgcggggcttgccttctggccatgcccttcttctctcccttgcacctgtacctcttggtctttgaataaagcctgagtaggaaggctagcaaaaaaaaaaaaaaaaaaaaaaaaaaaaaaaaaaaaaaaaaaaaaaaaaaaaaaaaaaaaaaaaaaaaaaaaaaaaaaaa

SEQ ID NO: 3559 - RNA, 5419 nt, synthetic construct
  source 1..5419: mol_type = other RNA
aggaaataagagagaaaagaagagtaagaagaaatataagagccaccatggcccctaagaagaagcgtaaagtgagccgggtgaacggcagcggcagcggcggcggcatgaaccacgaccaggagttcgacccccctaaggtgtaccctcccgtccccgccgagaagagaaagcccatccgggtcctgagcctgttcgatggcatcgccaccggtctgctggtgctgaaggacctgggcatccaggtggataggtacattgcctccgaggtgtgcgaggactccatcaccgtgggaatggtgcgtcatcagggcaagatcatgtacgtgggcgacgtgcggagcgtgacacagaagcatatccaggagtggggccctttcgacctggtgatcggcggcagcccttgcaatgacctgagcatcgtgaacccagcccggaagggcctgtacgagggaaccggcagactgttcttcgagttttacagactgctgcacgacgcccggcctaaggaaggcgacgaccggcccttcttttggctgttcgagaatgtggtggccatgggagtcagcgacaagcgggatattagccggttcctggagagcaaccccgtgatgatcgatgccaaggaagtgagcgccgcccaccgggccagatacttctggggcaatctgcctggcatgaacagacccctggccagcaccgtgaacgacaagctggagctgcaggagtgcctggagcacggccggatcgccaagttcagcaaggtgagaaccatcaccacccgaagcaacagcatcaaacaaggcaaggaccagcactttcctgtgttcatgaacgagaaggaggacatcctgtggtgtaccgagatggagagagtgttcgggttcccagtccactacacagatgtcagcaacatgtctagactggccagacagagactgctgggaagaagctggtccgtccctgtgatcagacacctgttcgcccctctgaaggagtacttcgcctgcgtgagcagcggcaacagcaacgccaacagccggggccccagcttctctagcggcctggtgccactgtccctgagagggagccacatgggccccatggagatctacaaaaccgtgagcgcctggaagcggcagcctgtgcgcgtgctgagcctgtttcggaatatcgataaagtcctgaaaagcctgggattcctggagagcggctctggctccggcggtggcaccctgaagtacgtggaggatgtgacaaacgtggtcagacgggatgtggagaagtggggccccttcgatctggtgtacggcagcacccaacccctgggcagctcttgtgaccggtgccctggctggtacatgtttcagttccaccggatcctgcagtacgccctgccgagacaggagtcccagcggccattcttttggattttcatggacaacttgctgctgaccgaggatgaccaggaaactaccactcggttcctgcagaccgaagccgtgaccctgcaggacgtgagaggccgggactaccagaacgccatgcgggtgtggtccaacatccctggactgaaaagcaagcacgcacctctgacccctaaagaagaggagtacctgcaggcccaggtgcggagcagaagcaagctggacgcccctaaggtggatctgctggtgaagaattgcctcctgcccctgagagagtacttcaagtatttcagccagaatagtctgcccctgggcggcccaagcagcggcgcccctcctcccagcggcggcagcccagccggctccccaacctctaccgaggagggcacctctgagtccgccacccccgagagcggccctggcacctccaccgagcccagcgagggcagcgcacccggcagccctgccggcagccccacctccacagaggagggaaccagcaccgagcccagcgaaggcagcgccccaggcaccagcaccgagcctagtgagggcggctctggcggcggcagcgcccaggagattaaacggatcaacaagatcagaagaagacttgtgaaagacagcaacaccaagaaggccggcaagacaggccccatgaaaaccctgctggttagagtgatgacacccgatctgagagagcggctggaaaacctgagaaagaagcctgaaaatatcccccagcccatcagcaatacatctagagccaacctgaataagctgctgaccgattacaccgaaatgaagaaggcgatcctgcatgtgtactgggaagagttccagaaggaccctgtgggcctgatgagccgggtggcccagcctgccagcaagaagatcgatcagaacaagctgaaacctgagatggacgagaagggcaacctgaccaccgccggctttgcctgctctcagtgtggccagcccctgttcgtgtacaagctggagcaggtgtctgagaagggcaaggcttacaccaactacttcggacggtgcaatgtggccgagcacgaaaagctgatcctgctggcccagctgaagcccgagaaggatagcgacgaagccgtgacatatagcctgggaaagtttgggcagagggccctggatttctacagcattcatgtgaccaaggagtccacccaccccgtgaagcccctggcccagatcgccggaaacagatacgcctccggacctgtgggaaaggccctgagcgacgcatgtatgggcacaatcgcctccttcctgtctaagtaccaggacatcatcatcgaacaccagaaggtggtgaagggcaaccagaagagactggagagcctgcgggagctggccggcaaggaaaacctggaataccctagcgtgaccctgccacctcagcctcacaccaaggagggcgttgatgcctacaacgaagtgatcgcccgggtgcgaatgtgggtgaacctgaacctgtggcagaagctgaagctaagcagagatgatgccaagcctctgctgagactgaagggattcccttcctttcctctggtcgagagacaggccaacgaagtggactggtgggacatggtgtgtaacgtgaagaagctgatcaacgagaaaaaggaggatggcaaggtgttttggcagaatctggctggctacaagagacaggaagccctgagaccatacctgagcagcgaggaagatcggaagaagggaaagaaattcgctcggtaccagctgggcgacctgctgctgcacctggaaaagaagcacggcgaggactggggaaaggtgtacgacgaggcctgggagcggattgacaagaaagtggaaggcctgagcaagcacatcaagctggaagaggaacggagaagcgaggacgcccagagcaaggccgccctgaccgactggctgcgggctaaggccagcttcgtgatcgagggcctgaaggaggccgacaaggacgagttctgcagatgcgagctgaagctgcagaagtggtacggggacctgcggggaaagcccttcgccatcgaagccgagaacagcatcctggacatcagcggcttcagcaagcagtacaactgtgccttcatctggcagaaggacggcgtgaagaagctgaacctgtacctgatcatcaactacttcaagggcggcaagctgcggttcaagaagatcaaacctgaagccttcgaagccaacagattctacaccgtgatcaacaaaaagagcggcgagatcgtgcccatggaggtgaacttcaacttcgacgaccccaacctgatcatcctgcctctggcctttggcaagagacagggcagagaattcatctggaacgacctgctgtccctggaaaccggcagcctgaagctggccaacggaagagtgatcgagaagacactgtacaacagaagaacccggcaggatgagcctgccctgttcgtggccctgaccttcgagcggcgggaggtcctggactcctccaatatcaaaccaatgaacctgatcggcgtggcaagaggcgaaaacatccccgccgtgatcgccctgaccgaccccgagggctgcccactgagccggtttaaggatagcctgggaaacccaacccacatcctgagaatcggcgagagctataaggagaagcagcggaccatccaggccaagaaggaggtggagcagcggagagccggcggctacagccggaagtacgccagcaaagccaagaatctggcagacgatatggtgagaaacaccgctagagatctgctgtactacgccgtgacccaggatgccatgctgatcttcgccaacctgagccggggcttcggccggcagggcaagcggaccttcatggccgagagacagtacacacggatggaggactggctgaccgccaagctggcctacgagggcctgagcaagacctacctgtccaagacactggcccagtacacctccaagacatgcagcaactgtgggtttaccatcaccagcgccgactacgacagggtgctggagaagctgaagaagacagcaacaggctggatgaccacaattaacggcaaggagctgaaggtggagggccagattacctactacaacagatacaagagacagaacgtagtcaaggacctgtccgtcgagctggatagactgagcgaagaatctgtgaacaacgacatctcctcctggacaaagggcagaagcggagaagctctgagcctcctgaagaaaagattctcccatagacccgtgcaggagaagttcgtgtgcctgaactgcggcttcgagacacacgcagccgagcaagccgccctgaacatcgccagatcctggctgttcctgcggagccaggagtacaagaaataccagacaaacaagacaaccggcaacaccgataagagagccttcgtcgagacctggcagtccttttaccggaagaagcttaaggaggtgtggaaacctgccgtgcggtctggcggatctggcggaggctccacaagcttcgaggagctggtgaccttcgaggacgtgttcgtggacttcagccccgaggagctgagcagcctgagcgccgcccagaggaacctgtacagggaggtgatgctggagaactacaggaacctggtgagcctgggctaccagttcagcaagcccgacatcatcagcaggctggaggccgaggagagcagggccatggagaaggacagcaggcacaccgtgatctgccagggcgaggcccacgacaccagccccaagaaaaagagaaaagtctaagctgccttctgcggggcttgccttctggccatgcccttcttctctcccttgcacctgtacctcttggtctttgaataaagcctgagtaggaaggctagcaaaaaaaaaaaaaaaaaaaaaaaaaaaaaaaaaaaaaaaaaaaaaaaaaaaaaaaaaaaaaaaaaaaaaaaaaaaaaaaa

SEQ ID NO: 3560 - RNA, 5419 nt, synthetic construct
  source 1..5419: mol_type = other RNA
aggaaataagagagaaaagaagagtaagaagaaatataagagccaccatggcccctaagaagaagcgtaaagtgagccgggtgaacggcagcggcagcggcggcggcatgaaccacgaccaggagttcgacccccctaaggtgtaccctcccgtccccgccgagaagagaaagcccatccgggtcctgagcctgttcgatggcatcgccaccggtctgctggtgctgaaggacctgggcatccaggtggataggtacattgcctccgaggtgtgcgaggactccatcaccgtgggaatggtgcgtcatcagggcaagatcatgtacgtgggcgacgtgcggagcgtgacacagaagcatatccaggagtggggccctttcgacctggtgatcggcggcagcccttgcaatgacctgagcatcgtgaacccagcccggaagggcctgtacgagggaaccggcagactgttcttcgagttttacagactgctgcacgacgcccggcctaaggaaggcgacgaccggcccttcttttggctgttcgagaatgtggtggccatgggagtcagcgacaagcgggatattagccggttcctggagagcaaccccgtgatgatcgatgccaaggaagtgagcgccgcccaccgggccagatacttctggggcaatctgcctggcatgaacagacccctggccagcaccgtgaacgacaagctggagctgcaggagtgcctggagcacggccggatcgccaagttcagcaaggtgagaaccatcaccacccgaagcaacagcatcaaacaaggcaaggaccagcactttcctgtgttcatgaacgagaaggaggacatcctgtggtgtaccgagatggagagagtgttcgggttcccagtccactacacagatgtcagcaacatgtctagactggccagacagagactgctgggaagaagctggtccgtccctgtgatcagacacctgttcgcccctctgaaggagtacttcgcctgcgtgagcagcggcaacagcaacgccaacagccggggccccagcttctctagcggcctggtgccactgtccctgagagggagccacatgggccccatggagatctacaaaaccgtgagcgcctggaagcggcagcctgtgcgcgtgctgagcctgtttcggaatatcgataaagtcctgaaaagcctgggattcctggagagcggctctggctccggcggtggcaccctgaagtacgtggaggatgtgacaaacgtggtcagacgggatgtggagaagtggggccccttcgatctggtgtacggcagcacccaacccctgggcagctcttgtgaccggtgccctggctggtacatgtttcagttccaccggatcctgcagtacgccctgccgagacaggagtcccagcggccattcttttggattttcatggacaacttgctgctgaccgaggatgaccaggaaactaccactcggttcctgcagaccgaagccgtgaccctgcaggacgtgagaggccgggactaccagaacgccatgcgggtgtggtccaacatccctggactgaaaagcaagcacgcacctctgacccctaaagaagaggagtacctgcaggcccaggtgcggagcagaagcaagctggacgcccctaaggtggatctgctggtgaagaattgcctcctgcccctgagagagtacttcaagtatttcagccagaatagtctgcccctgggcggcccaagcagcggcgcccctcctcccagcggcggcagcccagccggctccccaacctctaccgaggagggcacctctgagtccgccacccccgagagcggccctggcacctccaccgagcccagcgagggcagcgcacccggcagccctgccggcagccccacctccacagaggagggaaccagcaccgagcccagcgaaggcagcgccccaggcaccagcaccgagcctagtgagggcggctctggcggcggcagcgcccaggagattaaacggatcaacaagatcagaagaagacttgtgaaagacagcaacaccaagaaggccggcaagacaggccccatgaaaaccctgctggttagagtgatgacacccgatctgagagagcggctggaaaacctgagaaagaagcctgaaaatatcccccagcccatcagcaatacatctagagccaacctgaataagctgctgaccgattacaccgaaatgaagaaggcgatcctgcatgtgtactgggaagagttccagaaggaccctgtgggcctgatgagccgggtggcccagcctgccagcaagaagatcgatcagaacaagctgaaacctgagatggacgagaagggcaacctgaccaccgccggctttgcctgctctcagtgtggccagcccctgttcgtgtacaagctggagcaggtgtctgagaagggcaaggcttacaccaactacttcggacggtgcaatgtggccgagcacgaaaagctgatcctgctggcccagctgaagcccgagaaggatagcgacgaagccgtgacatatagcctgggaaagtttgggcagagggccctggatttctacagcattcatgtgaccaaggagtccacccaccccgtgaagcccctggcccagatcgccggaaacagatacgcctccggacctgtgggaaaggccctgagcgacgcatgtatgggcacaatcgcctccttcctgtctaagtaccaggacatcatcatcgaacaccagaaggtggtgaagggcaaccagaagagactggagagcctgcgggagctggccggcaaggaaaacctggaataccctagcgtgaccctgccacctcagcctcacaccaaggagggcgttgatgcctacaacgaagtgatcgcccgggtgcgaatgtgggtgaacctgaacctgtggcagaagctgaagctaagcagagatgatgccaagcctctgctgagactgaagggattcccttcctttcctctggtcgagagacaggccaacgaagtggactggtgggacatggtgtgtaacgtgaagaagctgatcaacgagaaaaaggaggatggcaaggtgttttggcagaatctggctggctacaagagacaggaagccctgagaccatacctgagcagcgaggaagatcggaagaagggaaagaaattcgctcggtaccagctgggcgacctgctgctgcacctggaaaagaagcacggcgaggactggggaaaggtgtacgacgaggcctgggagcggattgacaagaaagtggaaggcctgagcaagcacatcaagctggaagaggaacggagaagcgaggacgcccagagcaaggccgccctgaccgactggctgcgggctaaggccagcttcgtgatcgagggcctgaaggaggccgacaaggacgagttctgcagatgcgagctgaagctgcagaagtggtacggggacctgcggggaaagcccttcgccatcgaagccgagaacagcatcctggacatcagcggcttcagcaagcagtacaactgtgccttcatctggcagaaggacggcgtgaagaagctgaacctgtacctgatcatcaactacttcaagggcggcaagctgcggttcaagaagatcaaacctgaagccttcgaagccaacagattctacaccgtgatcaacaaaaagagcggcgagatcgtgcccatggaggtgaacttcaacttcgacgaccccaacctgatcatcctgcctctggcctttggcaagagacagggcagagaattcatctggaacgacctgctgtccctggaaaccggcagcctgaagctggccaacggaagagtgatcgagaagacactgtacaacagaagaacccggcaggatgagcctgccctgttcgtggccctgaccttcgagcggcgggaggtcctggactcctccaatatcaaaccaatgaacctgatcggcgtggcaagaggcgaaaacatccccgccgtgatcgccctgaccgaccccgagggctgcccactgagccggtttaaggatagcctgggaaacccaacccacatcctgagaatcggcgagagctataaggagaagcagcggaccatccaggccaagaaggaggtggagcagcggagagccggcggctacagccggaagtacgccagcaaagccaagaatctggcagacgatatggtgagaaacaccgctagagatctgctgtactacgccgtgacccaggatgccatgctgatcttcgccaacctgagccggggcttcggccggcagggcaagcggaccttcatggccgagagacagtacacacggatggaggactggctgaccgccaagctggcctacgagggcctgagcaagacctacctgtccaagacactggcccagtacacctccaagacatgcagcaactgtgggtttaccatcaccagcgccgactacgacagggtgctggagaagctgaagaagacagcaacaggctggatgaccacaattaacggcaaggagctgaaggtggagggccagattacctactacaacagatacaagagacagaacgtagtcaaggacctgtccgtcgagctggatagactgagcgaagaatctgtgaacaacgacatctcctcctggacaaagggcagaagcggagaagctctgagcctcctgaagaaaagattctcccatagacccgtgcaggagaagttcgtgtgcctgaactgcggcttcgagacacacgcagccgagcaagccgccctgaacatcgccagatcctggctgttcctgcggagccaggagtacaagaaataccagacaaacaagacaaccggcaacaccgataagagagccttcgtcgagacctggcagtccttttaccggaagaagcttaaggaggtgtggaaacctgccgtgcggtctggcggatctggcggaggctccacaagccagccccaggaggccctgaccttcaaggacgtggaggtgaccttcagccaggacgagtggggctggctggacgccagccagaggaacctgtacagggacgtgatgctggagaactacggcaacatcgccagcctgatgggccccttcaccaagcccgccctgatcagctggctggagaccagggagccctgggtgctgaacgtgcagggcgcccagcccgagggcaaccccggcgccgacgtgaccagccccaagaaaaagagaaaagtctaagctgccttctgcggggcttgccttctggccatgcccttcttctctcccttgcacctgtacctcttggtctttgaataaagcctgagtaggaaggctagcaaaaaaaaaaaaaaaaaaaaaaaaaaaaaaaaaaaaaaaaaaaaaaaaaaaaaaaaaaaaaaaaaaaaaaaaaaaaaaaa

SEQ ID NO: 3561 - RNA, 5419 nt, synthetic construct
  source 1..5419: mol_type = other RNA
aggaaataagagagaaaagaagagtaagaagaaatataagagccaccatggcccctaagaagaagcgtaaagtgagccgggtgaacggcagcggcagcggcggcggcatgaaccacgaccaggagttcgacccccctaaggtgtaccctcccgtccccgccgagaagagaaagcccatccgggtcctgagcctgttcgatggcatcgccaccggtctgctggtgctgaaggacctgggcatccaggtggataggtacattgcctccgaggtgtgcgaggactccatcaccgtgggaatggtgcgtcatcagggcaagatcatgtacgtgggcgacgtgcggagcgtgacacagaagcatatccaggagtggggccctttcgacctggtgatcggcggcagcccttgcaatgacctgagcatcgtgaacccagcccggaagggcctgtacgagggaaccggcagactgttcttcgagttttacagactgctgcacgacgcccggcctaaggaaggcgacgaccggcccttcttttggctgttcgagaatgtggtggccatgggagtcagcgacaagcgggatattagccggttcctggagagcaaccccgtgatgatcgatgccaaggaagtgagcgccgcccaccgggccagatacttctggggcaatctgcctggcatgaacagacccctggccagcaccgtgaacgacaagctggagctgcaggagtgcctggagcacggccggatcgccaagttcagcaaggtgagaaccatcaccacccgaagcaacagcatcaaacaaggcaaggaccagcactttcctgtgttcatgaacgagaaggaggacatcctgtggtgtaccgagatggagagagtgttcgggttcccagtccactacacagatgtcagcaacatgtctagactggccagacagagactgctgggaagaagctggtccgtccctgtgatcagacacctgttcgcccctctgaaggagtacttcgcctgcgtgagcagcggcaacagcaacgccaacagccggggccccagcttctctagcggcctggtgccactgtccctgagagggagccacatgggccccatggagatctacaaaaccgtgagcgcctggaagcggcagcctgtgcgcgtgctgagcctgtttcggaatatcgataaagtcctgaaaagcctgggattcctggagagcggctctggctccggcggtggcaccctgaagtacgtggaggatgtgacaaacgtggtcagacgggatgtggagaagtggggccccttcgatctggtgtacggcagcacccaacccctgggcagctcttgtgaccggtgccctggctggtacatgtttcagttccaccggatcctgcagtacgccctgccgagacaggagtcccagcggccattcttttggattttcatggacaacttgctgctgaccgaggatgaccaggaaactaccactcggttcctgcagaccgaagccgtgaccctgcaggacgtgagaggccgggactaccagaacgccatgcgggtgtggtccaacatccctggactgaaaagcaagcacgcacctctgacccctaaagaagaggagtacctgcaggcccaggtgcggagcagaagcaagctggacgcccctaaggtggatctgctggtgaagaattgcctcctgcccctgagagagtacttcaagtatttcagccagaatagtctgcccctgggcggcccaagcagcggcgcccctcctcccagcggcggcagcccagccggctccccaacctctaccgaggagggcacctctgagtccgccacccccgagagcggccctggcacctccaccgagcccagcgagggcagcgcacccggcagccctgccggcagccccacctccacagaggagggaaccagcaccgagcccagcgaaggcagcgccccaggcaccagcaccgagcctagtgagggcggctctggcggcggcagcgcccaggagattaaacggatcaacaagatcagaagaagacttgtgaaagacagcaacaccaagaaggccggcaagacaggccccatgaaaaccctgctggttagagtgatgacacccgatctgagagagcggctggaaaacctgagaaagaagcctgaaaatatcccccagcccatcagcaatacatctagagccaacctgaataagctgctgaccgattacaccgaaatgaagaaggcgatcctgcatgtgtactgggaagagttccagaaggaccctgtgggcctgatgagccgggtggcccagcctgccagcaagaagatcgatcagaacaagctgaaacctgagatggacgagaagggcaacctgaccaccgccggctttgcctgctctcagtgtggccagcccctgttcgtgtacaagctggagcaggtgtctgagaagggcaaggcttacaccaactacttcggacggtgcaatgtggccgagcacgaaaagctgatcctgctggcccagctgaagcccgagaaggatagcgacgaagccgtgacatatagcctgggaaagtttgggcagagggccctggatttctacagcattcatgtgaccaaggagtccacccaccccgtgaagcccctggcccagatcgccggaaacagatacgcctccggacctgtgggaaaggccctgagcgacgcatgtatgggcacaatcgcctccttcctgtctaagtaccaggacatcatcatcgaacaccagaaggtggtgaagggcaaccagaagagactggagagcctgcgggagctggccggcaaggaaaacctggaataccctagcgtgaccctgccacctcagcctcacaccaaggagggcgttgatgcctacaacgaagtgatcgcccgggtgcgaatgtgggtgaacctgaacctgtggcagaagctgaagctaagcagagatgatgccaagcctctgctgagactgaagggattcccttcctttcctctggtcgagagacaggccaacgaagtggactggtgggacatggtgtgtaacgtgaagaagctgatcaacgagaaaaaggaggatggcaaggtgttttggcagaatctggctggctacaagagacaggaagccctgagaccatacctgagcagcgaggaagatcggaagaagggaaagaaattcgctcggtaccagctgggcgacctgctgctgcacctggaaaagaagcacggcgaggactggggaaaggtgtacgacgaggcctgggagcggattgacaagaaagtggaaggcctgagcaagcacatcaagctggaagaggaacggagaagcgaggacgcccagagcaaggccgccctgaccgactggctgcgggctaaggccagcttcgtgatcgagggcctgaaggaggccgacaaggacgagttctgcagatgcgagctgaagctgcagaagtggtacggggacctgcggggaaagcccttcgccatcgaagccgagaacagcatcctggacatcagcggcttcagcaagcagtacaactgtgccttcatctggcagaaggacggcgtgaagaagctgaacctgtacctgatcatcaactacttcaagggcggcaagctgcggttcaagaagatcaaacctgaagccttcgaagccaacagattctacaccgtgatcaacaaaaagagcggcgagatcgtgcccatggaggtgaacttcaacttcgacgaccccaacctgatcatcctgcctctggcctttggcaagagacagggcagagaattcatctggaacgacctgctgtccctggaaaccggcagcctgaagctggccaacggaagagtgatcgagaagacactgtacaacagaagaacccggcaggatgagcctgccctgttcgtggccctgaccttcgagcggcgggaggtcctggactcctccaatatcaaaccaatgaacctgatcggcgtggcaagaggcgaaaacatccccgccgtgatcgccctgaccgaccccgagggctgcccactgagccggtttaaggatagcctgggaaacccaacccacatcctgagaatcggcgagagctataaggagaagcagcggaccatccaggccaagaaggaggtggagcagcggagagccggcggctacagccggaagtacgccagcaaagccaagaatctggcagacgatatggtgagaaacaccgctagagatctgctgtactacgccgtgacccaggatgccatgctgatcttcgccaacctgagccggggcttcggccggcagggcaagcggaccttcatggccgagagacagtacacacggatggaggactggctgaccgccaagctggcctacgagggcctgagcaagacctacctgtccaagacactggcccagtacacctccaagacatgcagcaactgtgggtttaccatcaccagcgccgactacgacagggtgctggagaagctgaagaagacagcaacaggctggatgaccacaattaacggcaaggagctgaaggtggagggccagattacctactacaacagatacaagagacagaacgtagtcaaggacctgtccgtcgagctggatagactgagcgaagaatctgtgaacaacgacatctcctcctggacaaagggcagaagcggagaagctctgagcctcctgaagaaaagattctcccatagacccgtgcaggagaagttcgtgtgcctgaactgcggcttcgagacacacgcagccgagcaagccgccctgaacatcgccagatcctggctgttcctgcggagccaggagtacaagaaataccagacaaacaagacaaccggcaacaccgataagagagccttcgtcgagacctggcagtccttttaccggaagaagcttaaggaggtgtggaaacctgccgtgcggtctggcggatctggcggaggctccacaagcccccagaagagcgtgaccttcgaggacgtggccgtgtacttcacccagaccgagtgggacggcctgagccccgcccagagggccctgtacagggacgtgatgctggagaactacggcaacgtggccagcctgggcttccccctgctgaagcccaccgtgatcagccagctggagggcggcggcgagctggagggccccagccccctgaccagcggcaccggcaccggccaccagggcctgtggaccagccccaagaaaaagagaaaagtctaagctgccttctgcggggcttgccttctggccatgcccttcttctctcccttgcacctgtacctcttggtctttgaataaagcctgagtaggaaggctagcaaaaaaaaaaaaaaaaaaaaaaaaaaaaaaaaaaaaaaaaaaaaaaaaaaaaaaaaaaaaaaaaaaaaaaaaaaaaaaaa

SEQ ID NO: 3562 - RNA, 5419 nt, synthetic construct
  source 1..5419: mol_type = other RNA
aggaaataagagagaaaagaagagtaagaagaaatataagagccaccatggcccctaagaagaagcgtaaagtgagccgggtgaacggcagcggcagcggcggcggcatgaaccacgaccaggagttcgacccccctaaggtgtaccctcccgtccccgccgagaagagaaagcccatccgggtcctgagcctgttcgatggcatcgccaccggtctgctggtgctgaaggacctgggcatccaggtggataggtacattgcctccgaggtgtgcgaggactccatcaccgtgggaatggtgcgtcatcagggcaagatcatgtacgtgggcgacgtgcggagcgtgacacagaagcatatccaggagtggggccctttcgacctggtgatcggcggcagcccttgcaatgacctgagcatcgtgaacccagcccggaagggcctgtacgagggaaccggcagactgttcttcgagttttacagactgctgcacgacgcccggcctaaggaaggcgacgaccggcccttcttttggctgttcgagaatgtggtggccatgggagtcagcgacaagcgggatattagccggttcctggagagcaaccccgtgatgatcgatgccaaggaagtgagcgccgcccaccgggccagatacttctggggcaatctgcctggcatgaacagacccctggccagcaccgtgaacgacaagctggagctgcaggagtgcctggagcacggccggatcgccaagttcagcaaggtgagaaccatcaccacccgaagcaacagcatcaaacaaggcaaggaccagcactttcctgtgttcatgaacgagaaggaggacatcctgtggtgtaccgagatggagagagtgttcgggttcccagtccactacacagatgtcagcaacatgtctagactggccagacagagactgctgggaagaagctggtccgtccctgtgatcagacacctgttcgcccctctgaaggagtacttcgcctgcgtgagcagcggcaacagcaacgccaacagccggggccccagcttctctagcggcctggtgccactgtccctgagagggagccacatgggccccatggagatctacaaaaccgtgagcgcctggaagcggcagcctgtgcgcgtgctgagcctgtttcggaatatcgataaagtcctgaaaagcctgggattcctggagagcggctctggctccggcggtggcaccctgaagtacgtggaggatgtgacaaacgtggtcagacgggatgtggagaagtggggccccttcgatctggtgtacggcagcacccaacccctgggcagctcttgtgaccggtgccctggctggtacatgtttcagttccaccggatcctgcagtacgccctgccgagacaggagtcccagcggccattcttttggattttcatggacaacttgctgctgaccgaggatgaccaggaaactaccactcggttcctgcagaccgaagccgtgaccctgcaggacgtgagaggccgggactaccagaacgccatgcgggtgtggtccaacatccctggactgaaaagcaagcacgcacctctgacccctaaagaagaggagtacctgcaggcccaggtgcggagcagaagcaagctggacgcccctaaggtggatctgctggtgaagaattgcctcctgcccctgagagagtacttcaagtatttcagccagaatagtctgcccctgggcggcccaagcagcggcgcccctcctcccagcggcggcagcccagccggctccccaacctctaccgaggagggcacctctgagtccgccacccccgagagcggccctggcacctccaccgagcccagcgagggcagcgcacccggcagccctgccggcagccccacctccacagaggagggaaccagcaccgagcccagcgaaggcagcgccccaggcaccagcaccgagcctagtgagggcggctctggcggcggcagcgcccaggagattaaacggatcaacaagatcagaagaagacttgtgaaagacagcaacaccaagaaggccggcaagacaggccccatgaaaaccctgctggttagagtgatgacacccgatctgagagagcggctggaaaacctgagaaagaagcctgaaaatatcccccagcccatcagcaatacatctagagccaacctgaataagctgctgaccgattacaccgaaatgaagaaggcgatcctgcatgtgtactgggaagagttccagaaggaccctgtgggcctgatgagccgggtggcccagcctgccagcaagaagatcgatcagaacaagctgaaacctgagatggacgagaagggcaacctgaccaccgccggctttgcctgctctcagtgtggccagcccctgttcgtgtacaagctggagcaggtgtctgagaagggcaaggcttacaccaactacttcggacggtgcaatgtggccgagcacgaaaagctgatcctgctggcccagctgaagcccgagaaggatagcgacgaagccgtgacatatagcctgggaaagtttgggcagagggccctggatttctacagcattcatgtgaccaaggagtccacccaccccgtgaagcccctggcccagatcgccggaaacagatacgcctccggacctgtgggaaaggccctgagcgacgcatgtatgggcacaatcgcctccttcctgtctaagtaccaggacatcatcatcgaacaccagaaggtggtgaagggcaaccagaagagactggagagcctgcgggagctggccggcaaggaaaacctggaataccctagcgtgaccctgccacctcagcctcacaccaaggagggcgttgatgcctacaacgaagtgatcgcccgggtgcgaatgtgggtgaacctgaacctgtggcagaagctgaagctaagcagagatgatgccaagcctctgctgagactgaagggattcccttcctttcctctggtcgagagacaggccaacgaagtggactggtgggacatggtgtgtaacgtgaagaagctgatcaacgagaaaaaggaggatggcaaggtgttttggcagaatctggctggctacaagagacaggaagccctgagaccatacctgagcagcgaggaagatcggaagaagggaaagaaattcgctcggtaccagctgggcgacctgctgctgcacctggaaaagaagcacggcgaggactggggaaaggtgtacgacgaggcctgggagcggattgacaagaaagtggaaggcctgagcaagcacatcaagctggaagaggaacggagaagcgaggacgcccagagcaaggccgccctgaccgactggctgcgggctaaggccagcttcgtgatcgagggcctgaaggaggccgacaaggacgagttctgcagatgcgagctgaagctgcagaagtggtacggggacctgcggggaaagcccttcgccatcgaagccgagaacagcatcctggacatcagcggcttcagcaagcagtacaactgtgccttcatctggcagaaggacggcgtgaagaagctgaacctgtacctgatcatcaactacttcaagggcggcaagctgcggttcaagaagatcaaacctgaagccttcgaagccaacagattctacaccgtgatcaacaaaaagagcggcgagatcgtgcccatggaggtgaacttcaacttcgacgaccccaacctgatcatcctgcctctggcctttggcaagagacagggcagagaattcatctggaacgacctgctgtccctggaaaccggcagcctgaagctggccaacggaagagtgatcgagaagacactgtacaacagaagaacccggcaggatgagcctgccctgttcgtggccctgaccttcgagcggcgggaggtcctggactcctccaatatcaaaccaatgaacctgatcggcgtggcaagaggcgaaaacatccccgccgtgatcgccctgaccgaccccgagggctgcccactgagccggtttaaggatagcctgggaaacccaacccacatcctgagaatcggcgagagctataaggagaagcagcggaccatccaggccaagaaggaggtggagcagcggagagccggcggctacagccggaagtacgccagcaaagccaagaatctggcagacgatatggtgagaaacaccgctagagatctgctgtactacgccgtgacccaggatgccatgctgatcttcgccaacctgagccggggcttcggccggcagggcaagcggaccttcatggccgagagacagtacacacggatggaggactggctgaccgccaagctggcctacgagggcctgagcaagacctacctgtccaagacactggcccagtacacctccaagacatgcagcaactgtgggtttaccatcaccagcgccgactacgacagggtgctggagaagctgaagaagacagcaacaggctggatgaccacaattaacggcaaggagctgaaggtggagggccagattacctactacaacagatacaagagacagaacgtagtcaaggacctgtccgtcgagctggatagactgagcgaagaatctgtgaacaacgacatctcctcctggacaaagggcagaagcggagaagctctgagcctcctgaagaaaagattctcccatagacccgtgcaggagaagttcgtgtgcctgaactgcggcttcgagacacacgcagccgagcaagccgccctgaacatcgccagatcctggctgttcctgcggagccaggagtacaagaaataccagacaaacaagacaaccggcaacaccgataagagagccttcgtcgagacctggcagtccttttaccggaagaagcttaaggaggtgtggaaacctgccgtgcggtctggcggatctggcggaggctccacaagcagccagatccccctgaccttccaggacgtggccgtggacttcacctgggaggagtggggcctgctggagcccagccagaaggacatgtactgggacgtgatgctggagaactacgagaacttcgtgagcctgggcggcctgcccatctgcctgcccgacgtgatcagcaggatggagaggatcgaggccccctggatggccgagggcggcgtgctggtgagcaccttcctgggcagcctgagcaccagccccaagaaaaagagaaaagtctaagctgccttctgcggggcttgccttctggccatgcccttcttctctcccttgcacctgtacctcttggtctttgaataaagcctgagtaggaaggctagcaaaaaaaaaaaaaaaaaaaaaaaaaaaaaaaaaaaaaaaaaaaaaaaaaaaaaaaaaaaaaaaaaaaaaaaaaaaaaaaa

SEQ ID NO: 3563 - RNA, 5419 nt, synthetic construct
  source 1..5419: mol_type = other RNA
aggaaataagagagaaaagaagagtaagaagaaatataagagccaccatggcccctaagaagaagcgtaaagtgagccgggtgaacggcagcggcagcggcggcggcatgaaccacgaccaggagttcgacccccctaaggtgtaccctcccgtccccgccgagaagagaaagcccatccgggtcctgagcctgttcgatggcatcgccaccggtctgctggtgctgaaggacctgggcatccaggtggataggtacattgcctccgaggtgtgcgaggactccatcaccgtgggaatggtgcgtcatcagggcaagatcatgtacgtgggcgacgtgcggagcgtgacacagaagcatatccaggagtggggccctttcgacctggtgatcggcggcagcccttgcaatgacctgagcatcgtgaacccagcccggaagggcctgtacgagggaaccggcagactgttcttcgagttttacagactgctgcacgacgcccggcctaaggaaggcgacgaccggcccttcttttggctgttcgagaatgtggtggccatgggagtcagcgacaagcgggatattagccggttcctggagagcaaccccgtgatgatcgatgccaaggaagtgagcgccgcccaccgggccagatacttctggggcaatctgcctggcatgaacagacccctggccagcaccgtgaacgacaagctggagctgcaggagtgcctggagcacggccggatcgccaagttcagcaaggtgagaaccatcaccacccgaagcaacagcatcaaacaaggcaaggaccagcactttcctgtgttcatgaacgagaaggaggacatcctgtggtgtaccgagatggagagagtgttcgggttcccagtccactacacagatgtcagcaacatgtctagactggccagacagagactgctgggaagaagctggtccgtccctgtgatcagacacctgttcgcccctctgaaggagtacttcgcctgcgtgagcagcggcaacagcaacgccaacagccggggccccagcttctctagcggcctggtgccactgtccctgagagggagccacatgggccccatggagatctacaaaaccgtgagcgcctggaagcggcagcctgtgcgcgtgctgagcctgtttcggaatatcgataaagtcctgaaaagcctgggattcctggagagcggctctggctccggcggtggcaccctgaagtacgtggaggatgtgacaaacgtggtcagacgggatgtggagaagtggggccccttcgatctggtgtacggcagcacccaacccctgggcagctcttgtgaccggtgccctggctggtacatgtttcagttccaccggatcctgcagtacgccctgccgagacaggagtcccagcggccattcttttggattttcatggacaacttgctgctgaccgaggatgaccaggaaactaccactcggttcctgcagaccgaagccgtgaccctgcaggacgtgagaggccgggactaccagaacgccatgcgggtgtggtccaacatccctggactgaaaagcaagcacgcacctctgacccctaaagaagaggagtacctgcaggcccaggtgcggagcagaagcaagctggacgcccctaaggtggatctgctggtgaagaattgcctcctgcccctgagagagtacttcaagtatttcagccagaatagtctgcccctgggcggcccaagcagcggcgcccctcctcccagcggcggcagcccagccggctccccaacctctaccgaggagggcacctctgagtccgccacccccgagagcggccctggcacctccaccgagcccagcgagggcagcgcacccggcagccctgccggcagccccacctccacagaggagggaaccagcaccgagcccagcgaaggcagcgccccaggcaccagcaccgagcctagtgagggcggctctggcggcggcagcgcccaggagattaaacggatcaacaagatcagaagaagacttgtgaaagacagcaacaccaagaaggccggcaagacaggccccatgaaaaccctgctggttagagtgatgacacccgatctgagagagcggctggaaaacctgagaaagaagcctgaaaatatcccccagcccatcagcaatacatctagagccaacctgaataagctgctgaccgattacaccgaaatgaagaaggcgatcctgcatgtgtactgggaagagttccagaaggaccctgtgggcctgatgagccgggtggcccagcctgccagcaagaagatcgatcagaacaagctgaaacctgagatggacgagaagggcaacctgaccaccgccggctttgcctgctctcagtgtggccagcccctgttcgtgtacaagctggagcaggtgtctgagaagggcaaggcttacaccaactacttcggacggtgcaatgtggccgagcacgaaaagctgatcctgctggcccagctgaagcccgagaaggatagcgacgaagccgtgacatatagcctgggaaagtttgggcagagggccctggatttctacagcattcatgtgaccaaggagtccacccaccccgtgaagcccctggcccagatcgccggaaacagatacgcctccggacctgtgggaaaggccctgagcgacgcatgtatgggcacaatcgcctccttcctgtctaagtaccaggacatcatcatcgaacaccagaaggtggtgaagggcaaccagaagagactggagagcctgcgggagctggccggcaaggaaaacctggaataccctagcgtgaccctgccacctcagcctcacaccaaggagggcgttgatgcctacaacgaagtgatcgcccgggtgcgaatgtgggtgaacctgaacctgtggcagaagctgaagctaagcagagatgatgccaagcctctgctgagactgaagggattcccttcctttcctctggtcgagagacaggccaacgaagtggactggtgggacatggtgtgtaacgtgaagaagctgatcaacgagaaaaaggaggatggcaaggtgttttggcagaatctggctggctacaagagacaggaagccctgagaccatacctgagcagcgaggaagatcggaagaagggaaagaaattcgctcggtaccagctgggcgacctgctgctgcacctggaaaagaagcacggcgaggactggggaaaggtgtacgacgaggcctgggagcggattgacaagaaagtggaaggcctgagcaagcacatcaagctggaagaggaacggagaagcgaggacgcccagagcaaggccgccctgaccgactggctgcgggctaaggccagcttcgtgatcgagggcctgaaggaggccgacaaggacgagttctgcagatgcgagctgaagctgcagaagtggtacggggacctgcggggaaagcccttcgccatcgaagccgagaacagcatcctggacatcagcggcttcagcaagcagtacaactgtgccttcatctggcagaaggacggcgtgaagaagctgaacctgtacctgatcatcaactacttcaagggcggcaagctgcggttcaagaagatcaaacctgaagccttcgaagccaacagattctacaccgtgatcaacaaaaagagcggcgagatcgtgcccatggaggtgaacttcaacttcgacgaccccaacctgatcatcctgcctctggcctttggcaagagacagggcagagaattcatctggaacgacctgctgtccctggaaaccggcagcctgaagctggccaacggaagagtgatcgagaagacactgtacaacagaagaacccggcaggatgagcctgccctgttcgtggccctgaccttcgagcggcgggaggtcctggactcctccaatatcaaaccaatgaacctgatcggcgtggcaagaggcgaaaacatccccgccgtgatcgccctgaccgaccccgagggctgcccactgagccggtttaaggatagcctgggaaacccaacccacatcctgagaatcggcgagagctataaggagaagcagcggaccatccaggccaagaaggaggtggagcagcggagagccggcggctacagccggaagtacgccagcaaagccaagaatctggcagacgatatggtgagaaacaccgctagagatctgctgtactacgccgtgacccaggatgccatgctgatcttcgccaacctgagccggggcttcggccggcagggcaagcggaccttcatggccgagagacagtacacacggatggaggactggctgaccgccaagctggcctacgagggcctgagcaagacctacctgtccaagacactggcccagtacacctccaagacatgcagcaactgtgggtttaccatcaccagcgccgactacgacagggtgctggagaagctgaagaagacagcaacaggctggatgaccacaattaacggcaaggagctgaaggtggagggccagattacctactacaacagatacaagagacagaacgtagtcaaggacctgtccgtcgagctggatagactgagcgaagaatctgtgaacaacgacatctcctcctggacaaagggcagaagcggagaagctctgagcctcctgaagaaaagattctcccatagacccgtgcaggagaagttcgtgtgcctgaactgcggcttcgagacacacgcagccgagcaagccgccctgaacatcgccagatcctggctgttcctgcggagccaggagtacaagaaataccagacaaacaagacaaccggcaacaccgataagagagccttcgtcgagacctggcagtccttttaccggaagaagcttaaggaggtgtggaaacctgccgtgcggtctggcggatctggcggaggctccacaagctgccaggagctggtgaccttcgaggacgtggccgtgtacttcagcctggaggagtgggagaggctggaggccgaccagaggggcctgtaccaggaggtgatgcaggagaactacggcatcctggtgagcctgggctaccccatccccaagcccgacctgatcttcaggctggagcagggcgaggagccctgggtgcccgacagccccaggcccgaggagggcgacatcgtgaccggcgtgtacaccagccccaagaaaaagagaaaagtctaagctgccttctgcggggcttgccttctggccatgcccttcttctctcccttgcacctgtacctcttggtctttgaataaagcctgagtaggaaggctagcaaaaaaaaaaaaaaaaaaaaaaaaaaaaaaaaaaaaaaaaaaaaaaaaaaaaaaaaaaaaaaaaaaaaaaaaaaaaaaaa

SEQ ID NO: 3564 - RNA, 5419 nt, synthetic construct
  source 1..5419: mol_type = other RNA
aggaaataagagagaaaagaagagtaagaagaaatataagagccaccatggcccctaagaagaagcgtaaagtgagccgggtgaacggcagcggcagcggcggcggcatgaaccacgaccaggagttcgacccccctaaggtgtaccctcccgtccccgccgagaagagaaagcccatccgggtcctgagcctgttcgatggcatcgccaccggtctgctggtgctgaaggacctgggcatccaggtggataggtacattgcctccgaggtgtgcgaggactccatcaccgtgggaatggtgcgtcatcagggcaagatcatgtacgtgggcgacgtgcggagcgtgacacagaagcatatccaggagtggggccctttcgacctggtgatcggcggcagcccttgcaatgacctgagcatcgtgaacccagcccggaagggcctgtacgagggaaccggcagactgttcttcgagttttacagactgctgcacgacgcccggcctaaggaaggcgacgaccggcccttcttttggctgttcgagaatgtggtggccatgggagtcagcgacaagcgggatattagccggttcctggagagcaaccccgtgatgatcgatgccaaggaagtgagcgccgcccaccgggccagatacttctggggcaatctgcctggcatgaacagacccctggccagcaccgtgaacgacaagctggagctgcaggagtgcctggagcacggccggatcgccaagttcagcaaggtgagaaccatcaccacccgaagcaacagcatcaaacaaggcaaggaccagcactttcctgtgttcatgaacgagaaggaggacatcctgtggtgtaccgagatggagagagtgttcgggttcccagtccactacacagatgtcagcaacatgtctagactggccagacagagactgctgggaagaagctggtccgtccctgtgatcagacacctgttcgcccctctgaaggagtacttcgcctgcgtgagcagcggcaacagcaacgccaacagccggggccccagcttctctagcggcctggtgccactgtccctgagagggagccacatgggccccatggagatctacaaaaccgtgagcgcctggaagcggcagcctgtgcgcgtgctgagcctgtttcggaatatcgataaagtcctgaaaagcctgggattcctggagagcggctctggctccggcggtggcaccctgaagtacgtggaggatgtgacaaacgtggtcagacgggatgtggagaagtggggccccttcgatctggtgtacggcagcacccaacccctgggcagctcttgtgaccggtgccctggctggtacatgtttcagttccaccggatcctgcagtacgccctgccgagacaggagtcccagcggccattcttttggattttcatggacaacttgctgctgaccgaggatgaccaggaaactaccactcggttcctgcagaccgaagccgtgaccctgcaggacgtgagaggccgggactaccagaacgccatgcgggtgtggtccaacatccctggactgaaaagcaagcacgcacctctgacccctaaagaagaggagtacctgcaggcccaggtgcggagcagaagcaagctggacgcccctaaggtggatctgctggtgaagaattgcctcctgcccctgagagagtacttcaagtatttcagccagaatagtctgcccctgggcggcccaagcagcggcgcccctcctcccagcggcggcagcccagccggctccccaacctctaccgaggagggcacctctgagtccgccacccccgagagcggccctggcacctccaccgagcccagcgagggcagcgcacccggcagccctgccggcagccccacctccacagaggagggaaccagcaccgagcccagcgaaggcagcgccccaggcaccagcaccgagcctagtgagggcggctctggcggcggcagcgcccaggagattaaacggatcaacaagatcagaagaagacttgtgaaagacagcaacaccaagaaggccggcaagacaggccccatgaaaaccctgctggttagagtgatgacacccgatctgagagagcggctggaaaacctgagaaagaagcctgaaaatatcccccagcccatcagcaatacatctagagccaacctgaataagctgctgaccgattacaccgaaatgaagaaggcgatcctgcatgtgtactgggaagagttccagaaggaccctgtgggcctgatgagccgggtggcccagcctgccagcaagaagatcgatcagaacaagctgaaacctgagatggacgagaagggcaacctgaccaccgccggctttgcctgctctcagtgtggccagcccctgttcgtgtacaagctggagcaggtgtctgagaagggcaaggcttacaccaactacttcggacggtgcaatgtggccgagcacgaaaagctgatcctgctggcccagctgaagcccgagaaggatagcgacgaagccgtgacatatagcctgggaaagtttgggcagagggccctggatttctacagcattcatgtgaccaaggagtccacccaccccgtgaagcccctggcccagatcgccggaaacagatacgcctccggacctgtgggaaaggccctgagcgacgcatgtatgggcacaatcgcctccttcctgtctaagtaccaggacatcatcatcgaacaccagaaggtggtgaagggcaaccagaagagactggagagcctgcgggagctggccggcaaggaaaacctggaataccctagcgtgaccctgccacctcagcctcacaccaaggagggcgttgatgcctacaacgaagtgatcgcccgggtgcgaatgtgggtgaacctgaacctgtggcagaagctgaagctaagcagagatgatgccaagcctctgctgagactgaagggattcccttcctttcctctggtcgagagacaggccaacgaagtggactggtgggacatggtgtgtaacgtgaagaagctgatcaacgagaaaaaggaggatggcaaggtgttttggcagaatctggctggctacaagagacaggaagccctgagaccatacctgagcagcgaggaagatcggaagaagggaaagaaattcgctcggtaccagctgggcgacctgctgctgcacctggaaaagaagcacggcgaggactggggaaaggtgtacgacgaggcctgggagcggattgacaagaaagtggaaggcctgagcaagcacatcaagctggaagaggaacggagaagcgaggacgcccagagcaaggccgccctgaccgactggctgcgggctaaggccagcttcgtgatcgagggcctgaaggaggccgacaaggacgagttctgcagatgcgagctgaagctgcagaagtggtacggggacctgcggggaaagcccttcgccatcgaagccgagaacagcatcctggacatcagcggcttcagcaagcagtacaactgtgccttcatctggcagaaggacggcgtgaagaagctgaacctgtacctgatcatcaactacttcaagggcggcaagctgcggttcaagaagatcaaacctgaagccttcgaagccaacagattctacaccgtgatcaacaaaaagagcggcgagatcgtgcccatggaggtgaacttcaacttcgacgaccccaacctgatcatcctgcctctggcctttggcaagagacagggcagagaattcatctggaacgacctgctgtccctggaaaccggcagcctgaagctggccaacggaagagtgatcgagaagacactgtacaacagaagaacccggcaggatgagcctgccctgttcgtggccctgaccttcgagcggcgggaggtcctggactcctccaatatcaaaccaatgaacctgatcggcgtggcaagaggcgaaaacatccccgccgtgatcgccctgaccgaccccgagggctgcccactgagccggtttaaggatagcctgggaaacccaacccacatcctgagaatcggcgagagctataaggagaagcagcggaccatccaggccaagaaggaggtggagcagcggagagccggcggctacagccggaagtacgccagcaaagccaagaatctggcagacgatatggtgagaaacaccgctagagatctgctgtactacgccgtgacccaggatgccatgctgatcttcgccaacctgagccggggcttcggccggcagggcaagcggaccttcatggccgagagacagtacacacggatggaggactggctgaccgccaagctggcctacgagggcctgagcaagacctacctgtccaagacactggcccagtacacctccaagacatgcagcaactgtgggtttaccatcaccagcgccgactacgacagggtgctggagaagctgaagaagacagcaacaggctggatgaccacaattaacggcaaggagctgaaggtggagggccagattacctactacaacagatacaagagacagaacgtagtcaaggacctgtccgtcgagctggatagactgagcgaagaatctgtgaacaacgacatctcctcctggacaaagggcagaagcggagaagctctgagcctcctgaagaaaagattctcccatagacccgtgcaggagaagttcgtgtgcctgaactgcggcttcgagacacacgcagccgagcaagccgccctgaacatcgccagatcctggctgttcctgcggagccaggagtacaagaaataccagacaaacaagacaaccggcaacaccgataagagagccttcgtcgagacctggcagtccttttaccggaagaagcttaaggaggtgtggaaacctgccgtgcggtctggcggatctggcggaggctccacaagcatgagccagggcctggtgaccttcagggacgtggccatcgacttcagccaggaggagtggaagtggctgcagcccgcccagagggacctgtacaggtgcgtgatgctggagaactacggccacctggtgagcctgggcctgagcatcagcaagcccgacgtggtgagcctgctggagcagggcaaggagccctggctgggcaagagggaggtgaagagggacctgttcagcgtgagcgagagcaccagccccaagaaaaagagaaaagtctaagctgccttctgcggggcttgccttctggccatgcccttcttctctcccttgcacctgtacctcttggtctttgaataaagcctgagtaggaaggctagcaaaaaaaaaaaaaaaaaaaaaaaaaaaaaaaaaaaaaaaaaaaaaaaaaaaaaaaaaaaaaaaaaaaaaaaaaaaaaaaa

SEQ ID NO: 3565 - RNA, 5419 nt, synthetic construct
  source 1..5419: mol_type = other RNA
aggaaataagagagaaaagaagagtaagaagaaatataagagccaccatggcccctaagaagaagcgtaaagtgagccgggtgaacggcagcggcagcggcggcggcatgaaccacgaccaggagttcgacccccctaaggtgtaccctcccgtccccgccgagaagagaaagcccatccgggtcctgagcctgttcgatggcatcgccaccggtctgctggtgctgaaggacctgggcatccaggtggataggtacattgcctccgaggtgtgcgaggactccatcaccgtgggaatggtgcgtcatcagggcaagatcatgtacgtgggcgacgtgcggagcgtgacacagaagcatatccaggagtggggccctttcgacctggtgatcggcggcagcccttgcaatgacctgagcatcgtgaacccagcccggaagggcctgtacgagggaaccggcagactgttcttcgagttttacagactgctgcacgacgcccggcctaaggaaggcgacgaccggcccttcttttggctgttcgagaatgtggtggccatgggagtcagcgacaagcgggatattagccggttcctggagagcaaccccgtgatgatcgatgccaaggaagtgagcgccgcccaccgggccagatacttctggggcaatctgcctggcatgaacagacccctggccagcaccgtgaacgacaagctggagctgcaggagtgcctggagcacggccggatcgccaagttcagcaaggtgagaaccatcaccacccgaagcaacagcatcaaacaaggcaaggaccagcactttcctgtgttcatgaacgagaaggaggacatcctgtggtgtaccgagatggagagagtgttcgggttcccagtccactacacagatgtcagcaacatgtctagactggccagacagagactgctgggaagaagctggtccgtccctgtgatcagacacctgttcgcccctctgaaggagtacttcgcctgcgtgagcagcggcaacagcaacgccaacagccggggccccagcttctctagcggcctggtgccactgtccctgagagggagccacatgggccccatggagatctacaaaaccgtgagcgcctggaagcggcagcctgtgcgcgtgctgagcctgtttcggaatatcgataaagtcctgaaaagcctgggattcctggagagcggctctggctccggcggtggcaccctgaagtacgtggaggatgtgacaaacgtggtcagacgggatgtggagaagtggggccccttcgatctggtgtacggcagcacccaacccctgggcagctcttgtgaccggtgccctggctggtacatgtttcagttccaccggatcctgcagtacgccctgccgagacaggagtcccagcggccattcttttggattttcatggacaacttgctgctgaccgaggatgaccaggaaactaccactcggttcctgcagaccgaagccgtgaccctgcaggacgtgagaggccgggactaccagaacgccatgcgggtgtggtccaacatccctggactgaaaagcaagcacgcacctctgacccctaaagaagaggagtacctgcaggcccaggtgcggagcagaagcaagctggacgcccctaaggtggatctgctggtgaagaattgcctcctgcccctgagagagtacttcaagtatttcagccagaatagtctgcccctgggcggcccaagcagcggcgcccctcctcccagcggcggcagcccagccggctccccaacctctaccgaggagggcacctctgagtccgccacccccgagagcggccctggcacctccaccgagcccagcgagggcagcgcacccggcagccctgccggcagccccacctccacagaggagggaaccagcaccgagcccagcgaaggcagcgccccaggcaccagcaccgagcctagtgagggcggctctggcggcggcagcgcccaggagattaaacggatcaacaagatcagaagaagacttgtgaaagacagcaacaccaagaaggccggcaagacaggccccatgaaaaccctgctggttagagtgatgacacccgatctgagagagcggctggaaaacctgagaaagaagcctgaaaatatcccccagcccatcagcaatacatctagagccaacctgaataagctgctgaccgattacaccgaaatgaagaaggcgatcctgcatgtgtactgggaagagttccagaaggaccctgtgggcctgatgagccgggtggcccagcctgccagcaagaagatcgatcagaacaagctgaaacctgagatggacgagaagggcaacctgaccaccgccggctttgcctgctctcagtgtggccagcccctgttcgtgtacaagctggagcaggtgtctgagaagggcaaggcttacaccaactacttcggacggtgcaatgtggccgagcacgaaaagctgatcctgctggcccagctgaagcccgagaaggatagcgacgaagccgtgacatatagcctgggaaagtttgggcagagggccctggatttctacagcattcatgtgaccaaggagtccacccaccccgtgaagcccctggcccagatcgccggaaacagatacgcctccggacctgtgggaaaggccctgagcgacgcatgtatgggcacaatcgcctccttcctgtctaagtaccaggacatcatcatcgaacaccagaaggtggtgaagggcaaccagaagagactggagagcctgcgggagctggccggcaaggaaaacctggaataccctagcgtgaccctgccacctcagcctcacaccaaggagggcgttgatgcctacaacgaagtgatcgcccgggtgcgaatgtgggtgaacctgaacctgtggcagaagctgaagctaagcagagatgatgccaagcctctgctgagactgaagggattcccttcctttcctctggtcgagagacaggccaacgaagtggactggtgggacatggtgtgtaacgtgaagaagctgatcaacgagaaaaaggaggatggcaaggtgttttggcagaatctggctggctacaagagacaggaagccctgagaccatacctgagcagcgaggaagatcggaagaagggaaagaaattcgctcggtaccagctgggcgacctgctgctgcacctggaaaagaagcacggcgaggactggggaaaggtgtacgacgaggcctgggagcggattgacaagaaagtggaaggcctgagcaagcacatcaagctggaagaggaacggagaagcgaggacgcccagagcaaggccgccctgaccgactggctgcgggctaaggccagcttcgtgatcgagggcctgaaggaggccgacaaggacgagttctgcagatgcgagctgaagctgcagaagtggtacggggacctgcggggaaagcccttcgccatcgaagccgagaacagcatcctggacatcagcggcttcagcaagcagtacaactgtgccttcatctggcagaaggacggcgtgaagaagctgaacctgtacctgatcatcaactacttcaagggcggcaagctgcggttcaagaagatcaaacctgaagccttcgaagccaacagattctacaccgtgatcaacaaaaagagcggcgagatcgtgcccatggaggtgaacttcaacttcgacgaccccaacctgatcatcctgcctctggcctttggcaagagacagggcagagaattcatctggaacgacctgctgtccctggaaaccggcagcctgaagctggccaacggaagagtgatcgagaagacactgtacaacagaagaacccggcaggatgagcctgccctgttcgtggccctgaccttcgagcggcgggaggtcctggactcctccaatatcaaaccaatgaacctgatcggcgtggcaagaggcgaaaacatccccgccgtgatcgccctgaccgaccccgagggctgcccactgagccggtttaaggatagcctgggaaacccaacccacatcctgagaatcggcgagagctataaggagaagcagcggaccatccaggccaagaaggaggtggagcagcggagagccggcggctacagccggaagtacgccagcaaagccaagaatctggcagacgatatggtgagaaacaccgctagagatctgctgtactacgccgtgacccaggatgccatgctgatcttcgccaacctgagccggggcttcggccggcagggcaagcggaccttcatggccgagagacagtacacacggatggaggactggctgaccgccaagctggcctacgagggcctgagcaagacctacctgtccaagacactggcccagtacacctccaagacatgcagcaactgtgggtttaccatcaccagcgccgactacgacagggtgctggagaagctgaagaagacagcaacaggctggatgaccacaattaacggcaaggagctgaaggtggagggccagattacctactacaacagatacaagagacagaacgtagtcaaggacctgtccgtcgagctggatagactgagcgaagaatctgtgaacaacgacatctcctcctggacaaagggcagaagcggagaagctctgagcctcctgaagaaaagattctcccatagacccgtgcaggagaagttcgtgtgcctgaactgcggcttcgagacacacgcagccgagcaagccgccctgaacatcgccagatcctggctgttcctgcggagccaggagtacaagaaataccagacaaacaagacaaccggcaacaccgataagagagccttcgtcgagacctggcagtccttttaccggaagaagcttaaggaggtgtggaaacctgccgtgcggtctggcggatctggcggaggctccacaagcagccaggagcccgtgaccttcgccgacgtggccgtggtgttcacccccgaggagtgggtgttcctggacagcacccagaggagcctgtacagggacgtgatgctggagaactacaggaacctggccagcgtggccgaccagctgtgcaagcccaacgccctgagctacctggaggagaggggcgagcagtggaccaccgacaggggcatcctgagcgacacctgcgccgagccccagtgccagaccagccccaagaaaaagagaaaagtctaagctgccttctgcggggcttgccttctggccatgcccttcttctctcccttgcacctgtacctcttggtctttgaataaagcctgagtaggaaggctagcaaaaaaaaaaaaaaaaaaaaaaaaaaaaaaaaaaaaaaaaaaaaaaaaaaaaaaaaaaaaaaaaaaaaaaaaaaaaaaaa

SEQ ID NO: 3566 - RNA, 5443 nt, synthetic construct
  source 1..5443: mol_type = other RNA
aggaaataagagagaaaagaagagtaagaagaaatataagagccaccatggcccctaagaagaagcgtaaagtgagccgggtgaacggcagcggcagcggcggcggcatgaaccacgaccaggagttcgacccccctaaggtgtaccctcccgtccccgccgagaagagaaagcccatccgggtcctgagcctgttcgatggcatcgccaccggtctgctggtgctgaaggacctgggcatccaggtggataggtacattgcctccgaggtgtgcgaggactccatcaccgtgggaatggtgcgtcatcagggcaagatcatgtacgtgggcgacgtgcggagcgtgacacagaagcatatccaggagtggggccctttcgacctggtgatcggcggcagcccttgcaatgacctgagcatcgtgaacccagcccggaagggcctgtacgagggaaccggcagactgttcttcgagttttacagactgctgcacgacgcccggcctaaggaaggcgacgaccggcccttcttttggctgttcgagaatgtggtggccatgggagtcagcgacaagcgggatattagccggttcctggagagcaaccccgtgatgatcgatgccaaggaagtgagcgccgcccaccgggccagatacttctggggcaatctgcctggcatgaacagacccctggccagcaccgtgaacgacaagctggagctgcaggagtgcctggagcacggccggatcgccaagttcagcaaggtgagaaccatcaccacccgaagcaacagcatcaaacaaggcaaggaccagcactttcctgtgttcatgaacgagaaggaggacatcctgtggtgtaccgagatggagagagtgttcgggttcccagtccactacacagatgtcagcaacatgtctagactggccagacagagactgctgggaagaagctggtccgtccctgtgatcagacacctgttcgcccctctgaaggagtacttcgcctgcgtgagcagcggcaacagcaacgccaacagccggggccccagcttctctagcggcctggtgccactgtccctgagagggagccacatgggccccatggagatctacaaaaccgtgagcgcctggaagcggcagcctgtgcgcgtgctgagcctgtttcggaatatcgataaagtcctgaaaagcctgggattcctggagagcggctctggctccggcggtggcaccctgaagtacgtggaggatgtgacaaacgtggtcagacgggatgtggagaagtggggccccttcgatctggtgtacggcagcacccaacccctgggcagctcttgtgaccggtgccctggctggtacatgtttcagttccaccggatcctgcagtacgccctgccgagacaggagtcccagcggccattcttttggattttcatggacaacttgctgctgaccgaggatgaccaggaaactaccactcggttcctgcagaccgaagccgtgaccctgcaggacgtgagaggccgggactaccagaacgccatgcgggtgtggtccaacatccctggactgaaaagcaagcacgcacctctgacccctaaagaagaggagtacctgcaggcccaggtgcggagcagaagcaagctggacgcccctaaggtggatctgctggtgaagaattgcctcctgcccctgagagagtacttcaagtatttcagccagaatagtctgcccctgggcggcccaagcagcggcgcccctcctcccagcggcggcagcccagccggctccccaacctctaccgaggagggcacctctgagtccgccacccccgagagcggccctggcacctccaccgagcccagcgagggcagcgcacccggcagccctgccggcagccccacctccacagaggagggaaccagcaccgagcccagcgaaggcagcgccccaggcaccagcaccgagcctagtgagggcggctctggcggcggcagcgcccaggagattaaacggatcaacaagatcagaagaagacttgtgaaagacagcaacaccaagaaggccggcaagacaggccccatgaaaaccctgctggttagagtgatgacacccgatctgagagagcggctggaaaacctgagaaagaagcctgaaaatatcccccagcccatcagcaatacatctagagccaacctgaataagctgctgaccgattacaccgaaatgaagaaggcgatcctgcatgtgtactgggaagagttccagaaggaccctgtgggcctgatgagccgggtggcccagcctgccagcaagaagatcgatcagaacaagctgaaacctgagatggacgagaagggcaacctgaccaccgccggctttgcctgctctcagtgtggccagcccctgttcgtgtacaagctggagcaggtgtctgagaagggcaaggcttacaccaactacttcggacggtgcaatgtggccgagcacgaaaagctgatcctgctggcccagctgaagcccgagaaggatagcgacgaagccgtgacatatagcctgggaaagtttgggcagagggccctggatttctacagcattcatgtgaccaaggagtccacccaccccgtgaagcccctggcccagatcgccggaaacagatacgcctccggacctgtgggaaaggccctgagcgacgcatgtatgggcacaatcgcctccttcctgtctaagtaccaggacatcatcatcgaacaccagaaggtggtgaagggcaaccagaagagactggagagcctgcgggagctggccggcaaggaaaacctggaataccctagcgtgaccctgccacctcagcctcacaccaaggagggcgttgatgcctacaacgaagtgatcgcccgggtgcgaatgtgggtgaacctgaacctgtggcagaagctgaagctaagcagagatgatgccaagcctctgctgagactgaagggattcccttcctttcctctggtcgagagacaggccaacgaagtggactggtgggacatggtgtgtaacgtgaagaagctgatcaacgagaaaaaggaggatggcaaggtgttttggcagaatctggctggctacaagagacaggaagccctgagaccatacctgagcagcgaggaagatcggaagaagggaaagaaattcgctcggtaccagctgggcgacctgctgctgcacctggaaaagaagcacggcgaggactggggaaaggtgtacgacgaggcctgggagcggattgacaagaaagtggaaggcctgagcaagcacatcaagctggaagaggaacggagaagcgaggacgcccagagcaaggccgccctgaccgactggctgcgggctaaggccagcttcgtgatcgagggcctgaaggaggccgacaaggacgagttctgcagatgcgagctgaagctgcagaagtggtacggggacctgcggggaaagcccttcgccatcgaagccgagaacagcatcctggacatcagcggcttcagcaagcagtacaactgtgccttcatctggcagaaggacggcgtgaagaagctgaacctgtacctgatcatcaactacttcaagggcggcaagctgcggttcaagaagatcaaacctgaagccttcgaagccaacagattctacaccgtgatcaacaaaaagagcggcgagatcgtgcccatggaggtgaacttcaacttcgacgaccccaacctgatcatcctgcctctggcctttggcaagagacagggcagagaattcatctggaacgacctgctgtccctggaaaccggcagcctgaagctggccaacggaagagtgatcgagaagacactgtacaacagaagaacccggcaggatgagcctgccctgttcgtggccctgaccttcgagcggcgggaggtcctggactcctccaatatcaaaccaatgaacctgatcggcgtggcaagaggcgaaaacatccccgccgtgatcgccctgaccgaccccgagggctgcccactgagccggtttaaggatagcctgggaaacccaacccacatcctgagaatcggcgagagctataaggagaagcagcggaccatccaggccaagaaggaggtggagcagcggagagccggcggctacagccggaagtacgccagcaaagccaagaatctggcagacgatatggtgagaaacaccgctagagatctgctgtactacgccgtgacccaggatgccatgctgatcttcgccaacctgagccggggcttcggccggcagggcaagcggaccttcatggccgagagacagtacacacggatggaggactggctgaccgccaagctggcctacgagggcctgagcaagacctacctgtccaagacactggcccagtacacctccaagacatgcagcaactgtgggtttaccatcaccagcgccgactacgacagggtgctggagaagctgaagaagacagcaacaggctggatgaccacaattaacggcaaggagctgaaggtggagggccagattacctactacaacagatacaagagacagaacgtagtcaaggacctgtccgtcgagctggatagactgagcgaagaatctgtgaacaacgacatctcctcctggacaaagggcagaagcggagaagctctgagcctcctgaagaaaagattctcccatagacccgtgcaggagaagttcgtgtgcctgaactgcggcttcgagacacacgcagccgagcaagccgccctgaacatcgccagatcctggctgttcctgcggagccaggagtacaagaaataccagacaaacaagacaaccggcaacaccgataagagagccttcgtcgagacctggcagtccttttaccggaagaagcttaaggaggtgtggaaacctgccgtgcggtctggcggatctggcggaggctccacaagcgtggtgttcgaggacgtggccgtgaacttcaccctggaggagtgggccctgctggacagcagccagaaggagctgtacagggacgtgatgctggagaccttcaggaacctggccagcgtggacggcgagacccagtacaaggccaacggcagcgtgagccagcaggacatctacaggaacaagatcagcaaggagcacaagatcagcaagttcaccggcaacgacagctggcccttcgtgctgggcaagatctgggaggagctgagcaccagccccaagaaaaagagaaaagtctaagctgccttctgcggggcttgccttctggccatgcccttcttctctcccttgcacctgtacctcttggtctttgaataaagcctgagtaggaaggctagcaaaaaaaaaaaaaaaaaaaaaaaaaaaaaaaaaaaaaaaaaaaaaaaaaaaaaaaaaaaaaaaaaaaaaaaaaaaaaaaa

SEQ ID NO: 3567 - RNA, 5419 nt, synthetic construct
  source 1..5419: mol_type = other RNA
aggaaataagagagaaaagaagagtaagaagaaatataagagccaccatggcccctaagaagaagcgtaaagtgagccgggtgaacggcagcggcagcggcggcggcatgaaccacgaccaggagttcgacccccctaaggtgtaccctcccgtccccgccgagaagagaaagcccatccgggtcctgagcctgttcgatggcatcgccaccggtctgctggtgctgaaggacctgggcatccaggtggataggtacattgcctccgaggtgtgcgaggactccatcaccgtgggaatggtgcgtcatcagggcaagatcatgtacgtgggcgacgtgcggagcgtgacacagaagcatatccaggagtggggccctttcgacctggtgatcggcggcagcccttgcaatgacctgagcatcgtgaacccagcccggaagggcctgtacgagggaaccggcagactgttcttcgagttttacagactgctgcacgacgcccggcctaaggaaggcgacgaccggcccttcttttggctgttcgagaatgtggtggccatgggagtcagcgacaagcgggatattagccggttcctggagagcaaccccgtgatgatcgatgccaaggaagtgagcgccgcccaccgggccagatacttctggggcaatctgcctggcatgaacagacccctggccagcaccgtgaacgacaagctggagctgcaggagtgcctggagcacggccggatcgccaagttcagcaaggtgagaaccatcaccacccgaagcaacagcatcaaacaaggcaaggaccagcactttcctgtgttcatgaacgagaaggaggacatcctgtggtgtaccgagatggagagagtgttcgggttcccagtccactacacagatgtcagcaacatgtctagactggccagacagagactgctgggaagaagctggtccgtccctgtgatcagacacctgttcgcccctctgaaggagtacttcgcctgcgtgagcagcggcaacagcaacgccaacagccggggccccagcttctctagcggcctggtgccactgtccctgagagggagccacatgggccccatggagatctacaaaaccgtgagcgcctggaagcggcagcctgtgcgcgtgctgagcctgtttcggaatatcgataaagtcctgaaaagcctgggattcctggagagcggctctggctccggcggtggcaccctgaagtacgtggaggatgtgacaaacgtggtcagacgggatgtggagaagtggggccccttcgatctggtgtacggcagcacccaacccctgggcagctcttgtgaccggtgccctggctggtacatgtttcagttccaccggatcctgcagtacgccctgccgagacaggagtcccagcggccattcttttggattttcatggacaacttgctgctgaccgaggatgaccaggaaactaccactcggttcctgcagaccgaagccgtgaccctgcaggacgtgagaggccgggactaccagaacgccatgcgggtgtggtccaacatccctggactgaaaagcaagcacgcacctctgacccctaaagaagaggagtacctgcaggcccaggtgcggagcagaagcaagctggacgcccctaaggtggatctgctggtgaagaattgcctcctgcccctgagagagtacttcaagtatttcagccagaatagtctgcccctgggcggcccaagcagcggcgcccctcctcccagcggcggcagcccagccggctccccaacctctaccgaggagggcacctctgagtccgccacccccgagagcggccctggcacctccaccgagcccagcgagggcagcgcacccggcagccctgccggcagccccacctccacagaggagggaaccagcaccgagcccagcgaaggcagcgccccaggcaccagcaccgagcctagtgagggcggctctggcggcggcagcgcccaggagattaaacggatcaacaagatcagaagaagacttgtgaaagacagcaacaccaagaaggccggcaagacaggccccatgaaaaccctgctggttagagtgatgacacccgatctgagagagcggctggaaaacctgagaaagaagcctgaaaatatcccccagcccatcagcaatacatctagagccaacctgaataagctgctgaccgattacaccgaaatgaagaaggcgatcctgcatgtgtactgggaagagttccagaaggaccctgtgggcctgatgagccgggtggcccagcctgccagcaagaagatcgatcagaacaagctgaaacctgagatggacgagaagggcaacctgaccaccgccggctttgcctgctctcagtgtggccagcccctgttcgtgtacaagctggagcaggtgtctgagaagggcaaggcttacaccaactacttcggacggtgcaatgtggccgagcacgaaaagctgatcctgctggcccagctgaagcccgagaaggatagcgacgaagccgtgacatatagcctgggaaagtttgggcagagggccctggatttctacagcattcatgtgaccaaggagtccacccaccccgtgaagcccctggcccagatcgccggaaacagatacgcctccggacctgtgggaaaggccctgagcgacgcatgtatgggcacaatcgcctccttcctgtctaagtaccaggacatcatcatcgaacaccagaaggtggtgaagggcaaccagaagagactggagagcctgcgggagctggccggcaaggaaaacctggaataccctagcgtgaccctgccacctcagcctcacaccaaggagggcgttgatgcctacaacgaagtgatcgcccgggtgcgaatgtgggtgaacctgaacctgtggcagaagctgaagctaagcagagatgatgccaagcctctgctgagactgaagggattcccttcctttcctctggtcgagagacaggccaacgaagtggactggtgggacatggtgtgtaacgtgaagaagctgatcaacgagaaaaaggaggatggcaaggtgttttggcagaatctggctggctacaagagacaggaagccctgagaccatacctgagcagcgaggaagatcggaagaagggaaagaaattcgctcggtaccagctgggcgacctgctgctgcacctggaaaagaagcacggcgaggactggggaaaggtgtacgacgaggcctgggagcggattgacaagaaagtggaaggcctgagcaagcacatcaagctggaagaggaacggagaagcgaggacgcccagagcaaggccgccctgaccgactggctgcgggctaaggccagcttcgtgatcgagggcctgaaggaggccgacaaggacgagttctgcagatgcgagctgaagctgcagaagtggtacggggacctgcggggaaagcccttcgccatcgaagccgagaacagcatcctggacatcagcggcttcagcaagcagtacaactgtgccttcatctggcagaaggacggcgtgaagaagctgaacctgtacctgatcatcaactacttcaagggcggcaagctgcggttcaagaagatcaaacctgaagccttcgaagccaacagattctacaccgtgatcaacaaaaagagcggcgagatcgtgcccatggaggtgaacttcaacttcgacgaccccaacctgatcatcctgcctctggcctttggcaagagacagggcagagaattcatctggaacgacctgctgtccctggaaaccggcagcctgaagctggccaacggaagagtgatcgagaagacactgtacaacagaagaacccggcaggatgagcctgccctgttcgtggccctgaccttcgagcggcgggaggtcctggactcctccaatatcaaaccaatgaacctgatcggcgtggcaagaggcgaaaacatccccgccgtgatcgccctgaccgaccccgagggctgcccactgagccggtttaaggatagcctgggaaacccaacccacatcctgagaatcggcgagagctataaggagaagcagcggaccatccaggccaagaaggaggtggagcagcggagagccggcggctacagccggaagtacgccagcaaagccaagaatctggcagacgatatggtgagaaacaccgctagagatctgctgtactacgccgtgacccaggatgccatgctgatcttcgccaacctgagccggggcttcggccggcagggcaagcggaccttcatggccgagagacagtacacacggatggaggactggctgaccgccaagctggcctacgagggcctgagcaagacctacctgtccaagacactggcccagtacacctccaagacatgcagcaactgtgggtttaccatcaccagcgccgactacgacagggtgctggagaagctgaagaagacagcaacaggctggatgaccacaattaacggcaaggagctgaaggtggagggccagattacctactacaacagatacaagagacagaacgtagtcaaggacctgtccgtcgagctggatagactgagcgaagaatctgtgaacaacgacatctcctcctggacaaagggcagaagcggagaagctctgagcctcctgaagaaaagattctcccatagacccgtgcaggagaagttcgtgtgcctgaactgcggcttcgagacacacgcagccgagcaagccgccctgaacatcgccagatcctggctgttcctgcggagccaggagtacaagaaataccagacaaacaagacaaccggcaacaccgataagagagccttcgtcgagacctggcagtccttttaccggaagaagcttaaggaggtgtggaaacctgccgtgcggtctggcggatctggcggaggctccacaagcgccgacatcaccctgatgagccaggcccaggacagcaggagcatcctgttccaggagagcgtgaccttcgaggacgtggccgtgaacttcaccaacagggagtggcagtgcctgacctacgcccagaggcacctgtacaaggacgtgatgctggagaactacaggaacatggccagcctgggcttccccttccccaagccccccctgatcagccacctggagagggaggtggacccctgcgtgaccagccccaagaaaaagagaaaagtctaagctgccttctgcggggcttgccttctggccatgcccttcttctctcccttgcacctgtacctcttggtctttgaataaagcctgagtaggaaggctagcaaaaaaaaaaaaaaaaaaaaaaaaaaaaaaaaaaaaaaaaaaaaaaaaaaaaaaaaaaaaaaaaaaaaaaaaaaaaaaaa

SEQ ID NO: 3568 - RNA, 5419 nt, synthetic construct
  source 1..5419: mol_type = other RNA
aggaaataagagagaaaagaagagtaagaagaaatataagagccaccatggcccctaagaagaagcgtaaagtgagccgggtgaacggcagcggcagcggcggcggcatgaaccacgaccaggagttcgacccccctaaggtgtaccctcccgtccccgccgagaagagaaagcccatccgggtcctgagcctgttcgatggcatcgccaccggtctgctggtgctgaaggacctgggcatccaggtggataggtacattgcctccgaggtgtgcgaggactccatcaccgtgggaatggtgcgtcatcagggcaagatcatgtacgtgggcgacgtgcggagcgtgacacagaagcatatccaggagtggggccctttcgacctggtgatcggcggcagcccttgcaatgacctgagcatcgtgaacccagcccggaagggcctgtacgagggaaccggcagactgttcttcgagttttacagactgctgcacgacgcccggcctaaggaaggcgacgaccggcccttcttttggctgttcgagaatgtggtggccatgggagtcagcgacaagcgggatattagccggttcctggagagcaaccccgtgatgatcgatgccaaggaagtgagcgccgcccaccgggccagatacttctggggcaatctgcctggcatgaacagacccctggccagcaccgtgaacgacaagctggagctgcaggagtgcctggagcacggccggatcgccaagttcagcaaggtgagaaccatcaccacccgaagcaacagcatcaaacaaggcaaggaccagcactttcctgtgttcatgaacgagaaggaggacatcctgtggtgtaccgagatggagagagtgttcgggttcccagtccactacacagatgtcagcaacatgtctagactggccagacagagactgctgggaagaagctggtccgtccctgtgatcagacacctgttcgcccctctgaaggagtacttcgcctgcgtgagcagcggcaacagcaacgccaacagccggggccccagcttctctagcggcctggtgccactgtccctgagagggagccacatgggccccatggagatctacaaaaccgtgagcgcctggaagcggcagcctgtgcgcgtgctgagcctgtttcggaatatcgataaagtcctgaaaagcctgggattcctggagagcggctctggctccggcggtggcaccctgaagtacgtggaggatgtgacaaacgtggtcagacgggatgtggagaagtggggccccttcgatctggtgtacggcagcacccaacccctgggcagctcttgtgaccggtgccctggctggtacatgtttcagttccaccggatcctgcagtacgccctgccgagacaggagtcccagcggccattcttttggattttcatggacaacttgctgctgaccgaggatgaccaggaaactaccactcggttcctgcagaccgaagccgtgaccctgcaggacgtgagaggccgggactaccagaacgccatgcgggtgtggtccaacatccctggactgaaaagcaagcacgcacctctgacccctaaagaagaggagtacctgcaggcccaggtgcggagcagaagcaagctggacgcccctaaggtggatctgctggtgaagaattgcctcctgcccctgagagagtacttcaagtatttcagccagaatagtctgcccctgggcggcccaagcagcggcgcccctcctcccagcggcggcagcccagccggctccccaacctctaccgaggagggcacctctgagtccgccacccccgagagcggccctggcacctccaccgagcccagcgagggcagcgcacccggcagccctgccggcagccccacctccacagaggagggaaccagcaccgagcccagcgaaggcagcgccccaggcaccagcaccgagcctagtgagggcggctctggcggcggcagcgcccaggagattaaacggatcaacaagatcagaagaagacttgtgaaagacagcaacaccaagaaggccggcaagacaggccccatgaaaaccctgctggttagagtgatgacacccgatctgagagagcggctggaaaacctgagaaagaagcctgaaaatatcccccagcccatcagcaatacatctagagccaacctgaataagctgctgaccgattacaccgaaatgaagaaggcgatcctgcatgtgtactgggaagagttccagaaggaccctgtgggcctgatgagccgggtggcccagcctgccagcaagaagatcgatcagaacaagctgaaacctgagatggacgagaagggcaacctgaccaccgccggctttgcctgctctcagtgtggccagcccctgttcgtgtacaagctggagcaggtgtctgagaagggcaaggcttacaccaactacttcggacggtgcaatgtggccgagcacgaaaagctgatcctgctggcccagctgaagcccgagaaggatagcgacgaagccgtgacatatagcctgggaaagtttgggcagagggccctggatttctacagcattcatgtgaccaaggagtccacccaccccgtgaagcccctggcccagatcgccggaaacagatacgcctccggacctgtgggaaaggccctgagcgacgcatgtatgggcacaatcgcctccttcctgtctaagtaccaggacatcatcatcgaacaccagaaggtggtgaagggcaaccagaagagactggagagcctgcgggagctggccggcaaggaaaacctggaataccctagcgtgaccctgccacctcagcctcacaccaaggagggcgttgatgcctacaacgaagtgatcgcccgggtgcgaatgtgggtgaacctgaacctgtggcagaagctgaagctaagcagagatgatgccaagcctctgctgagactgaagggattcccttcctttcctctggtcgagagacaggccaacgaagtggactggtgggacatggtgtgtaacgtgaagaagctgatcaacgagaaaaaggaggatggcaaggtgttttggcagaatctggctggctacaagagacaggaagccctgagaccatacctgagcagcgaggaagatcggaagaagggaaagaaattcgctcggtaccagctgggcgacctgctgctgcacctggaaaagaagcacggcgaggactggggaaaggtgtacgacgaggcctgggagcggattgacaagaaagtggaaggcctgagcaagcacatcaagctggaagaggaacggagaagcgaggacgcccagagcaaggccgccctgaccgactggctgcgggctaaggccagcttcgtgatcgagggcctgaaggaggccgacaaggacgagttctgcagatgcgagctgaagctgcagaagtggtacggggacctgcggggaaagcccttcgccatcgaagccgagaacagcatcctggacatcagcggcttcagcaagcagtacaactgtgccttcatctggcagaaggacggcgtgaagaagctgaacctgtacctgatcatcaactacttcaagggcggcaagctgcggttcaagaagatcaaacctgaagccttcgaagccaacagattctacaccgtgatcaacaaaaagagcggcgagatcgtgcccatggaggtgaacttcaacttcgacgaccccaacctgatcatcctgcctctggcctttggcaagagacagggcagagaattcatctggaacgacctgctgtccctggaaaccggcagcctgaagctggccaacggaagagtgatcgagaagacactgtacaacagaagaacccggcaggatgagcctgccctgttcgtggccctgaccttcgagcggcgggaggtcctggactcctccaatatcaaaccaatgaacctgatcggcgtggcaagaggcgaaaacatccccgccgtgatcgccctgaccgaccccgagggctgcccactgagccggtttaaggatagcctgggaaacccaacccacatcctgagaatcggcgagagctataaggagaagcagcggaccatccaggccaagaaggaggtggagcagcggagagccggcggctacagccggaagtacgccagcaaagccaagaatctggcagacgatatggtgagaaacaccgctagagatctgctgtactacgccgtgacccaggatgccatgctgatcttcgccaacctgagccggggcttcggccggcagggcaagcggaccttcatggccgagagacagtacacacggatggaggactggctgaccgccaagctggcctacgagggcctgagcaagacctacctgtccaagacactggcccagtacacctccaagacatgcagcaactgtgggtttaccatcaccagcgccgactacgacagggtgctggagaagctgaagaagacagcaacaggctggatgaccacaattaacggcaaggagctgaaggtggagggccagattacctactacaacagatacaagagacagaacgtagtcaaggacctgtccgtcgagctggatagactgagcgaagaatctgtgaacaacgacatctcctcctggacaaagggcagaagcggagaagctctgagcctcctgaagaaaagattctcccatagacccgtgcaggagaagttcgtgtgcctgaactgcggcttcgagacacacgcagccgagcaagccgccctgaacatcgccagatcctggctgttcctgcggagccaggagtacaagaaataccagacaaacaagacaaccggcaacaccgataagagagccttcgtcgagacctggcagtccttttaccggaagaagcttaaggaggtgtggaaacctgccgtgcggtctggcggatctggcggaggctccacaagcgagatggagccccacagccacgccgtgccctgccagcccagcatgagcttcaaggacgtggccgtgaccttcacccaggaggagtggggccagctgaacctggcccagaggaggctgtacaggaacgtgaccctggagacctggagccacctggtgagcctgggcctgctgctgagcaagcccgacgtgatcagctggctggagcagggccaggacccctggagggccgagcagggcccccccaccagccccaagaaaaagagaaaagtctaagctgccttctgcggggcttgccttctggccatgcccttcttctctcccttgcacctgtacctcttggtctttgaataaagcctgagtaggaaggctagcaaaaaaaaaaaaaaaaaaaaaaaaaaaaaaaaaaaaaaaaaaaaaaaaaaaaaaaaaaaaaaaaaaaaaaaaaaaaaaaa

SEQ ID NO: 3569 - RNA, 5419 nt, synthetic construct
  source 1..5419: mol_type = other RNA
aggaaataagagagaaaagaagagtaagaagaaatataagagccaccatggcccctaagaagaagcgtaaagtgagccgggtgaacggcagcggcagcggcggcggcatgaaccacgaccaggagttcgacccccctaaggtgtaccctcccgtccccgccgagaagagaaagcccatccgggtcctgagcctgttcgatggcatcgccaccggtctgctggtgctgaaggacctgggcatccaggtggataggtacattgcctccgaggtgtgcgaggactccatcaccgtgggaatggtgcgtcatcagggcaagatcatgtacgtgggcgacgtgcggagcgtgacacagaagcatatccaggagtggggccctttcgacctggtgatcggcggcagcccttgcaatgacctgagcatcgtgaacccagcccggaagggcctgtacgagggaaccggcagactgttcttcgagttttacagactgctgcacgacgcccggcctaaggaaggcgacgaccggcccttcttttggctgttcgagaatgtggtggccatgggagtcagcgacaagcgggatattagccggttcctggagagcaaccccgtgatgatcgatgccaaggaagtgagcgccgcccaccgggccagatacttctggggcaatctgcctggcatgaacagacccctggccagcaccgtgaacgacaagctggagctgcaggagtgcctggagcacggccggatcgccaagttcagcaaggtgagaaccatcaccacccgaagcaacagcatcaaacaaggcaaggaccagcactttcctgtgttcatgaacgagaaggaggacatcctgtggtgtaccgagatggagagagtgttcgggttcccagtccactacacagatgtcagcaacatgtctagactggccagacagagactgctgggaagaagctggtccgtccctgtgatcagacacctgttcgcccctctgaaggagtacttcgcctgcgtgagcagcggcaacagcaacgccaacagccggggccccagcttctctagcggcctggtgccactgtccctgagagggagccacatgggccccatggagatctacaaaaccgtgagcgcctggaagcggcagcctgtgcgcgtgctgagcctgtttcggaatatcgataaagtcctgaaaagcctgggattcctggagagcggctctggctccggcggtggcaccctgaagtacgtggaggatgtgacaaacgtggtcagacgggatgtggagaagtggggccccttcgatctggtgtacggcagcacccaacccctgggcagctcttgtgaccggtgccctggctggtacatgtttcagttccaccggatcctgcagtacgccctgccgagacaggagtcccagcggccattcttttggattttcatggacaacttgctgctgaccgaggatgaccaggaaactaccactcggttcctgcagaccgaagccgtgaccctgcaggacgtgagaggccgggactaccagaacgccatgcgggtgtggtccaacatccctggactgaaaagcaagcacgcacctctgacccctaaagaagaggagtacctgcaggcccaggtgcggagcagaagcaagctggacgcccctaaggtggatctgctggtgaagaattgcctcctgcccctgagagagtacttcaagtatttcagccagaatagtctgcccctgggcggcccaagcagcggcgcccctcctcccagcggcggcagcccagccggctccccaacctctaccgaggagggcacctctgagtccgccacccccgagagcggccctggcacctccaccgagcccagcgagggcagcgcacccggcagccctgccggcagccccacctccacagaggagggaaccagcaccgagcccagcgaaggcagcgccccaggcaccagcaccgagcctagtgagggcggctctggcggcggcagcgcccaggagattaaacggatcaacaagatcagaagaagacttgtgaaagacagcaacaccaagaaggccggcaagacaggccccatgaaaaccctgctggttagagtgatgacacccgatctgagagagcggctggaaaacctgagaaagaagcctgaaaatatcccccagcccatcagcaatacatctagagccaacctgaataagctgctgaccgattacaccgaaatgaagaaggcgatcctgcatgtgtactgggaagagttccagaaggaccctgtgggcctgatgagccgggtggcccagcctgccagcaagaagatcgatcagaacaagctgaaacctgagatggacgagaagggcaacctgaccaccgccggctttgcctgctctcagtgtggccagcccctgttcgtgtacaagctggagcaggtgtctgagaagggcaaggcttacaccaactacttcggacggtgcaatgtggccgagcacgaaaagctgatcctgctggcccagctgaagcccgagaaggatagcgacgaagccgtgacatatagcctgggaaagtttgggcagagggccctggatttctacagcattcatgtgaccaaggagtccacccaccccgtgaagcccctggcccagatcgccggaaacagatacgcctccggacctgtgggaaaggccctgagcgacgcatgtatgggcacaatcgcctccttcctgtctaagtaccaggacatcatcatcgaacaccagaaggtggtgaagggcaaccagaagagactggagagcctgcgggagctggccggcaaggaaaacctggaataccctagcgtgaccctgccacctcagcctcacaccaaggagggcgttgatgcctacaacgaagtgatcgcccgggtgcgaatgtgggtgaacctgaacctgtggcagaagctgaagctaagcagagatgatgccaagcctctgctgagactgaagggattcccttcctttcctctggtcgagagacaggccaacgaagtggactggtgggacatggtgtgtaacgtgaagaagctgatcaacgagaaaaaggaggatggcaaggtgttttggcagaatctggctggctacaagagacaggaagccctgagaccatacctgagcagcgaggaagatcggaagaagggaaagaaattcgctcggtaccagctgggcgacctgctgctgcacctggaaaagaagcacggcgaggactggggaaaggtgtacgacgaggcctgggagcggattgacaagaaagtggaaggcctgagcaagcacatcaagctggaagaggaacggagaagcgaggacgcccagagcaaggccgccctgaccgactggctgcgggctaaggccagcttcgtgatcgagggcctgaaggaggccgacaaggacgagttctgcagatgcgagctgaagctgcagaagtggtacggggacctgcggggaaagcccttcgccatcgaagccgagaacagcatcctggacatcagcggcttcagcaagcagtacaactgtgccttcatctggcagaaggacggcgtgaagaagctgaacctgtacctgatcatcaactacttcaagggcggcaagctgcggttcaagaagatcaaacctgaagccttcgaagccaacagattctacaccgtgatcaacaaaaagagcggcgagatcgtgcccatggaggtgaacttcaacttcgacgaccccaacctgatcatcctgcctctggcctttggcaagagacagggcagagaattcatctggaacgacctgctgtccctggaaaccggcagcctgaagctggccaacggaagagtgatcgagaagacactgtacaacagaagaacccggcaggatgagcctgccctgttcgtggccctgaccttcgagcggcgggaggtcctggactcctccaatatcaaaccaatgaacctgatcggcgtggcaagaggcgaaaacatccccgccgtgatcgccctgaccgaccccgagggctgcccactgagccggtttaaggatagcctgggaaacccaacccacatcctgagaatcggcgagagctataaggagaagcagcggaccatccaggccaagaaggaggtggagcagcggagagccggcggctacagccggaagtacgccagcaaagccaagaatctggcagacgatatggtgagaaacaccgctagagatctgctgtactacgccgtgacccaggatgccatgctgatcttcgccaacctgagccggggcttcggccggcagggcaagcggaccttcatggccgagagacagtacacacggatggaggactggctgaccgccaagctggcctacgagggcctgagcaagacctacctgtccaagacactggcccagtacacctccaagacatgcagcaactgtgggtttaccatcaccagcgccgactacgacagggtgctggagaagctgaagaagacagcaacaggctggatgaccacaattaacggcaaggagctgaaggtggagggccagattacctactacaacagatacaagagacagaacgtagtcaaggacctgtccgtcgagctggatagactgagcgaagaatctgtgaacaacgacatctcctcctggacaaagggcagaagcggagaagctctgagcctcctgaagaaaagattctcccatagacccgtgcaggagaagttcgtgtgcctgaactgcggcttcgagacacacgcagccgagcaagccgccctgaacatcgccagatcctggctgttcctgcggagccaggagtacaagaaataccagacaaacaagacaaccggcaacaccgataagagagccttcgtcgagacctggcagtccttttaccggaagaagcttaaggaggtgtggaaacctgccgtgcggtctggcggatctggcggaggctccacaagccaccaggaggtggtgaccttcgaggacgtggccgtgtacttcacccagaccgagtgggccggcctgagccccgcccagagggccctgtacaggagcgtgatgctggagatctacggcaacctgaccagcctgggctaccccgtgcccaagcccgccctggtgagcctgctggagaggggcgagctgccctggggcctggagaccagggacgacccccccgcccagggcaccaaggacatctgcaccagccccaagaaaaagagaaaagtctaagctgccttctgcggggcttgccttctggccatgcccttcttctctcccttgcacctgtacctcttggtctttgaataaagcctgagtaggaaggctagcaaaaaaaaaaaaaaaaaaaaaaaaaaaaaaaaaaaaaaaaaaaaaaaaaaaaaaaaaaaaaaaaaaaaaaaaaaaaaaaa

SEQ ID NO: 3570 - RNA, 5419 nt, synthetic construct
  source 1..5419: mol_type = other RNA
aggaaataagagagaaaagaagagtaagaagaaatataagagccaccatggcccctaagaagaagcgtaaagtgagccgggtgaacggcagcggcagcggcggcggcatgaaccacgaccaggagttcgacccccctaaggtgtaccctcccgtccccgccgagaagagaaagcccatccgggtcctgagcctgttcgatggcatcgccaccggtctgctggtgctgaaggacctgggcatccaggtggataggtacattgcctccgaggtgtgcgaggactccatcaccgtgggaatggtgcgtcatcagggcaagatcatgtacgtgggcgacgtgcggagcgtgacacagaagcatatccaggagtggggccctttcgacctggtgatcggcggcagcccttgcaatgacctgagcatcgtgaacccagcccggaagggcctgtacgagggaaccggcagactgttcttcgagttttacagactgctgcacgacgcccggcctaaggaaggcgacgaccggcccttcttttggctgttcgagaatgtggtggccatgggagtcagcgacaagcgggatattagccggttcctggagagcaaccccgtgatgatcgatgccaaggaagtgagcgccgcccaccgggccagatacttctggggcaatctgcctggcatgaacagacccctggccagcaccgtgaacgacaagctggagctgcaggagtgcctggagcacggccggatcgccaagttcagcaaggtgagaaccatcaccacccgaagcaacagcatcaaacaaggcaaggaccagcactttcctgtgttcatgaacgagaaggaggacatcctgtggtgtaccgagatggagagagtgttcgggttcccagtccactacacagatgtcagcaacatgtctagactggccagacagagactgctgggaagaagctggtccgtccctgtgatcagacacctgttcgcccctctgaaggagtacttcgcctgcgtgagcagcggcaacagcaacgccaacagccggggccccagcttctctagcggcctggtgccactgtccctgagagggagccacatgggccccatggagatctacaaaaccgtgagcgcctggaagcggcagcctgtgcgcgtgctgagcctgtttcggaatatcgataaagtcctgaaaagcctgggattcctggagagcggctctggctccggcggtggcaccctgaagtacgtggaggatgtgacaaacgtggtcagacgggatgtggagaagtggggccccttcgatctggtgtacggcagcacccaacccctgggcagctcttgtgaccggtgccctggctggtacatgtttcagttccaccggatcctgcagtacgccctgccgagacaggagtcccagcggccattcttttggattttcatggacaacttgctgctgaccgaggatgaccaggaaactaccactcggttcctgcagaccgaagccgtgaccctgcaggacgtgagaggccgggactaccagaacgccatgcgggtgtggtccaacatccctggactgaaaagcaagcacgcacctctgacccctaaagaagaggagtacctgcaggcccaggtgcggagcagaagcaagctggacgcccctaaggtggatctgctggtgaagaattgcctcctgcccctgagagagtacttcaagtatttcagccagaatagtctgcccctgggcggcccaagcagcggcgcccctcctcccagcggcggcagcccagccggctccccaacctctaccgaggagggcacctctgagtccgccacccccgagagcggccctggcacctccaccgagcccagcgagggcagcgcacccggcagccctgccggcagccccacctccacagaggagggaaccagcaccgagcccagcgaaggcagcgccccaggcaccagcaccgagcctagtgagggcggctctggcggcggcagcgcccaggagattaaacggatcaacaagatcagaagaagacttgtgaaagacagcaacaccaagaaggccggcaagacaggccccatgaaaaccctgctggttagagtgatgacacccgatctgagagagcggctggaaaacctgagaaagaagcctgaaaatatcccccagcccatcagcaatacatctagagccaacctgaataagctgctgaccgattacaccgaaatgaagaaggcgatcctgcatgtgtactgggaagagttccagaaggaccctgtgggcctgatgagccgggtggcccagcctgccagcaagaagatcgatcagaacaagctgaaacctgagatggacgagaagggcaacctgaccaccgccggctttgcctgctctcagtgtggccagcccctgttcgtgtacaagctggagcaggtgtctgagaagggcaaggcttacaccaactacttcggacggtgcaatgtggccgagcacgaaaagctgatcctgctggcccagctgaagcccgagaaggatagcgacgaagccgtgacatatagcctgggaaagtttgggcagagggccctggatttctacagcattcatgtgaccaaggagtccacccaccccgtgaagcccctggcccagatcgccggaaacagatacgcctccggacctgtgggaaaggccctgagcgacgcatgtatgggcacaatcgcctccttcctgtctaagtaccaggacatcatcatcgaacaccagaaggtggtgaagggcaaccagaagagactggagagcctgcgggagctggccggcaaggaaaacctggaataccctagcgtgaccctgccacctcagcctcacaccaaggagggcgttgatgcctacaacgaagtgatcgcccgggtgcgaatgtgggtgaacctgaacctgtggcagaagctgaagctaagcagagatgatgccaagcctctgctgagactgaagggattcccttcctttcctctggtcgagagacaggccaacgaagtggactggtgggacatggtgtgtaacgtgaagaagctgatcaacgagaaaaaggaggatggcaaggtgttttggcagaatctggctggctacaagagacaggaagccctgagaccatacctgagcagcgaggaagatcggaagaagggaaagaaattcgctcggtaccagctgggcgacctgctgctgcacctggaaaagaagcacggcgaggactggggaaaggtgtacgacgaggcctgggagcggattgacaagaaagtggaaggcctgagcaagcacatcaagctggaagaggaacggagaagcgaggacgcccagagcaaggccgccctgaccgactggctgcgggctaaggccagcttcgtgatcgagggcctgaaggaggccgacaaggacgagttctgcagatgcgagctgaagctgcagaagtggtacggggacctgcggggaaagcccttcgccatcgaagccgagaacagcatcctggacatcagcggcttcagcaagcagtacaactgtgccttcatctggcagaaggacggcgtgaagaagctgaacctgtacctgatcatcaactacttcaagggcggcaagctgcggttcaagaagatcaaacctgaagccttcgaagccaacagattctacaccgtgatcaacaaaaagagcggcgagatcgtgcccatggaggtgaacttcaacttcgacgaccccaacctgatcatcctgcctctggcctttggcaagagacagggcagagaattcatctggaacgacctgctgtccctggaaaccggcagcctgaagctggccaacggaagagtgatcgagaagacactgtacaacagaagaacccggcaggatgagcctgccctgttcgtggccctgaccttcgagcggcgggaggtcctggactcctccaatatcaaaccaatgaacctgatcggcgtggcaagaggcgaaaacatccccgccgtgatcgccctgaccgaccccgagggctgcccactgagccggtttaaggatagcctgggaaacccaacccacatcctgagaatcggcgagagctataaggagaagcagcggaccatccaggccaagaaggaggtggagcagcggagagccggcggctacagccggaagtacgccagcaaagccaagaatctggcagacgatatggtgagaaacaccgctagagatctgctgtactacgccgtgacccaggatgccatgctgatcttcgccaacctgagccggggcttcggccggcagggcaagcggaccttcatggccgagagacagtacacacggatggaggactggctgaccgccaagctggcctacgagggcctgagcaagacctacctgtccaagacactggcccagtacacctccaagacatgcagcaactgtgggtttaccatcaccagcgccgactacgacagggtgctggagaagctgaagaagacagcaacaggctggatgaccacaattaacggcaaggagctgaaggtggagggccagattacctactacaacagatacaagagacagaacgtagtcaaggacctgtccgtcgagctggatagactgagcgaagaatctgtgaacaacgacatctcctcctggacaaagggcagaagcggagaagctctgagcctcctgaagaaaagattctcccatagacccgtgcaggagaagttcgtgtgcctgaactgcggcttcgagacacacgcagccgagcaagccgccctgaacatcgccagatcctggctgttcctgcggagccaggagtacaagaaataccagacaaacaagacaaccggcaacaccgataagagagccttcgtcgagacctggcagtccttttaccggaagaagcttaaggaggtgtggaaacctgccgtgcggtctggcggatctggcggaggctccacaagcatggccaccgccctgaccgaccccgcccaggtgagcgtgaccttcgacgacgtggccgtgaccttcacccaggaggagtggggccagctggacctggcccagaggaccctgtaccaggaggtgatgctggagaactgcggcctgctggtgagcctgggctgccccgtgcccaggcccgagctgatctaccacctggagcacggccaggagccctggaccaggaaggaggacctgagccagggcaccagccccaagaaaaagagaaaagtctaagctgccttctgcggggcttgccttctggccatgcccttcttctctcccttgcacctgtacctcttggtctttgaataaagcctgagtaggaaggctagcaaaaaaaaaaaaaaaaaaaaaaaaaaaaaaaaaaaaaaaaaaaaaaaaaaaaaaaaaaaaaaaaaaaaaaaaaaaaaaaa

SEQ ID NO: 3571 - RNA, 5416 nt, synthetic construct
  source 1..5416: mol_type = other RNA
aggaaataagagagaaaagaagagtaagaagaaatataagagccaccatggcccctaagaagaagcgtaaagtgagccgggtgaacggcagcggcagcggcggcggcatgaaccacgaccaggagttcgacccccctaaggtgtaccctcccgtccccgccgagaagagaaagcccatccgggtcctgagcctgttcgatggcatcgccaccggtctgctggtgctgaaggacctgggcatccaggtggataggtacattgcctccgaggtgtgcgaggactccatcaccgtgggaatggtgcgtcatcagggcaagatcatgtacgtgggcgacgtgcggagcgtgacacagaagcatatccaggagtggggccctttcgacctggtgatcggcggcagcccttgcaatgacctgagcatcgtgaacccagcccggaagggcctgtacgagggaaccggcagactgttcttcgagttttacagactgctgcacgacgcccggcctaaggaaggcgacgaccggcccttcttttggctgttcgagaatgtggtggccatgggagtcagcgacaagcgggatattagccggttcctggagagcaaccccgtgatgatcgatgccaaggaagtgagcgccgcccaccgggccagatacttctggggcaatctgcctggcatgaacagacccctggccagcaccgtgaacgacaagctggagctgcaggagtgcctggagcacggccggatcgccaagttcagcaaggtgagaaccatcaccacccgaagcaacagcatcaaacaaggcaaggaccagcactttcctgtgttcatgaacgagaaggaggacatcctgtggtgtaccgagatggagagagtgttcgggttcccagtccactacacagatgtcagcaacatgtctagactggccagacagagactgctgggaagaagctggtccgtccctgtgatcagacacctgttcgcccctctgaaggagtacttcgcctgcgtgagcagcggcaacagcaacgccaacagccggggccccagcttctctagcggcctggtgccactgtccctgagagggagccacatgggccccatggagatctacaaaaccgtgagcgcctggaagcggcagcctgtgcgcgtgctgagcctgtttcggaatatcgataaagtcctgaaaagcctgggattcctggagagcggctctggctccggcggtggcaccctgaagtacgtggaggatgtgacaaacgtggtcagacgggatgtggagaagtggggccccttcgatctggtgtacggcagcacccaacccctgggcagctcttgtgaccggtgccctggctggtacatgtttcagttccaccggatcctgcagtacgccctgccgagacaggagtcccagcggccattcttttggattttcatggacaacttgctgctgaccgaggatgaccaggaaactaccactcggttcctgcagaccgaagccgtgaccctgcaggacgtgagaggccgggactaccagaacgccatgcgggtgtggtccaacatccctggactgaaaagcaagcacgcacctctgacccctaaagaagaggagtacctgcaggcccaggtgcggagcagaagcaagctggacgcccctaaggtggatctgctggtgaagaattgcctcctgcccctgagagagtacttcaagtatttcagccagaatagtctgcccctgggcggcccaagcagcggcgcccctcctcccagcggcggcagcccagccggctccccaacctctaccgaggagggcacctctgagtccgccacccccgagagcggccctggcacctccaccgagcccagcgagggcagcgcacccggcagccctgccggcagccccacctccacagaggagggaaccagcaccgagcccagcgaaggcagcgccccaggcaccagcaccgagcctagtgagggcggctctggcggcggcagcgcccaggagattaaacggatcaacaagatcagaagaagacttgtgaaagacagcaacaccaagaaggccggcaagacaggccccatgaaaaccctgctggttagagtgatgacacccgatctgagagagcggctggaaaacctgagaaagaagcctgaaaatatcccccagcccatcagcaatacatctagagccaacctgaataagctgctgaccgattacaccgaaatgaagaaggcgatcctgcatgtgtactgggaagagttccagaaggaccctgtgggcctgatgagccgggtggcccagcctgccagcaagaagatcgatcagaacaagctgaaacctgagatggacgagaagggcaacctgaccaccgccggctttgcctgctctcagtgtggccagcccctgttcgtgtacaagctggagcaggtgtctgagaagggcaaggcttacaccaactacttcggacggtgcaatgtggccgagcacgaaaagctgatcctgctggcccagctgaagcccgagaaggatagcgacgaagccgtgacatatagcctgggaaagtttgggcagagggccctggatttctacagcattcatgtgaccaaggagtccacccaccccgtgaagcccctggcccagatcgccggaaacagatacgcctccggacctgtgggaaaggccctgagcgacgcatgtatgggcacaatcgcctccttcctgtctaagtaccaggacatcatcatcgaacaccagaaggtggtgaagggcaaccagaagagactggagagcctgcgggagctggccggcaaggaaaacctggaataccctagcgtgaccctgccacctcagcctcacaccaaggagggcgttgatgcctacaacgaagtgatcgcccgggtgcgaatgtgggtgaacctgaacctgtggcagaagctgaagctaagcagagatgatgccaagcctctgctgagactgaagggattcccttcctttcctctggtcgagagacaggccaacgaagtggactggtgggacatggtgtgtaacgtgaagaagctgatcaacgagaaaaaggaggatggcaaggtgttttggcagaatctggctggctacaagagacaggaagccctgagaccatacctgagcagcgaggaagatcggaagaagggaaagaaattcgctcggtaccagctgggcgacctgctgctgcacctggaaaagaagcacggcgaggactggggaaaggtgtacgacgaggcctgggagcggattgacaagaaagtggaaggcctgagcaagcacatcaagctggaagaggaacggagaagcgaggacgcccagagcaaggccgccctgaccgactggctgcgggctaaggccagcttcgtgatcgagggcctgaaggaggccgacaaggacgagttctgcagatgcgagctgaagctgcagaagtggtacggggacctgcggggaaagcccttcgccatcgaagccgagaacagcatcctggacatcagcggcttcagcaagcagtacaactgtgccttcatctggcagaaggacggcgtgaagaagctgaacctgtacctgatcatcaactacttcaagggcggcaagctgcggttcaagaagatcaaacctgaagccttcgaagccaacagattctacaccgtgatcaacaaaaagagcggcgagatcgtgcccatggaggtgaacttcaacttcgacgaccccaacctgatcatcctgcctctggcctttggcaagagacagggcagagaattcatctggaacgacctgctgtccctggaaaccggcagcctgaagctggccaacggaagagtgatcgagaagacactgtacaacagaagaacccggcaggatgagcctgccctgttcgtggccctgaccttcgagcggcgggaggtcctggactcctccaatatcaaaccaatgaacctgatcggcgtggcaagaggcgaaaacatccccgccgtgatcgccctgaccgaccccgagggctgcccactgagccggtttaaggatagcctgggaaacccaacccacatcctgagaatcggcgagagctataaggagaagcagcggaccatccaggccaagaaggaggtggagcagcggagagccggcggctacagccggaagtacgccagcaaagccaagaatctggcagacgatatggtgagaaacaccgctagagatctgctgtactacgccgtgacccaggatgccatgctgatcttcgccaacctgagccggggcttcggccggcagggcaagcggaccttcatggccgagagacagtacacacggatggaggactggctgaccgccaagctggcctacgagggcctgagcaagacctacctgtccaagacactggcccagtacacctccaagacatgcagcaactgtgggtttaccatcaccagcgccgactacgacagggtgctggagaagctgaagaagacagcaacaggctggatgaccacaattaacggcaaggagctgaaggtggagggccagattacctactacaacagatacaagagacagaacgtagtcaaggacctgtccgtcgagctggatagactgagcgaagaatctgtgaacaacgacatctcctcctggacaaagggcagaagcggagaagctctgagcctcctgaagaaaagattctcccatagacccgtgcaggagaagttcgtgtgcctgaactgcggcttcgagacacacgcagccgagcaagccgccctgaacatcgccagatcctggctgttcctgcggagccaggagtacaagaaataccagacaaacaagacaaccggcaacaccgataagagagccttcgtcgagacctggcagtccttttaccggaagaagcttaaggaggtgtggaaacctgccgtgcggtctggcggatctggcggaggctccacaagcggcagcctggaggagggcagaagagccaccggcctgcccgccgcccaggtgcaggagcccgtgaccttcaaggacgtggccgtggacttcacccaggaggagtggggccagctggacctggtgcagagaaccctgtacagagacgtgatgctggagacctacggccacctgctgagcgtgggcaaccagatcgccaagcccgaggtgatcagcctgctggagcagggcgaggagccctggaccagccccaagaaaaagagaaaagtctaagctgccttctgcggggcttgccttctggccatgcccttcttctctcccttgcacctgtacctcttggtctttgaataaagcctgagtaggaaggctagcaaaaaaaaaaaaaaaaaaaaaaaaaaaaaaaaaaaaaaaaaaaaaaaaaaaaaaaaaaaaaaaaaaaaaaaaaaaaaaaa

SEQ ID NO: 3572 - RNA, 5419 nt, synthetic construct
  source 1..5419: mol_type = other RNA
aggaaataagagagaaaagaagagtaagaagaaatataagagccaccatggcccctaagaagaagcgtaaagtgagccgggtgaacggcagcggcagcggcggcggcatgaaccacgaccaggagttcgacccccctaaggtgtaccctcccgtccccgccgagaagagaaagcccatccgggtcctgagcctgttcgatggcatcgccaccggtctgctggtgctgaaggacctgggcatccaggtggataggtacattgcctccgaggtgtgcgaggactccatcaccgtgggaatggtgcgtcatcagggcaagatcatgtacgtgggcgacgtgcggagcgtgacacagaagcatatccaggagtggggccctttcgacctggtgatcggcggcagcccttgcaatgacctgagcatcgtgaacccagcccggaagggcctgtacgagggaaccggcagactgttcttcgagttttacagactgctgcacgacgcccggcctaaggaaggcgacgaccggcccttcttttggctgttcgagaatgtggtggccatgggagtcagcgacaagcgggatattagccggttcctggagagcaaccccgtgatgatcgatgccaaggaagtgagcgccgcccaccgggccagatacttctggggcaatctgcctggcatgaacagacccctggccagcaccgtgaacgacaagctggagctgcaggagtgcctggagcacggccggatcgccaagttcagcaaggtgagaaccatcaccacccgaagcaacagcatcaaacaaggcaaggaccagcactttcctgtgttcatgaacgagaaggaggacatcctgtggtgtaccgagatggagagagtgttcgggttcccagtccactacacagatgtcagcaacatgtctagactggccagacagagactgctgggaagaagctggtccgtccctgtgatcagacacctgttcgcccctctgaaggagtacttcgcctgcgtgagcagcggcaacagcaacgccaacagccggggccccagcttctctagcggcctggtgccactgtccctgagagggagccacatgggccccatggagatctacaaaaccgtgagcgcctggaagcggcagcctgtgcgcgtgctgagcctgtttcggaatatcgataaagtcctgaaaagcctgggattcctggagagcggctctggctccggcggtggcaccctgaagtacgtggaggatgtgacaaacgtggtcagacgggatgtggagaagtggggccccttcgatctggtgtacggcagcacccaacccctgggcagctcttgtgaccggtgccctggctggtacatgtttcagttccaccggatcctgcagtacgccctgccgagacaggagtcccagcggccattcttttggattttcatggacaacttgctgctgaccgaggatgaccaggaaactaccactcggttcctgcagaccgaagccgtgaccctgcaggacgtgagaggccgggactaccagaacgccatgcgggtgtggtccaacatccctggactgaaaagcaagcacgcacctctgacccctaaagaagaggagtacctgcaggcccaggtgcggagcagaagcaagctggacgcccctaaggtggatctgctggtgaagaattgcctcctgcccctgagagagtacttcaagtatttcagccagaatagtctgcccctgggcggcccaagcagcggcgcccctcctcccagcggcggcagcccagccggctccccaacctctaccgaggagggcacctctgagtccgccacccccgagagcggccctggcacctccaccgagcccagcgagggcagcgcacccggcagccctgccggcagccccacctccacagaggagggaaccagcaccgagcccagcgaaggcagcgccccaggcaccagcaccgagcctagtgagggcggctctggcggcggcagcgcccaggagattaaacggatcaacaagatcagaagaagacttgtgaaagacagcaacaccaagaaggccggcaagacaggccccatgaaaaccctgctggttagagtgatgacacccgatctgagagagcggctggaaaacctgagaaagaagcctgaaaatatcccccagcccatcagcaatacatctagagccaacctgaataagctgctgaccgattacaccgaaatgaagaaggcgatcctgcatgtgtactgggaagagttccagaaggaccctgtgggcctgatgagccgggtggcccagcctgccagcaagaagatcgatcagaacaagctgaaacctgagatggacgagaagggcaacctgaccaccgccggctttgcctgctctcagtgtggccagcccctgttcgtgtacaagctggagcaggtgtctgagaagggcaaggcttacaccaactacttcggacggtgcaatgtggccgagcacgaaaagctgatcctgctggcccagctgaagcccgagaaggatagcgacgaagccgtgacatatagcctgggaaagtttgggcagagggccctggatttctacagcattcatgtgaccaaggagtccacccaccccgtgaagcccctggcccagatcgccggaaacagatacgcctccggacctgtgggaaaggccctgagcgacgcatgtatgggcacaatcgcctccttcctgtctaagtaccaggacatcatcatcgaacaccagaaggtggtgaagggcaaccagaagagactggagagcctgcgggagctggccggcaaggaaaacctggaataccctagcgtgaccctgccacctcagcctcacaccaaggagggcgttgatgcctacaacgaagtgatcgcccgggtgcgaatgtgggtgaacctgaacctgtggcagaagctgaagctaagcagagatgatgccaagcctctgctgagactgaagggattcccttcctttcctctggtcgagagacaggccaacgaagtggactggtgggacatggtgtgtaacgtgaagaagctgatcaacgagaaaaaggaggatggcaaggtgttttggcagaatctggctggctacaagagacaggaagccctgagaccatacctgagcagcgaggaagatcggaagaagggaaagaaattcgctcggtaccagctgggcgacctgctgctgcacctggaaaagaagcacggcgaggactggggaaaggtgtacgacgaggcctgggagcggattgacaagaaagtggaaggcctgagcaagcacatcaagctggaagaggaacggagaagcgaggacgcccagagcaaggccgccctgaccgactggctgcgggctaaggccagcttcgtgatcgagggcctgaaggaggccgacaaggacgagttctgcagatgcgagctgaagctgcagaagtggtacggggacctgcggggaaagcccttcgccatcgaagccgagaacagcatcctggacatcagcggcttcagcaagcagtacaactgtgccttcatctggcagaaggacggcgtgaagaagctgaacctgtacctgatcatcaactacttcaagggcggcaagctgcggttcaagaagatcaaacctgaagccttcgaagccaacagattctacaccgtgatcaacaaaaagagcggcgagatcgtgcccatggaggtgaacttcaacttcgacgaccccaacctgatcatcctgcctctggcctttggcaagagacagggcagagaattcatctggaacgacctgctgtccctggaaaccggcagcctgaagctggccaacggaagagtgatcgagaagacactgtacaacagaagaacccggcaggatgagcctgccctgttcgtggccctgaccttcgagcggcgggaggtcctggactcctccaatatcaaaccaatgaacctgatcggcgtggcaagaggcgaaaacatccccgccgtgatcgccctgaccgaccccgagggctgcccactgagccggtttaaggatagcctgggaaacccaacccacatcctgagaatcggcgagagctataaggagaagcagcggaccatccaggccaagaaggaggtggagcagcggagagccggcggctacagccggaagtacgccagcaaagccaagaatctggcagacgatatggtgagaaacaccgctagagatctgctgtactacgccgtgacccaggatgccatgctgatcttcgccaacctgagccggggcttcggccggcagggcaagcggaccttcatggccgagagacagtacacacggatggaggactggctgaccgccaagctggcctacgagggcctgagcaagacctacctgtccaagacactggcccagtacacctccaagacatgcagcaactgtgggtttaccatcaccagcgccgactacgacagggtgctggagaagctgaagaagacagcaacaggctggatgaccacaattaacggcaaggagctgaaggtggagggccagattacctactacaacagatacaagagacagaacgtagtcaaggacctgtccgtcgagctggatagactgagcgaagaatctgtgaacaacgacatctcctcctggacaaagggcagaagcggagaagctctgagcctcctgaagaaaagattctcccatagacccgtgcaggagaagttcgtgtgcctgaactgcggcttcgagacacacgcagccgagcaagccgccctgaacatcgccagatcctggctgttcctgcggagccaggagtacaagaaataccagacaaacaagacaaccggcaacaccgataagagagccttcgtcgagacctggcagtccttttaccggaagaagcttaaggaggtgtggaaacctgccgtgcggtctggcggatctggcggaggctccacaagcggccccctgaccttcagggacgtggccatcgagttcagccaggaggagtggaagagcctggaccccgtgcagaaggccctgtactgggacgtgatgctggagaactacaggaacctggtgttcctgggcatcctgcccaagtgcatgaccaaggagctgccccccatcggcaacagcaacaccggcgagaagtgccagaccgtgatgctggagaggcacgagtgctacgacgtggagaacttcaccagccccaagaaaaagagaaaagtctaagctgccttctgcggggcttgccttctggccatgcccttcttctctcccttgcacctgtacctcttggtctttgaataaagcctgagtaggaaggctagcaaaaaaaaaaaaaaaaaaaaaaaaaaaaaaaaaaaaaaaaaaaaaaaaaaaaaaaaaaaaaaaaaaaaaaaaaaaaaaaa

SEQ ID NO: 3573 - RNA, 5419 nt, synthetic construct
  source 1..5419: mol_type = other RNA
aggaaataagagagaaaagaagagtaagaagaaatataagagccaccatggcccctaagaagaagcgtaaagtgagccgggtgaacggcagcggcagcggcggcggcatgaaccacgaccaggagttcgacccccctaaggtgtaccctcccgtccccgccgagaagagaaagcccatccgggtcctgagcctgttcgatggcatcgccaccggtctgctggtgctgaaggacctgggcatccaggtggataggtacattgcctccgaggtgtgcgaggactccatcaccgtgggaatggtgcgtcatcagggcaagatcatgtacgtgggcgacgtgcggagcgtgacacagaagcatatccaggagtggggccctttcgacctggtgatcggcggcagcccttgcaatgacctgagcatcgtgaacccagcccggaagggcctgtacgagggaaccggcagactgttcttcgagttttacagactgctgcacgacgcccggcctaaggaaggcgacgaccggcccttcttttggctgttcgagaatgtggtggccatgggagtcagcgacaagcgggatattagccggttcctggagagcaaccccgtgatgatcgatgccaaggaagtgagcgccgcccaccgggccagatacttctggggcaatctgcctggcatgaacagacccctggccagcaccgtgaacgacaagctggagctgcaggagtgcctggagcacggccggatcgccaagttcagcaaggtgagaaccatcaccacccgaagcaacagcatcaaacaaggcaaggaccagcactttcctgtgttcatgaacgagaaggaggacatcctgtggtgtaccgagatggagagagtgttcgggttcccagtccactacacagatgtcagcaacatgtctagactggccagacagagactgctgggaagaagctggtccgtccctgtgatcagacacctgttcgcccctctgaaggagtacttcgcctgcgtgagcagcggcaacagcaacgccaacagccggggccccagcttctctagcggcctggtgccactgtccctgagagggagccacatgggccccatggagatctacaaaaccgtgagcgcctggaagcggcagcctgtgcgcgtgctgagcctgtttcggaatatcgataaagtcctgaaaagcctgggattcctggagagcggctctggctccggcggtggcaccctgaagtacgtggaggatgtgacaaacgtggtcagacgggatgtggagaagtggggccccttcgatctggtgtacggcagcacccaacccctgggcagctcttgtgaccggtgccctggctggtacatgtttcagttccaccggatcctgcagtacgccctgccgagacaggagtcccagcggccattcttttggattttcatggacaacttgctgctgaccgaggatgaccaggaaactaccactcggttcctgcagaccgaagccgtgaccctgcaggacgtgagaggccgggactaccagaacgccatgcgggtgtggtccaacatccctggactgaaaagcaagcacgcacctctgacccctaaagaagaggagtacctgcaggcccaggtgcggagcagaagcaagctggacgcccctaaggtggatctgctggtgaagaattgcctcctgcccctgagagagtacttcaagtatttcagccagaatagtctgcccctgggcggcccaagcagcggcgcccctcctcccagcggcggcagcccagccggctccccaacctctaccgaggagggcacctctgagtccgccacccccgagagcggccctggcacctccaccgagcccagcgagggcagcgcacccggcagccctgccggcagccccacctccacagaggagggaaccagcaccgagcccagcgaaggcagcgccccaggcaccagcaccgagcctagtgagggcggctctggcggcggcagcgcccaggagattaaacggatcaacaagatcagaagaagacttgtgaaagacagcaacaccaagaaggccggcaagacaggccccatgaaaaccctgctggttagagtgatgacacccgatctgagagagcggctggaaaacctgagaaagaagcctgaaaatatcccccagcccatcagcaatacatctagagccaacctgaataagctgctgaccgattacaccgaaatgaagaaggcgatcctgcatgtgtactgggaagagttccagaaggaccctgtgggcctgatgagccgggtggcccagcctgccagcaagaagatcgatcagaacaagctgaaacctgagatggacgagaagggcaacctgaccaccgccggctttgcctgctctcagtgtggccagcccctgttcgtgtacaagctggagcaggtgtctgagaagggcaaggcttacaccaactacttcggacggtgcaatgtggccgagcacgaaaagctgatcctgctggcccagctgaagcccgagaaggatagcgacgaagccgtgacatatagcctgggaaagtttgggcagagggccctggatttctacagcattcatgtgaccaaggagtccacccaccccgtgaagcccctggcccagatcgccggaaacagatacgcctccggacctgtgggaaaggccctgagcgacgcatgtatgggcacaatcgcctccttcctgtctaagtaccaggacatcatcatcgaacaccagaaggtggtgaagggcaaccagaagagactggagagcctgcgggagctggccggcaaggaaaacctggaataccctagcgtgaccctgccacctcagcctcacaccaaggagggcgttgatgcctacaacgaagtgatcgcccgggtgcgaatgtgggtgaacctgaacctgtggcagaagctgaagctaagcagagatgatgccaagcctctgctgagactgaagggattcccttcctttcctctggtcgagagacaggccaacgaagtggactggtgggacatggtgtgtaacgtgaagaagctgatcaacgagaaaaaggaggatggcaaggtgttttggcagaatctggctggctacaagagacaggaagccctgagaccatacctgagcagcgaggaagatcggaagaagggaaagaaattcgctcggtaccagctgggcgacctgctgctgcacctggaaaagaagcacggcgaggactggggaaaggtgtacgacgaggcctgggagcggattgacaagaaagtggaaggcctgagcaagcacatcaagctggaagaggaacggagaagcgaggacgcccagagcaaggccgccctgaccgactggctgcgggctaaggccagcttcgtgatcgagggcctgaaggaggccgacaaggacgagttctgcagatgcgagctgaagctgcagaagtggtacggggacctgcggggaaagcccttcgccatcgaagccgagaacagcatcctggacatcagcggcttcagcaagcagtacaactgtgccttcatctggcagaaggacggcgtgaagaagctgaacctgtacctgatcatcaactacttcaagggcggcaagctgcggttcaagaagatcaaacctgaagccttcgaagccaacagattctacaccgtgatcaacaaaaagagcggcgagatcgtgcccatggaggtgaacttcaacttcgacgaccccaacctgatcatcctgcctctggcctttggcaagagacagggcagagaattcatctggaacgacctgctgtccctggaaaccggcagcctgaagctggccaacggaagagtgatcgagaagacactgtacaacagaagaacccggcaggatgagcctgccctgttcgtggccctgaccttcgagcggcgggaggtcctggactcctccaatatcaaaccaatgaacctgatcggcgtggcaagaggcgaaaacatccccgccgtgatcgccctgaccgaccccgagggctgcccactgagccggtttaaggatagcctgggaaacccaacccacatcctgagaatcggcgagagctataaggagaagcagcggaccatccaggccaagaaggaggtggagcagcggagagccggcggctacagccggaagtacgccagcaaagccaagaatctggcagacgatatggtgagaaacaccgctagagatctgctgtactacgccgtgacccaggatgccatgctgatcttcgccaacctgagccggggcttcggccggcagggcaagcggaccttcatggccgagagacagtacacacggatggaggactggctgaccgccaagctggcctacgagggcctgagcaagacctacctgtccaagacactggcccagtacacctccaagacatgcagcaactgtgggtttaccatcaccagcgccgactacgacagggtgctggagaagctgaagaagacagcaacaggctggatgaccacaattaacggcaaggagctgaaggtggagggccagattacctactacaacagatacaagagacagaacgtagtcaaggacctgtccgtcgagctggatagactgagcgaagaatctgtgaacaacgacatctcctcctggacaaagggcagaagcggagaagctctgagcctcctgaagaaaagattctcccatagacccgtgcaggagaagttcgtgtgcctgaactgcggcttcgagacacacgcagccgagcaagccgccctgaacatcgccagatcctggctgttcctgcggagccaggagtacaagaaataccagacaaacaagacaaccggcaacaccgataagagagccttcgtcgagacctggcagtccttttaccggaagaagcttaaggaggtgtggaaacctgccgtgcggtctggcggatctggcggaggctccacaagcgcccaggacgccctgaccttccaggacgtggccgtggacttcacctgggaggagtggggccagctggaccccgcccagcagaacctgtacagggacgtgatgctggagaactaccagaacctgatcagcctgggcttccccgtgagcaagcccgaggtgatcagccagctggagcagggcgaggtgccctgggccctgaagagggccgtggccgagggcagctgccccgactgggaggccaggaccagccccaagaaaaagagaaaagtctaagctgccttctgcggggcttgccttctggccatgcccttcttctctcccttgcacctgtacctcttggtctttgaataaagcctgagtaggaaggctagcaaaaaaaaaaaaaaaaaaaaaaaaaaaaaaaaaaaaaaaaaaaaaaaaaaaaaaaaaaaaaaaaaaaaaaaaaaaaaaaa

SEQ ID NO: 3574 - RNA, 5419 nt, synthetic construct
  source 1..5419: mol_type = other RNA
aggaaataagagagaaaagaagagtaagaagaaatataagagccaccatggcccctaagaagaagcgtaaagtgagccgggtgaacggcagcggcagcggcggcggcatgaaccacgaccaggagttcgacccccctaaggtgtaccctcccgtccccgccgagaagagaaagcccatccgggtcctgagcctgttcgatggcatcgccaccggtctgctggtgctgaaggacctgggcatccaggtggataggtacattgcctccgaggtgtgcgaggactccatcaccgtgggaatggtgcgtcatcagggcaagatcatgtacgtgggcgacgtgcggagcgtgacacagaagcatatccaggagtggggccctttcgacctggtgatcggcggcagcccttgcaatgacctgagcatcgtgaacccagcccggaagggcctgtacgagggaaccggcagactgttcttcgagttttacagactgctgcacgacgcccggcctaaggaaggcgacgaccggcccttcttttggctgttcgagaatgtggtggccatgggagtcagcgacaagcgggatattagccggttcctggagagcaaccccgtgatgatcgatgccaaggaagtgagcgccgcccaccgggccagatacttctggggcaatctgcctggcatgaacagacccctggccagcaccgtgaacgacaagctggagctgcaggagtgcctggagcacggccggatcgccaagttcagcaaggtgagaaccatcaccacccgaagcaacagcatcaaacaaggcaaggaccagcactttcctgtgttcatgaacgagaaggaggacatcctgtggtgtaccgagatggagagagtgttcgggttcccagtccactacacagatgtcagcaacatgtctagactggccagacagagactgctgggaagaagctggtccgtccctgtgatcagacacctgttcgcccctctgaaggagtacttcgcctgcgtgagcagcggcaacagcaacgccaacagccggggccccagcttctctagcggcctggtgccactgtccctgagagggagccacatgggccccatggagatctacaaaaccgtgagcgcctggaagcggcagcctgtgcgcgtgctgagcctgtttcggaatatcgataaagtcctgaaaagcctgggattcctggagagcggctctggctccggcggtggcaccctgaagtacgtggaggatgtgacaaacgtggtcagacgggatgtggagaagtggggccccttcgatctggtgtacggcagcacccaacccctgggcagctcttgtgaccggtgccctggctggtacatgtttcagttccaccggatcctgcagtacgccctgccgagacaggagtcccagcggccattcttttggattttcatggacaacttgctgctgaccgaggatgaccaggaaactaccactcggttcctgcagaccgaagccgtgaccctgcaggacgtgagaggccgggactaccagaacgccatgcgggtgtggtccaacatccctggactgaaaagcaagcacgcacctctgacccctaaagaagaggagtacctgcaggcccaggtgcggagcagaagcaagctggacgcccctaaggtggatctgctggtgaagaattgcctcctgcccctgagagagtacttcaagtatttcagccagaatagtctgcccctgggcggcccaagcagcggcgcccctcctcccagcggcggcagcccagccggctccccaacctctaccgaggagggcacctctgagtccgccacccccgagagcggccctggcacctccaccgagcccagcgagggcagcgcacccggcagccctgccggcagccccacctccacagaggagggaaccagcaccgagcccagcgaaggcagcgccccaggcaccagcaccgagcctagtgagggcggctctggcggcggcagcgcccaggagattaaacggatcaacaagatcagaagaagacttgtgaaagacagcaacaccaagaaggccggcaagacaggccccatgaaaaccctgctggttagagtgatgacacccgatctgagagagcggctggaaaacctgagaaagaagcctgaaaatatcccccagcccatcagcaatacatctagagccaacctgaataagctgctgaccgattacaccgaaatgaagaaggcgatcctgcatgtgtactgggaagagttccagaaggaccctgtgggcctgatgagccgggtggcccagcctgccagcaagaagatcgatcagaacaagctgaaacctgagatggacgagaagggcaacctgaccaccgccggctttgcctgctctcagtgtggccagcccctgttcgtgtacaagctggagcaggtgtctgagaagggcaaggcttacaccaactacttcggacggtgcaatgtggccgagcacgaaaagctgatcctgctggcccagctgaagcccgagaaggatagcgacgaagccgtgacatatagcctgggaaagtttgggcagagggccctggatttctacagcattcatgtgaccaaggagtccacccaccccgtgaagcccctggcccagatcgccggaaacagatacgcctccggacctgtgggaaaggccctgagcgacgcatgtatgggcacaatcgcctccttcctgtctaagtaccaggacatcatcatcgaacaccagaaggtggtgaagggcaaccagaagagactggagagcctgcgggagctggccggcaaggaaaacctggaataccctagcgtgaccctgccacctcagcctcacaccaaggagggcgttgatgcctacaacgaagtgatcgcccgggtgcgaatgtgggtgaacctgaacctgtggcagaagctgaagctaagcagagatgatgccaagcctctgctgagactgaagggattcccttcctttcctctggtcgagagacaggccaacgaagtggactggtgggacatggtgtgtaacgtgaagaagctgatcaacgagaaaaaggaggatggcaaggtgttttggcagaatctggctggctacaagagacaggaagccctgagaccatacctgagcagcgaggaagatcggaagaagggaaagaaattcgctcggtaccagctgggcgacctgctgctgcacctggaaaagaagcacggcgaggactggggaaaggtgtacgacgaggcctgggagcggattgacaagaaagtggaaggcctgagcaagcacatcaagctggaagaggaacggagaagcgaggacgcccagagcaaggccgccctgaccgactggctgcgggctaaggccagcttcgtgatcgagggcctgaaggaggccgacaaggacgagttctgcagatgcgagctgaagctgcagaagtggtacggggacctgcggggaaagcccttcgccatcgaagccgagaacagcatcctggacatcagcggcttcagcaagcagtacaactgtgccttcatctggcagaaggacggcgtgaagaagctgaacctgtacctgatcatcaactacttcaagggcggcaagctgcggttcaagaagatcaaacctgaagccttcgaagccaacagattctacaccgtgatcaacaaaaagagcggcgagatcgtgcccatggaggtgaacttcaacttcgacgaccccaacctgatcatcctgcctctggcctttggcaagagacagggcagagaattcatctggaacgacctgctgtccctggaaaccggcagcctgaagctggccaacggaagagtgatcgagaagacactgtacaacagaagaacccggcaggatgagcctgccctgttcgtggccctgaccttcgagcggcgggaggtcctggactcctccaatatcaaaccaatgaacctgatcggcgtggcaagaggcgaaaacatccccgccgtgatcgccctgaccgaccccgagggctgcccactgagccggtttaaggatagcctgggaaacccaacccacatcctgagaatcggcgagagctataaggagaagcagcggaccatccaggccaagaaggaggtggagcagcggagagccggcggctacagccggaagtacgccagcaaagccaagaatctggcagacgatatggtgagaaacaccgctagagatctgctgtactacgccgtgacccaggatgccatgctgatcttcgccaacctgagccggggcttcggccggcagggcaagcggaccttcatggccgagagacagtacacacggatggaggactggctgaccgccaagctggcctacgagggcctgagcaagacctacctgtccaagacactggcccagtacacctccaagacatgcagcaactgtgggtttaccatcaccagcgccgactacgacagggtgctggagaagctgaagaagacagcaacaggctggatgaccacaattaacggcaaggagctgaaggtggagggccagattacctactacaacagatacaagagacagaacgtagtcaaggacctgtccgtcgagctggatagactgagcgaagaatctgtgaacaacgacatctcctcctggacaaagggcagaagcggagaagctctgagcctcctgaagaaaagattctcccatagacccgtgcaggagaagttcgtgtgcctgaactgcggcttcgagacacacgcagccgagcaagccgccctgaacatcgccagatcctggctgttcctgcggagccaggagtacaagaaataccagacaaacaagacaaccggcaacaccgataagagagccttcgtcgagacctggcagtccttttaccggaagaagcttaaggaggtgtggaaacctgccgtgcggtctggcggatctggcggaggctccacaagccaggtgcccgtgatcttcgaggacgtggccgtgtacttctgggaggaggagtgggagatgctggaggagtggcagaaggagctgtacaaggagaccatgaaggagaactacaagaccctggtgagcctgggcatggagctgcccaccgagaagcccgacctgatcgtgaggatcgagagggaggagaacccctgcgtgaaggcccagtgggacagcagggacaagaccaggtggaggaacagcaccagccccaagaaaaagagaaaagtctaagctgccttctgcggggcttgccttctggccatgcccttcttctctcccttgcacctgtacctcttggtctttgaataaagcctgagtaggaaggctagcaaaaaaaaaaaaaaaaaaaaaaaaaaaaaaaaaaaaaaaaaaaaaaaaaaaaaaaaaaaaaaaaaaaaaaaaaaaaaaaa

SEQ ID NO: 3575 - RNA, 5419 nt, synthetic construct
  source 1..5419: mol_type = other RNA
aggaaataagagagaaaagaagagtaagaagaaatataagagccaccatggcccctaagaagaagcgtaaagtgagccgggtgaacggcagcggcagcggcggcggcatgaaccacgaccaggagttcgacccccctaaggtgtaccctcccgtccccgccgagaagagaaagcccatccgggtcctgagcctgttcgatggcatcgccaccggtctgctggtgctgaaggacctgggcatccaggtggataggtacattgcctccgaggtgtgcgaggactccatcaccgtgggaatggtgcgtcatcagggcaagatcatgtacgtgggcgacgtgcggagcgtgacacagaagcatatccaggagtggggccctttcgacctggtgatcggcggcagcccttgcaatgacctgagcatcgtgaacccagcccggaagggcctgtacgagggaaccggcagactgttcttcgagttttacagactgctgcacgacgcccggcctaaggaaggcgacgaccggcccttcttttggctgttcgagaatgtggtggccatgggagtcagcgacaagcgggatattagccggttcctggagagcaaccccgtgatgatcgatgccaaggaagtgagcgccgcccaccgggccagatacttctggggcaatctgcctggcatgaacagacccctggccagcaccgtgaacgacaagctggagctgcaggagtgcctggagcacggccggatcgccaagttcagcaaggtgagaaccatcaccacccgaagcaacagcatcaaacaaggcaaggaccagcactttcctgtgttcatgaacgagaaggaggacatcctgtggtgtaccgagatggagagagtgttcgggttcccagtccactacacagatgtcagcaacatgtctagactggccagacagagactgctgggaagaagctggtccgtccctgtgatcagacacctgttcgcccctctgaaggagtacttcgcctgcgtgagcagcggcaacagcaacgccaacagccggggccccagcttctctagcggcctggtgccactgtccctgagagggagccacatgggccccatggagatctacaaaaccgtgagcgcctggaagcggcagcctgtgcgcgtgctgagcctgtttcggaatatcgataaagtcctgaaaagcctgggattcctggagagcggctctggctccggcggtggcaccctgaagtacgtggaggatgtgacaaacgtggtcagacgggatgtggagaagtggggccccttcgatctggtgtacggcagcacccaacccctgggcagctcttgtgaccggtgccctggctggtacatgtttcagttccaccggatcctgcagtacgccctgccgagacaggagtcccagcggccattcttttggattttcatggacaacttgctgctgaccgaggatgaccaggaaactaccactcggttcctgcagaccgaagccgtgaccctgcaggacgtgagaggccgggactaccagaacgccatgcgggtgtggtccaacatccctggactgaaaagcaagcacgcacctctgacccctaaagaagaggagtacctgcaggcccaggtgcggagcagaagcaagctggacgcccctaaggtggatctgctggtgaagaattgcctcctgcccctgagagagtacttcaagtatttcagccagaatagtctgcccctgggcggcccaagcagcggcgcccctcctcccagcggcggcagcccagccggctccccaacctctaccgaggagggcacctctgagtccgccacccccgagagcggccctggcacctccaccgagcccagcgagggcagcgcacccggcagccctgccggcagccccacctccacagaggagggaaccagcaccgagcccagcgaaggcagcgccccaggcaccagcaccgagcctagtgagggcggctctggcggcggcagcgcccaggagattaaacggatcaacaagatcagaagaagacttgtgaaagacagcaacaccaagaaggccggcaagacaggccccatgaaaaccctgctggttagagtgatgacacccgatctgagagagcggctggaaaacctgagaaagaagcctgaaaatatcccccagcccatcagcaatacatctagagccaacctgaataagctgctgaccgattacaccgaaatgaagaaggcgatcctgcatgtgtactgggaagagttccagaaggaccctgtgggcctgatgagccgggtggcccagcctgccagcaagaagatcgatcagaacaagctgaaacctgagatggacgagaagggcaacctgaccaccgccggctttgcctgctctcagtgtggccagcccctgttcgtgtacaagctggagcaggtgtctgagaagggcaaggcttacaccaactacttcggacggtgcaatgtggccgagcacgaaaagctgatcctgctggcccagctgaagcccgagaaggatagcgacgaagccgtgacatatagcctgggaaagtttgggcagagggccctggatttctacagcattcatgtgaccaaggagtccacccaccccgtgaagcccctggcccagatcgccggaaacagatacgcctccggacctgtgggaaaggccctgagcgacgcatgtatgggcacaatcgcctccttcctgtctaagtaccaggacatcatcatcgaacaccagaaggtggtgaagggcaaccagaagagactggagagcctgcgggagctggccggcaaggaaaacctggaataccctagcgtgaccctgccacctcagcctcacaccaaggagggcgttgatgcctacaacgaagtgatcgcccgggtgcgaatgtgggtgaacctgaacctgtggcagaagctgaagctaagcagagatgatgccaagcctctgctgagactgaagggattcccttcctttcctctggtcgagagacaggccaacgaagtggactggtgggacatggtgtgtaacgtgaagaagctgatcaacgagaaaaaggaggatggcaaggtgttttggcagaatctggctggctacaagagacaggaagccctgagaccatacctgagcagcgaggaagatcggaagaagggaaagaaattcgctcggtaccagctgggcgacctgctgctgcacctggaaaagaagcacggcgaggactggggaaaggtgtacgacgaggcctgggagcggattgacaagaaagtggaaggcctgagcaagcacatcaagctggaagaggaacggagaagcgaggacgcccagagcaaggccgccctgaccgactggctgcgggctaaggccagcttcgtgatcgagggcctgaaggaggccgacaaggacgagttctgcagatgcgagctgaagctgcagaagtggtacggggacctgcggggaaagcccttcgccatcgaagccgagaacagcatcctggacatcagcggcttcagcaagcagtacaactgtgccttcatctggcagaaggacggcgtgaagaagctgaacctgtacctgatcatcaactacttcaagggcggcaagctgcggttcaagaagatcaaacctgaagccttcgaagccaacagattctacaccgtgatcaacaaaaagagcggcgagatcgtgcccatggaggtgaacttcaacttcgacgaccccaacctgatcatcctgcctctggcctttggcaagagacagggcagagaattcatctggaacgacctgctgtccctggaaaccggcagcctgaagctggccaacggaagagtgatcgagaagacactgtacaacagaagaacccggcaggatgagcctgccctgttcgtggccctgaccttcgagcggcgggaggtcctggactcctccaatatcaaaccaatgaacctgatcggcgtggcaagaggcgaaaacatccccgccgtgatcgccctgaccgaccccgagggctgcccactgagccggtttaaggatagcctgggaaacccaacccacatcctgagaatcggcgagagctataaggagaagcagcggaccatccaggccaagaaggaggtggagcagcggagagccggcggctacagccggaagtacgccagcaaagccaagaatctggcagacgatatggtgagaaacaccgctagagatctgctgtactacgccgtgacccaggatgccatgctgatcttcgccaacctgagccggggcttcggccggcagggcaagcggaccttcatggccgagagacagtacacacggatggaggactggctgaccgccaagctggcctacgagggcctgagcaagacctacctgtccaagacactggcccagtacacctccaagacatgcagcaactgtgggtttaccatcaccagcgccgactacgacagggtgctggagaagctgaagaagacagcaacaggctggatgaccacaattaacggcaaggagctgaaggtggagggccagattacctactacaacagatacaagagacagaacgtagtcaaggacctgtccgtcgagctggatagactgagcgaagaatctgtgaacaacgacatctcctcctggacaaagggcagaagcggagaagctctgagcctcctgaagaaaagattctcccatagacccgtgcaggagaagttcgtgtgcctgaactgcggcttcgagacacacgcagccgagcaagccgccctgaacatcgccagatcctggctgttcctgcggagccaggagtacaagaaataccagacaaacaagacaaccggcaacaccgataagagagccttcgtcgagacctggcagtccttttaccggaagaagcttaaggaggtgtggaaacctgccgtgcggtctggcggatctggcggaggctccacaagcgaggagctgcccgtggccttcgaggacgtggccgtgtacttcaccagggaggagtggggcatgctggacaagaggaggaaggagctgtacagggacgtgatgaggaggaactacgagctgctggccagcctgggccccgccgccgccaagcccgacctgatcagcaagctggagaggggcgccgccccctggatcaaggaccccaacggccccaagtggggcaagggcaagaagaagatggtgaccagccccaagaaaaagagaaaagtctaagctgccttctgcggggcttgccttctggccatgcccttcttctctcccttgcacctgtacctcttggtctttgaataaagcctgagtaggaaggctagcaaaaaaaaaaaaaaaaaaaaaaaaaaaaaaaaaaaaaaaaaaaaaaaaaaaaaaaaaaaaaaaaaaaaaaaaaaaaaaaa

SEQ ID NO: 3576 - RNA, 5419 nt, synthetic construct
  source 1..5419: mol_type = other RNA
aggaaataagagagaaaagaagagtaagaagaaatataagagccaccatggcccctaagaagaagcgtaaagtgagccgggtgaacggcagcggcagcggcggcggcatgaaccacgaccaggagttcgacccccctaaggtgtaccctcccgtccccgccgagaagagaaagcccatccgggtcctgagcctgttcgatggcatcgccaccggtctgctggtgctgaaggacctgggcatccaggtggataggtacattgcctccgaggtgtgcgaggactccatcaccgtgggaatggtgcgtcatcagggcaagatcatgtacgtgggcgacgtgcggagcgtgacacagaagcatatccaggagtggggccctttcgacctggtgatcggcggcagcccttgcaatgacctgagcatcgtgaacccagcccggaagggcctgtacgagggaaccggcagactgttcttcgagttttacagactgctgcacgacgcccggcctaaggaaggcgacgaccggcccttcttttggctgttcgagaatgtggtggccatgggagtcagcgacaagcgggatattagccggttcctggagagcaaccccgtgatgatcgatgccaaggaagtgagcgccgcccaccgggccagatacttctggggcaatctgcctggcatgaacagacccctggccagcaccgtgaacgacaagctggagctgcaggagtgcctggagcacggccggatcgccaagttcagcaaggtgagaaccatcaccacccgaagcaacagcatcaaacaaggcaaggaccagcactttcctgtgttcatgaacgagaaggaggacatcctgtggtgtaccgagatggagagagtgttcgggttcccagtccactacacagatgtcagcaacatgtctagactggccagacagagactgctgggaagaagctggtccgtccctgtgatcagacacctgttcgcccctctgaaggagtacttcgcctgcgtgagcagcggcaacagcaacgccaacagccggggccccagcttctctagcggcctggtgccactgtccctgagagggagccacatgggccccatggagatctacaaaaccgtgagcgcctggaagcggcagcctgtgcgcgtgctgagcctgtttcggaatatcgataaagtcctgaaaagcctgggattcctggagagcggctctggctccggcggtggcaccctgaagtacgtggaggatgtgacaaacgtggtcagacgggatgtggagaagtggggccccttcgatctggtgtacggcagcacccaacccctgggcagctcttgtgaccggtgccctggctggtacatgtttcagttccaccggatcctgcagtacgccctgccgagacaggagtcccagcggccattcttttggattttcatggacaacttgctgctgaccgaggatgaccaggaaactaccactcggttcctgcagaccgaagccgtgaccctgcaggacgtgagaggccgggactaccagaacgccatgcgggtgtggtccaacatccctggactgaaaagcaagcacgcacctctgacccctaaagaagaggagtacctgcaggcccaggtgcggagcagaagcaagctggacgcccctaaggtggatctgctggtgaagaattgcctcctgcccctgagagagtacttcaagtatttcagccagaatagtctgcccctgggcggcccaagcagcggcgcccctcctcccagcggcggcagcccagccggctccccaacctctaccgaggagggcacctctgagtccgccacccccgagagcggccctggcacctccaccgagcccagcgagggcagcgcacccggcagccctgccggcagccccacctccacagaggagggaaccagcaccgagcccagcgaaggcagcgccccaggcaccagcaccgagcctagtgagggcggctctggcggcggcagcgcccaggagattaaacggatcaacaagatcagaagaagacttgtgaaagacagcaacaccaagaaggccggcaagacaggccccatgaaaaccctgctggttagagtgatgacacccgatctgagagagcggctggaaaacctgagaaagaagcctgaaaatatcccccagcccatcagcaatacatctagagccaacctgaataagctgctgaccgattacaccgaaatgaagaaggcgatcctgcatgtgtactgggaagagttccagaaggaccctgtgggcctgatgagccgggtggcccagcctgccagcaagaagatcgatcagaacaagctgaaacctgagatggacgagaagggcaacctgaccaccgccggctttgcctgctctcagtgtggccagcccctgttcgtgtacaagctggagcaggtgtctgagaagggcaaggcttacaccaactacttcggacggtgcaatgtggccgagcacgaaaagctgatcctgctggcccagctgaagcccgagaaggatagcgacgaagccgtgacatatagcctgggaaagtttgggcagagggccctggatttctacagcattcatgtgaccaaggagtccacccaccccgtgaagcccctggcccagatcgccggaaacagatacgcctccggacctgtgggaaaggccctgagcgacgcatgtatgggcacaatcgcctccttcctgtctaagtaccaggacatcatcatcgaacaccagaaggtggtgaagggcaaccagaagagactggagagcctgcgggagctggccggcaaggaaaacctggaataccctagcgtgaccctgccacctcagcctcacaccaaggagggcgttgatgcctacaacgaagtgatcgcccgggtgcgaatgtgggtgaacctgaacctgtggcagaagctgaagctaagcagagatgatgccaagcctctgctgagactgaagggattcccttcctttcctctggtcgagagacaggccaacgaagtggactggtgggacatggtgtgtaacgtgaagaagctgatcaacgagaaaaaggaggatggcaaggtgttttggcagaatctggctggctacaagagacaggaagccctgagaccatacctgagcagcgaggaagatcggaagaagggaaagaaattcgctcggtaccagctgggcgacctgctgctgcacctggaaaagaagcacggcgaggactggggaaaggtgtacgacgaggcctgggagcggattgacaagaaagtggaaggcctgagcaagcacatcaagctggaagaggaacggagaagcgaggacgcccagagcaaggccgccctgaccgactggctgcgggctaaggccagcttcgtgatcgagggcctgaaggaggccgacaaggacgagttctgcagatgcgagctgaagctgcagaagtggtacggggacctgcggggaaagcccttcgccatcgaagccgagaacagcatcctggacatcagcggcttcagcaagcagtacaactgtgccttcatctggcagaaggacggcgtgaagaagctgaacctgtacctgatcatcaactacttcaagggcggcaagctgcggttcaagaagatcaaacctgaagccttcgaagccaacagattctacaccgtgatcaacaaaaagagcggcgagatcgtgcccatggaggtgaacttcaacttcgacgaccccaacctgatcatcctgcctctggcctttggcaagagacagggcagagaattcatctggaacgacctgctgtccctggaaaccggcagcctgaagctggccaacggaagagtgatcgagaagacactgtacaacagaagaacccggcaggatgagcctgccctgttcgtggccctgaccttcgagcggcgggaggtcctggactcctccaatatcaaaccaatgaacctgatcggcgtggcaagaggcgaaaacatccccgccgtgatcgccctgaccgaccccgagggctgcccactgagccggtttaaggatagcctgggaaacccaacccacatcctgagaatcggcgagagctataaggagaagcagcggaccatccaggccaagaaggaggtggagcagcggagagccggcggctacagccggaagtacgccagcaaagccaagaatctggcagacgatatggtgagaaacaccgctagagatctgctgtactacgccgtgacccaggatgccatgctgatcttcgccaacctgagccggggcttcggccggcagggcaagcggaccttcatggccgagagacagtacacacggatggaggactggctgaccgccaagctggcctacgagggcctgagcaagacctacctgtccaagacactggcccagtacacctccaagacatgcagcaactgtgggtttaccatcaccagcgccgactacgacagggtgctggagaagctgaagaagacagcaacaggctggatgaccacaattaacggcaaggagctgaaggtggagggccagattacctactacaacagatacaagagacagaacgtagtcaaggacctgtccgtcgagctggatagactgagcgaagaatctgtgaacaacgacatctcctcctggacaaagggcagaagcggagaagctctgagcctcctgaagaaaagattctcccatagacccgtgcaggagaagttcgtgtgcctgaactgcggcttcgagacacacgcagccgagcaagccgccctgaacatcgccagatcctggctgttcctgcggagccaggagtacaagaaataccagacaaacaagacaaccggcaacaccgataagagagccttcgtcgagacctggcagtccttttaccggaagaagcttaaggaggtgtggaaacctgccgtgcggtctggcggatctggcggaggctccacaagccccctggagctggtgaccttcaaggacgtggccgtggacttcagctgggaggagtggggccacctggagcccagccagaaggagctgtacagggaggtgatgctggagaactacaggaacctggtgtgcctgggcctggccatcagcaagcccgacgtgatcttccagctggagcagggcgaggccccctggatgcccgagagggagggccccaagtgcaggtgcgccgactggaagaccaggaccagccccaagaaaaagagaaaagtctaagctgccttctgcggggcttgccttctggccatgcccttcttctctcccttgcacctgtacctcttggtctttgaataaagcctgagtaggaaggctagcaaaaaaaaaaaaaaaaaaaaaaaaaaaaaaaaaaaaaaaaaaaaaaaaaaaaaaaaaaaaaaaaaaaaaaaaaaaaaaaa

SEQ ID NO: 3577 - RNA, 5419 nt, synthetic construct
  source 1..5419: mol_type = other RNA
aggaaataagagagaaaagaagagtaagaagaaatataagagccaccatggcccctaagaagaagcgtaaagtgagccgggtgaacggcagcggcagcggcggcggcatgaaccacgaccaggagttcgacccccctaaggtgtaccctcccgtccccgccgagaagagaaagcccatccgggtcctgagcctgttcgatggcatcgccaccggtctgctggtgctgaaggacctgggcatccaggtggataggtacattgcctccgaggtgtgcgaggactccatcaccgtgggaatggtgcgtcatcagggcaagatcatgtacgtgggcgacgtgcggagcgtgacacagaagcatatccaggagtggggccctttcgacctggtgatcggcggcagcccttgcaatgacctgagcatcgtgaacccagcccggaagggcctgtacgagggaaccggcagactgttcttcgagttttacagactgctgcacgacgcccggcctaaggaaggcgacgaccggcccttcttttggctgttcgagaatgtggtggccatgggagtcagcgacaagcgggatattagccggttcctggagagcaaccccgtgatgatcgatgccaaggaagtgagcgccgcccaccgggccagatacttctggggcaatctgcctggcatgaacagacccctggccagcaccgtgaacgacaagctggagctgcaggagtgcctggagcacggccggatcgccaagttcagcaaggtgagaaccatcaccacccgaagcaacagcatcaaacaaggcaaggaccagcactttcctgtgttcatgaacgagaaggaggacatcctgtggtgtaccgagatggagagagtgttcgggttcccagtccactacacagatgtcagcaacatgtctagactggccagacagagactgctgggaagaagctggtccgtccctgtgatcagacacctgttcgcccctctgaaggagtacttcgcctgcgtgagcagcggcaacagcaacgccaacagccggggccccagcttctctagcggcctggtgccactgtccctgagagggagccacatgggccccatggagatctacaaaaccgtgagcgcctggaagcggcagcctgtgcgcgtgctgagcctgtttcggaatatcgataaagtcctgaaaagcctgggattcctggagagcggctctggctccggcggtggcaccctgaagtacgtggaggatgtgacaaacgtggtcagacgggatgtggagaagtggggccccttcgatctggtgtacggcagcacccaacccctgggcagctcttgtgaccggtgccctggctggtacatgtttcagttccaccggatcctgcagtacgccctgccgagacaggagtcccagcggccattcttttggattttcatggacaacttgctgctgaccgaggatgaccaggaaactaccactcggttcctgcagaccgaagccgtgaccctgcaggacgtgagaggccgggactaccagaacgccatgcgggtgtggtccaacatccctggactgaaaagcaagcacgcacctctgacccctaaagaagaggagtacctgcaggcccaggtgcggagcagaagcaagctggacgcccctaaggtggatctgctggtgaagaattgcctcctgcccctgagagagtacttcaagtatttcagccagaatagtctgcccctgggcggcccaagcagcggcgcccctcctcccagcggcggcagcccagccggctccccaacctctaccgaggagggcacctctgagtccgccacccccgagagcggccctggcacctccaccgagcccagcgagggcagcgcacccggcagccctgccggcagccccacctccacagaggagggaaccagcaccgagcccagcgaaggcagcgccccaggcaccagcaccgagcctagtgagggcggctctggcggcggcagcgcccaggagattaaacggatcaacaagatcagaagaagacttgtgaaagacagcaacaccaagaaggccggcaagacaggccccatgaaaaccctgctggttagagtgatgacacccgatctgagagagcggctggaaaacctgagaaagaagcctgaaaatatcccccagcccatcagcaatacatctagagccaacctgaataagctgctgaccgattacaccgaaatgaagaaggcgatcctgcatgtgtactgggaagagttccagaaggaccctgtgggcctgatgagccgggtggcccagcctgccagcaagaagatcgatcagaacaagctgaaacctgagatggacgagaagggcaacctgaccaccgccggctttgcctgctctcagtgtggccagcccctgttcgtgtacaagctggagcaggtgtctgagaagggcaaggcttacaccaactacttcggacggtgcaatgtggccgagcacgaaaagctgatcctgctggcccagctgaagcccgagaaggatagcgacgaagccgtgacatatagcctgggaaagtttgggcagagggccctggatttctacagcattcatgtgaccaaggagtccacccaccccgtgaagcccctggcccagatcgccggaaacagatacgcctccggacctgtgggaaaggccctgagcgacgcatgtatgggcacaatcgcctccttcctgtctaagtaccaggacatcatcatcgaacaccagaaggtggtgaagggcaaccagaagagactggagagcctgcgggagctggccggcaaggaaaacctggaataccctagcgtgaccctgccacctcagcctcacaccaaggagggcgttgatgcctacaacgaagtgatcgcccgggtgcgaatgtgggtgaacctgaacctgtggcagaagctgaagctaagcagagatgatgccaagcctctgctgagactgaagggattcccttcctttcctctggtcgagagacaggccaacgaagtggactggtgggacatggtgtgtaacgtgaagaagctgatcaacgagaaaaaggaggatggcaaggtgttttggcagaatctggctggctacaagagacaggaagccctgagaccatacctgagcagcgaggaagatcggaagaagggaaagaaattcgctcggtaccagctgggcgacctgctgctgcacctggaaaagaagcacggcgaggactggggaaaggtgtacgacgaggcctgggagcggattgacaagaaagtggaaggcctgagcaagcacatcaagctggaagaggaacggagaagcgaggacgcccagagcaaggccgccctgaccgactggctgcgggctaaggccagcttcgtgatcgagggcctgaaggaggccgacaaggacgagttctgcagatgcgagctgaagctgcagaagtggtacggggacctgcggggaaagcccttcgccatcgaagccgagaacagcatcctggacatcagcggcttcagcaagcagtacaactgtgccttcatctggcagaaggacggcgtgaagaagctgaacctgtacctgatcatcaactacttcaagggcggcaagctgcggttcaagaagatcaaacctgaagccttcgaagccaacagattctacaccgtgatcaacaaaaagagcggcgagatcgtgcccatggaggtgaacttcaacttcgacgaccccaacctgatcatcctgcctctggcctttggcaagagacagggcagagaattcatctggaacgacctgctgtccctggaaaccggcagcctgaagctggccaacggaagagtgatcgagaagacactgtacaacagaagaacccggcaggatgagcctgccctgttcgtggccctgaccttcgagcggcgggaggtcctggactcctccaatatcaaaccaatgaacctgatcggcgtggcaagaggcgaaaacatccccgccgtgatcgccctgaccgaccccgagggctgcccactgagccggtttaaggatagcctgggaaacccaacccacatcctgagaatcggcgagagctataaggagaagcagcggaccatccaggccaagaaggaggtggagcagcggagagccggcggctacagccggaagtacgccagcaaagccaagaatctggcagacgatatggtgagaaacaccgctagagatctgctgtactacgccgtgacccaggatgccatgctgatcttcgccaacctgagccggggcttcggccggcagggcaagcggaccttcatggccgagagacagtacacacggatggaggactggctgaccgccaagctggcctacgagggcctgagcaagacctacctgtccaagacactggcccagtacacctccaagacatgcagcaactgtgggtttaccatcaccagcgccgactacgacagggtgctggagaagctgaagaagacagcaacaggctggatgaccacaattaacggcaaggagctgaaggtggagggccagattacctactacaacagatacaagagacagaacgtagtcaaggacctgtccgtcgagctggatagactgagcgaagaatctgtgaacaacgacatctcctcctggacaaagggcagaagcggagaagctctgagcctcctgaagaaaagattctcccatagacccgtgcaggagaagttcgtgtgcctgaactgcggcttcgagacacacgcagccgagcaagccgccctgaacatcgccagatcctggctgttcctgcggagccaggagtacaagaaataccagacaaacaagacaaccggcaacaccgataagagagccttcgtcgagacctggcagtccttttaccggaagaagcttaaggaggtgtggaaacctgccgtgcggtctggcggatctggcggaggctccacaagcgagatgggcctgctgaccttcagggacatcgccatcgagttcagcctggccgagtggcagtgcctggaccacgcccagaggaacctgtacagggacgtgatgctggagaactacaggaacctggtgagcctgggcatcgccgtgagcaagcccgacctgatcacctgcctggagcagaacaaggagcccaggaacatcaagaggaacgagatggtggccaagcaccccggcagggagaagagcaccagccccaagaaaaagagaaaagtctaagctgccttctgcggggcttgccttctggccatgcccttcttctctcccttgcacctgtacctcttggtctttgaataaagcctgagtaggaaggctagcaaaaaaaaaaaaaaaaaaaaaaaaaaaaaaaaaaaaaaaaaaaaaaaaaaaaaaaaaaaaaaaaaaaaaaaaaaaaaaaa

SEQ ID NO: 3578 - RNA, 5419 nt, synthetic construct
  source 1..5419: mol_type = other RNA
aggaaataagagagaaaagaagagtaagaagaaatataagagccaccatggcccctaagaagaagcgtaaagtgagccgggtgaacggcagcggcagcggcggcggcatgaaccacgaccaggagttcgacccccctaaggtgtaccctcccgtccccgccgagaagagaaagcccatccgggtcctgagcctgttcgatggcatcgccaccggtctgctggtgctgaaggacctgggcatccaggtggataggtacattgcctccgaggtgtgcgaggactccatcaccgtgggaatggtgcgtcatcagggcaagatcatgtacgtgggcgacgtgcggagcgtgacacagaagcatatccaggagtggggccctttcgacctggtgatcggcggcagcccttgcaatgacctgagcatcgtgaacccagcccggaagggcctgtacgagggaaccggcagactgttcttcgagttttacagactgctgcacgacgcccggcctaaggaaggcgacgaccggcccttcttttggctgttcgagaatgtggtggccatgggagtcagcgacaagcgggatattagccggttcctggagagcaaccccgtgatgatcgatgccaaggaagtgagcgccgcccaccgggccagatacttctggggcaatctgcctggcatgaacagacccctggccagcaccgtgaacgacaagctggagctgcaggagtgcctggagcacggccggatcgccaagttcagcaaggtgagaaccatcaccacccgaagcaacagcatcaaacaaggcaaggaccagcactttcctgtgttcatgaacgagaaggaggacatcctgtggtgtaccgagatggagagagtgttcgggttcccagtccactacacagatgtcagcaacatgtctagactggccagacagagactgctgggaagaagctggtccgtccctgtgatcagacacctgttcgcccctctgaaggagtacttcgcctgcgtgagcagcggcaacagcaacgccaacagccggggccccagcttctctagcggcctggtgccactgtccctgagagggagccacatgggccccatggagatctacaaaaccgtgagcgcctggaagcggcagcctgtgcgcgtgctgagcctgtttcggaatatcgataaagtcctgaaaagcctgggattcctggagagcggctctggctccggcggtggcaccctgaagtacgtggaggatgtgacaaacgtggtcagacgggatgtggagaagtggggccccttcgatctggtgtacggcagcacccaacccctgggcagctcttgtgaccggtgccctggctggtacatgtttcagttccaccggatcctgcagtacgccctgccgagacaggagtcccagcggccattcttttggattttcatggacaacttgctgctgaccgaggatgaccaggaaactaccactcggttcctgcagaccgaagccgtgaccctgcaggacgtgagaggccgggactaccagaacgccatgcgggtgtggtccaacatccctggactgaaaagcaagcacgcacctctgacccctaaagaagaggagtacctgcaggcccaggtgcggagcagaagcaagctggacgcccctaaggtggatctgctggtgaagaattgcctcctgcccctgagagagtacttcaagtatttcagccagaatagtctgcccctgggcggcccaagcagcggcgcccctcctcccagcggcggcagcccagccggctccccaacctctaccgaggagggcacctctgagtccgccacccccgagagcggccctggcacctccaccgagcccagcgagggcagcgcacccggcagccctgccggcagccccacctccacagaggagggaaccagcaccgagcccagcgaaggcagcgccccaggcaccagcaccgagcctagtgagggcggctctggcggcggcagcgcccaggagattaaacggatcaacaagatcagaagaagacttgtgaaagacagcaacaccaagaaggccggcaagacaggccccatgaaaaccctgctggttagagtgatgacacccgatctgagagagcggctggaaaacctgagaaagaagcctgaaaatatcccccagcccatcagcaatacatctagagccaacctgaataagctgctgaccgattacaccgaaatgaagaaggcgatcctgcatgtgtactgggaagagttccagaaggaccctgtgggcctgatgagccgggtggcccagcctgccagcaagaagatcgatcagaacaagctgaaacctgagatggacgagaagggcaacctgaccaccgccggctttgcctgctctcagtgtggccagcccctgttcgtgtacaagctggagcaggtgtctgagaagggcaaggcttacaccaactacttcggacggtgcaatgtggccgagcacgaaaagctgatcctgctggcccagctgaagcccgagaaggatagcgacgaagccgtgacatatagcctgggaaagtttgggcagagggccctggatttctacagcattcatgtgaccaaggagtccacccaccccgtgaagcccctggcccagatcgccggaaacagatacgcctccggacctgtgggaaaggccctgagcgacgcatgtatgggcacaatcgcctccttcctgtctaagtaccaggacatcatcatcgaacaccagaaggtggtgaagggcaaccagaagagactggagagcctgcgggagctggccggcaaggaaaacctggaataccctagcgtgaccctgccacctcagcctcacaccaaggagggcgttgatgcctacaacgaagtgatcgcccgggtgcgaatgtgggtgaacctgaacctgtggcagaagctgaagctaagcagagatgatgccaagcctctgctgagactgaagggattcccttcctttcctctggtcgagagacaggccaacgaagtggactggtgggacatggtgtgtaacgtgaagaagctgatcaacgagaaaaaggaggatggcaaggtgttttggcagaatctggctggctacaagagacaggaagccctgagaccatacctgagcagcgaggaagatcggaagaagggaaagaaattcgctcggtaccagctgggcgacctgctgctgcacctggaaaagaagcacggcgaggactggggaaaggtgtacgacgaggcctgggagcggattgacaagaaagtggaaggcctgagcaagcacatcaagctggaagaggaacggagaagcgaggacgcccagagcaaggccgccctgaccgactggctgcgggctaaggccagcttcgtgatcgagggcctgaaggaggccgacaaggacgagttctgcagatgcgagctgaagctgcagaagtggtacggggacctgcggggaaagcccttcgccatcgaagccgagaacagcatcctggacatcagcggcttcagcaagcagtacaactgtgccttcatctggcagaaggacggcgtgaagaagctgaacctgtacctgatcatcaactacttcaagggcggcaagctgcggttcaagaagatcaaacctgaagccttcgaagccaacagattctacaccgtgatcaacaaaaagagcggcgagatcgtgcccatggaggtgaacttcaacttcgacgaccccaacctgatcatcctgcctctggcctttggcaagagacagggcagagaattcatctggaacgacctgctgtccctggaaaccggcagcctgaagctggccaacggaagagtgatcgagaagacactgtacaacagaagaacccggcaggatgagcctgccctgttcgtggccctgaccttcgagcggcgggaggtcctggactcctccaatatcaaaccaatgaacctgatcggcgtggcaagaggcgaaaacatccccgccgtgatcgccctgaccgaccccgagggctgcccactgagccggtttaaggatagcctgggaaacccaacccacatcctgagaatcggcgagagctataaggagaagcagcggaccatccaggccaagaaggaggtggagcagcggagagccggcggctacagccggaagtacgccagcaaagccaagaatctggcagacgatatggtgagaaacaccgctagagatctgctgtactacgccgtgacccaggatgccatgctgatcttcgccaacctgagccggggcttcggccggcagggcaagcggaccttcatggccgagagacagtacacacggatggaggactggctgaccgccaagctggcctacgagggcctgagcaagacctacctgtccaagacactggcccagtacacctccaagacatgcagcaactgtgggtttaccatcaccagcgccgactacgacagggtgctggagaagctgaagaagacagcaacaggctggatgaccacaattaacggcaaggagctgaaggtggagggccagattacctactacaacagatacaagagacagaacgtagtcaaggacctgtccgtcgagctggatagactgagcgaagaatctgtgaacaacgacatctcctcctggacaaagggcagaagcggagaagctctgagcctcctgaagaaaagattctcccatagacccgtgcaggagaagttcgtgtgcctgaactgcggcttcgagacacacgcagccgagcaagccgccctgaacatcgccagatcctggctgttcctgcggagccaggagtacaagaaataccagacaaacaagacaaccggcaacaccgataagagagccttcgtcgagacctggcagtccttttaccggaagaagcttaaggaggtgtggaaacctgccgtgcggtctggcggatctggcggaggctccacaagcagccagggcctggtgaccttcagggacgtggccctggacttcagccaggaggagtgggagtggctggaccccagccagaaggacctgtacagggacgtgatgctggagaactacaggaacctggtgtgcctgggcctgagcatcagcaagcccaacatgatcagcctgctggagcagggcaaggagccctggatggtgcagagggagatgagcgacgacccctacaccgactgggagagctggaccagccccaagaaaaagagaaaagtctaagctgccttctgcggggcttgccttctggccatgcccttcttctctcccttgcacctgtacctcttggtctttgaataaagcctgagtaggaaggctagcaaaaaaaaaaaaaaaaaaaaaaaaaaaaaaaaaaaaaaaaaaaaaaaaaaaaaaaaaaaaaaaaaaaaaaaaaaaaaaaa

SEQ ID NO: 3579 - RNA, 5419 nt, synthetic construct
  source 1..5419: mol_type = other RNA
aggaaataagagagaaaagaagagtaagaagaaatataagagccaccatggcccctaagaagaagcgtaaagtgagccgggtgaacggcagcggcagcggcggcggcatgaaccacgaccaggagttcgacccccctaaggtgtaccctcccgtccccgccgagaagagaaagcccatccgggtcctgagcctgttcgatggcatcgccaccggtctgctggtgctgaaggacctgggcatccaggtggataggtacattgcctccgaggtgtgcgaggactccatcaccgtgggaatggtgcgtcatcagggcaagatcatgtacgtgggcgacgtgcggagcgtgacacagaagcatatccaggagtggggccctttcgacctggtgatcggcggcagcccttgcaatgacctgagcatcgtgaacccagcccggaagggcctgtacgagggaaccggcagactgttcttcgagttttacagactgctgcacgacgcccggcctaaggaaggcgacgaccggcccttcttttggctgttcgagaatgtggtggccatgggagtcagcgacaagcgggatattagccggttcctggagagcaaccccgtgatgatcgatgccaaggaagtgagcgccgcccaccgggccagatacttctggggcaatctgcctggcatgaacagacccctggccagcaccgtgaacgacaagctggagctgcaggagtgcctggagcacggccggatcgccaagttcagcaaggtgagaaccatcaccacccgaagcaacagcatcaaacaaggcaaggaccagcactttcctgtgttcatgaacgagaaggaggacatcctgtggtgtaccgagatggagagagtgttcgggttcccagtccactacacagatgtcagcaacatgtctagactggccagacagagactgctgggaagaagctggtccgtccctgtgatcagacacctgttcgcccctctgaaggagtacttcgcctgcgtgagcagcggcaacagcaacgccaacagccggggccccagcttctctagcggcctggtgccactgtccctgagagggagccacatgggccccatggagatctacaaaaccgtgagcgcctggaagcggcagcctgtgcgcgtgctgagcctgtttcggaatatcgataaagtcctgaaaagcctgggattcctggagagcggctctggctccggcggtggcaccctgaagtacgtggaggatgtgacaaacgtggtcagacgggatgtggagaagtggggccccttcgatctggtgtacggcagcacccaacccctgggcagctcttgtgaccggtgccctggctggtacatgtttcagttccaccggatcctgcagtacgccctgccgagacaggagtcccagcggccattcttttggattttcatggacaacttgctgctgaccgaggatgaccaggaaactaccactcggttcctgcagaccgaagccgtgaccctgcaggacgtgagaggccgggactaccagaacgccatgcgggtgtggtccaacatccctggactgaaaagcaagcacgcacctctgacccctaaagaagaggagtacctgcaggcccaggtgcggagcagaagcaagctggacgcccctaaggtggatctgctggtgaagaattgcctcctgcccctgagagagtacttcaagtatttcagccagaatagtctgcccctgggcggcccaagcagcggcgcccctcctcccagcggcggcagcccagccggctccccaacctctaccgaggagggcacctctgagtccgccacccccgagagcggccctggcacctccaccgagcccagcgagggcagcgcacccggcagccctgccggcagccccacctccacagaggagggaaccagcaccgagcccagcgaaggcagcgccccaggcaccagcaccgagcctagtgagggcggctctggcggcggcagcgcccaggagattaaacggatcaacaagatcagaagaagacttgtgaaagacagcaacaccaagaaggccggcaagacaggccccatgaaaaccctgctggttagagtgatgacacccgatctgagagagcggctggaaaacctgagaaagaagcctgaaaatatcccccagcccatcagcaatacatctagagccaacctgaataagctgctgaccgattacaccgaaatgaagaaggcgatcctgcatgtgtactgggaagagttccagaaggaccctgtgggcctgatgagccgggtggcccagcctgccagcaagaagatcgatcagaacaagctgaaacctgagatggacgagaagggcaacctgaccaccgccggctttgcctgctctcagtgtggccagcccctgttcgtgtacaagctggagcaggtgtctgagaagggcaaggcttacaccaactacttcggacggtgcaatgtggccgagcacgaaaagctgatcctgctggcccagctgaagcccgagaaggatagcgacgaagccgtgacatatagcctgggaaagtttgggcagagggccctggatttctacagcattcatgtgaccaaggagtccacccaccccgtgaagcccctggcccagatcgccggaaacagatacgcctccggacctgtgggaaaggccctgagcgacgcatgtatgggcacaatcgcctccttcctgtctaagtaccaggacatcatcatcgaacaccagaaggtggtgaagggcaaccagaagagactggagagcctgcgggagctggccggcaaggaaaacctggaataccctagcgtgaccctgccacctcagcctcacaccaaggagggcgttgatgcctacaacgaagtgatcgcccgggtgcgaatgtgggtgaacctgaacctgtggcagaagctgaagctaagcagagatgatgccaagcctctgctgagactgaagggattcccttcctttcctctggtcgagagacaggccaacgaagtggactggtgggacatggtgtgtaacgtgaagaagctgatcaacgagaaaaaggaggatggcaaggtgttttggcagaatctggctggctacaagagacaggaagccctgagaccatacctgagcagcgaggaagatcggaagaagggaaagaaattcgctcggtaccagctgggcgacctgctgctgcacctggaaaagaagcacggcgaggactggggaaaggtgtacgacgaggcctgggagcggattgacaagaaagtggaaggcctgagcaagcacatcaagctggaagaggaacggagaagcgaggacgcccagagcaaggccgccctgaccgactggctgcgggctaaggccagcttcgtgatcgagggcctgaaggaggccgacaaggacgagttctgcagatgcgagctgaagctgcagaagtggtacggggacctgcggggaaagcccttcgccatcgaagccgagaacagcatcctggacatcagcggcttcagcaagcagtacaactgtgccttcatctggcagaaggacggcgtgaagaagctgaacctgtacctgatcatcaactacttcaagggcggcaagctgcggttcaagaagatcaaacctgaagccttcgaagccaacagattctacaccgtgatcaacaaaaagagcggcgagatcgtgcccatggaggtgaacttcaacttcgacgaccccaacctgatcatcctgcctctggcctttggcaagagacagggcagagaattcatctggaacgacctgctgtccctggaaaccggcagcctgaagctggccaacggaagagtgatcgagaagacactgtacaacagaagaacccggcaggatgagcctgccctgttcgtggccctgaccttcgagcggcgggaggtcctggactcctccaatatcaaaccaatgaacctgatcggcgtggcaagaggcgaaaacatccccgccgtgatcgccctgaccgaccccgagggctgcccactgagccggtttaaggatagcctgggaaacccaacccacatcctgagaatcggcgagagctataaggagaagcagcggaccatccaggccaagaaggaggtggagcagcggagagccggcggctacagccggaagtacgccagcaaagccaagaatctggcagacgatatggtgagaaacaccgctagagatctgctgtactacgccgtgacccaggatgccatgctgatcttcgccaacctgagccggggcttcggccggcagggcaagcggaccttcatggccgagagacagtacacacggatggaggactggctgaccgccaagctggcctacgagggcctgagcaagacctacctgtccaagacactggcccagtacacctccaagacatgcagcaactgtgggtttaccatcaccagcgccgactacgacagggtgctggagaagctgaagaagacagcaacaggctggatgaccacaattaacggcaaggagctgaaggtggagggccagattacctactacaacagatacaagagacagaacgtagtcaaggacctgtccgtcgagctggatagactgagcgaagaatctgtgaacaacgacatctcctcctggacaaagggcagaagcggagaagctctgagcctcctgaagaaaagattctcccatagacccgtgcaggagaagttcgtgtgcctgaactgcggcttcgagacacacgcagccgagcaagccgccctgaacatcgccagatcctggctgttcctgcggagccaggagtacaagaaataccagacaaacaagacaaccggcaacaccgataagagagccttcgtcgagacctggcagtccttttaccggaagaagcttaaggaggtgtggaaacctgccgtgcggtctggcggatctggcggaggctccacaagcctgtggctgcccctgaccttcgaggacatcgccatctacttcagcgagcaggagtggcagaacctggaggcctggcagaaggacctgtacaggaacgtgatgagggccaactacgagatcctggtgagcctggacgacggcctgcccaagcccgagctgatcagccacatcgagcagggcaaggagctgttctggaacctgggcgagacccagaagagcggcaacatcatctgcagcagcgccaccagccccaagaaaaagagaaaagtctaagctgccttctgcggggcttgccttctggccatgcccttcttctctcccttgcacctgtacctcttggtctttgaataaagcctgagtaggaaggctagcaaaaaaaaaaaaaaaaaaaaaaaaaaaaaaaaaaaaaaaaaaaaaaaaaaaaaaaaaaaaaaaaaaaaaaaaaaaaaaaa

SEQ ID NO: 3580 - RNA, 5419 nt, synthetic construct
  source 1..5419: mol_type = other RNA
aggaaataagagagaaaagaagagtaagaagaaatataagagccaccatggcccctaagaagaagcgtaaagtgagccgggtgaacggcagcggcagcggcggcggcatgaaccacgaccaggagttcgacccccctaaggtgtaccctcccgtccccgccgagaagagaaagcccatccgggtcctgagcctgttcgatggcatcgccaccggtctgctggtgctgaaggacctgggcatccaggtggataggtacattgcctccgaggtgtgcgaggactccatcaccgtgggaatggtgcgtcatcagggcaagatcatgtacgtgggcgacgtgcggagcgtgacacagaagcatatccaggagtggggccctttcgacctggtgatcggcggcagcccttgcaatgacctgagcatcgtgaacccagcccggaagggcctgtacgagggaaccggcagactgttcttcgagttttacagactgctgcacgacgcccggcctaaggaaggcgacgaccggcccttcttttggctgttcgagaatgtggtggccatgggagtcagcgacaagcgggatattagccggttcctggagagcaaccccgtgatgatcgatgccaaggaagtgagcgccgcccaccgggccagatacttctggggcaatctgcctggcatgaacagacccctggccagcaccgtgaacgacaagctggagctgcaggagtgcctggagcacggccggatcgccaagttcagcaaggtgagaaccatcaccacccgaagcaacagcatcaaacaaggcaaggaccagcactttcctgtgttcatgaacgagaaggaggacatcctgtggtgtaccgagatggagagagtgttcgggttcccagtccactacacagatgtcagcaacatgtctagactggccagacagagactgctgggaagaagctggtccgtccctgtgatcagacacctgttcgcccctctgaaggagtacttcgcctgcgtgagcagcggcaacagcaacgccaacagccggggccccagcttctctagcggcctggtgccactgtccctgagagggagccacatgggccccatggagatctacaaaaccgtgagcgcctggaagcggcagcctgtgcgcgtgctgagcctgtttcggaatatcgataaagtcctgaaaagcctgggattcctggagagcggctctggctccggcggtggcaccctgaagtacgtggaggatgtgacaaacgtggtcagacgggatgtggagaagtggggccccttcgatctggtgtacggcagcacccaacccctgggcagctcttgtgaccggtgccctggctggtacatgtttcagttccaccggatcctgcagtacgccctgccgagacaggagtcccagcggccattcttttggattttcatggacaacttgctgctgaccgaggatgaccaggaaactaccactcggttcctgcagaccgaagccgtgaccctgcaggacgtgagaggccgggactaccagaacgccatgcgggtgtggtccaacatccctggactgaaaagcaagcacgcacctctgacccctaaagaagaggagtacctgcaggcccaggtgcggagcagaagcaagctggacgcccctaaggtggatctgctggtgaagaattgcctcctgcccctgagagagtacttcaagtatttcagccagaatagtctgcccctgggcggcccaagcagcggcgcccctcctcccagcggcggcagcccagccggctccccaacctctaccgaggagggcacctctgagtccgccacccccgagagcggccctggcacctccaccgagcccagcgagggcagcgcacccggcagccctgccggcagccccacctccacagaggagggaaccagcaccgagcccagcgaaggcagcgccccaggcaccagcaccgagcctagtgagggcggctctggcggcggcagcgcccaggagattaaacggatcaacaagatcagaagaagacttgtgaaagacagcaacaccaagaaggccggcaagacaggccccatgaaaaccctgctggttagagtgatgacacccgatctgagagagcggctggaaaacctgagaaagaagcctgaaaatatcccccagcccatcagcaatacatctagagccaacctgaataagctgctgaccgattacaccgaaatgaagaaggcgatcctgcatgtgtactgggaagagttccagaaggaccctgtgggcctgatgagccgggtggcccagcctgccagcaagaagatcgatcagaacaagctgaaacctgagatggacgagaagggcaacctgaccaccgccggctttgcctgctctcagtgtggccagcccctgttcgtgtacaagctggagcaggtgtctgagaagggcaaggcttacaccaactacttcggacggtgcaatgtggccgagcacgaaaagctgatcctgctggcccagctgaagcccgagaaggatagcgacgaagccgtgacatatagcctgggaaagtttgggcagagggccctggatttctacagcattcatgtgaccaaggagtccacccaccccgtgaagcccctggcccagatcgccggaaacagatacgcctccggacctgtgggaaaggccctgagcgacgcatgtatgggcacaatcgcctccttcctgtctaagtaccaggacatcatcatcgaacaccagaaggtggtgaagggcaaccagaagagactggagagcctgcgggagctggccggcaaggaaaacctggaataccctagcgtgaccctgccacctcagcctcacaccaaggagggcgttgatgcctacaacgaagtgatcgcccgggtgcgaatgtgggtgaacctgaacctgtggcagaagctgaagctaagcagagatgatgccaagcctctgctgagactgaagggattcccttcctttcctctggtcgagagacaggccaacgaagtggactggtgggacatggtgtgtaacgtgaagaagctgatcaacgagaaaaaggaggatggcaaggtgttttggcagaatctggctggctacaagagacaggaagccctgagaccatacctgagcagcgaggaagatcggaagaagggaaagaaattcgctcggtaccagctgggcgacctgctgctgcacctggaaaagaagcacggcgaggactggggaaaggtgtacgacgaggcctgggagcggattgacaagaaagtggaaggcctgagcaagcacatcaagctggaagaggaacggagaagcgaggacgcccagagcaaggccgccctgaccgactggctgcgggctaaggccagcttcgtgatcgagggcctgaaggaggccgacaaggacgagttctgcagatgcgagctgaagctgcagaagtggtacggggacctgcggggaaagcccttcgccatcgaagccgagaacagcatcctggacatcagcggcttcagcaagcagtacaactgtgccttcatctggcagaaggacggcgtgaagaagctgaacctgtacctgatcatcaactacttcaagggcggcaagctgcggttcaagaagatcaaacctgaagccttcgaagccaacagattctacaccgtgatcaacaaaaagagcggcgagatcgtgcccatggaggtgaacttcaacttcgacgaccccaacctgatcatcctgcctctggcctttggcaagagacagggcagagaattcatctggaacgacctgctgtccctggaaaccggcagcctgaagctggccaacggaagagtgatcgagaagacactgtacaacagaagaacccggcaggatgagcctgccctgttcgtggccctgaccttcgagcggcgggaggtcctggactcctccaatatcaaaccaatgaacctgatcggcgtggcaagaggcgaaaacatccccgccgtgatcgccctgaccgaccccgagggctgcccactgagccggtttaaggatagcctgggaaacccaacccacatcctgagaatcggcgagagctataaggagaagcagcggaccatccaggccaagaaggaggtggagcagcggagagccggcggctacagccggaagtacgccagcaaagccaagaatctggcagacgatatggtgagaaacaccgctagagatctgctgtactacgccgtgacccaggatgccatgctgatcttcgccaacctgagccggggcttcggccggcagggcaagcggaccttcatggccgagagacagtacacacggatggaggactggctgaccgccaagctggcctacgagggcctgagcaagacctacctgtccaagacactggcccagtacacctccaagacatgcagcaactgtgggtttaccatcaccagcgccgactacgacagggtgctggagaagctgaagaagacagcaacaggctggatgaccacaattaacggcaaggagctgaaggtggagggccagattacctactacaacagatacaagagacagaacgtagtcaaggacctgtccgtcgagctggatagactgagcgaagaatctgtgaacaacgacatctcctcctggacaaagggcagaagcggagaagctctgagcctcctgaagaaaagattctcccatagacccgtgcaggagaagttcgtgtgcctgaactgcggcttcgagacacacgcagccgagcaagccgccctgaacatcgccagatcctggctgttcctgcggagccaggagtacaagaaataccagacaaacaagacaaccggcaacaccgataagagagccttcgtcgagacctggcagtccttttaccggaagaagcttaaggaggtgtggaaacctgccgtgcggtctggcggatctggcggaggctccacaagcatgaacgtggaggtggtgaaggtgatgccccaggacctggtgaccttcaaggacgtggccatcgacttcagccaggaggagtggcagtggatgaaccccgcccagaagtgcctgtacaggagcatgatgctggagaactaccagagcctggtgagcctgggcctgtgcatcagcaagccctacgtgatcagcctgctggagcagggcagggagccctgggagatgaccagcgagatgaccaggaccagccccaagaaaaagagaaaagtctaagctgccttctgcggggcttgccttctggccatgcccttcttctctcccttgcacctgtacctcttggtctttgaataaagcctgagtaggaaggctagcaaaaaaaaaaaaaaaaaaaaaaaaaaaaaaaaaaaaaaaaaaaaaaaaaaaaaaaaaaaaaaaaaaaaaaaaaaaaaaaa

SEQ ID NO: 3581 - RNA, 5419 nt, synthetic construct
  source 1..5419: mol_type = other RNA
aggaaataagagagaaaagaagagtaagaagaaatataagagccaccatggcccctaagaagaagcgtaaagtgagccgggtgaacggcagcggcagcggcggcggcatgaaccacgaccaggagttcgacccccctaaggtgtaccctcccgtccccgccgagaagagaaagcccatccgggtcctgagcctgttcgatggcatcgccaccggtctgctggtgctgaaggacctgggcatccaggtggataggtacattgcctccgaggtgtgcgaggactccatcaccgtgggaatggtgcgtcatcagggcaagatcatgtacgtgggcgacgtgcggagcgtgacacagaagcatatccaggagtggggccctttcgacctggtgatcggcggcagcccttgcaatgacctgagcatcgtgaacccagcccggaagggcctgtacgagggaaccggcagactgttcttcgagttttacagactgctgcacgacgcccggcctaaggaaggcgacgaccggcccttcttttggctgttcgagaatgtggtggccatgggagtcagcgacaagcgggatattagccggttcctggagagcaaccccgtgatgatcgatgccaaggaagtgagcgccgcccaccgggccagatacttctggggcaatctgcctggcatgaacagacccctggccagcaccgtgaacgacaagctggagctgcaggagtgcctggagcacggccggatcgccaagttcagcaaggtgagaaccatcaccacccgaagcaacagcatcaaacaaggcaaggaccagcactttcctgtgttcatgaacgagaaggaggacatcctgtggtgtaccgagatggagagagtgttcgggttcccagtccactacacagatgtcagcaacatgtctagactggccagacagagactgctgggaagaagctggtccgtccctgtgatcagacacctgttcgcccctctgaaggagtacttcgcctgcgtgagcagcggcaacagcaacgccaacagccggggccccagcttctctagcggcctggtgccactgtccctgagagggagccacatgggccccatggagatctacaaaaccgtgagcgcctggaagcggcagcctgtgcgcgtgctgagcctgtttcggaatatcgataaagtcctgaaaagcctgggattcctggagagcggctctggctccggcggtggcaccctgaagtacgtggaggatgtgacaaacgtggtcagacgggatgtggagaagtggggccccttcgatctggtgtacggcagcacccaacccctgggcagctcttgtgaccggtgccctggctggtacatgtttcagttccaccggatcctgcagtacgccctgccgagacaggagtcccagcggccattcttttggattttcatggacaacttgctgctgaccgaggatgaccaggaaactaccactcggttcctgcagaccgaagccgtgaccctgcaggacgtgagaggccgggactaccagaacgccatgcgggtgtggtccaacatccctggactgaaaagcaagcacgcacctctgacccctaaagaagaggagtacctgcaggcccaggtgcggagcagaagcaagctggacgcccctaaggtggatctgctggtgaagaattgcctcctgcccctgagagagtacttcaagtatttcagccagaatagtctgcccctgggcggcccaagcagcggcgcccctcctcccagcggcggcagcccagccggctccccaacctctaccgaggagggcacctctgagtccgccacccccgagagcggccctggcacctccaccgagcccagcgagggcagcgcacccggcagccctgccggcagccccacctccacagaggagggaaccagcaccgagcccagcgaaggcagcgccccaggcaccagcaccgagcctagtgagggcggctctggcggcggcagcgcccaggagattaaacggatcaacaagatcagaagaagacttgtgaaagacagcaacaccaagaaggccggcaagacaggccccatgaaaaccctgctggttagagtgatgacacccgatctgagagagcggctggaaaacctgagaaagaagcctgaaaatatcccccagcccatcagcaatacatctagagccaacctgaataagctgctgaccgattacaccgaaatgaagaaggcgatcctgcatgtgtactgggaagagttccagaaggaccctgtgggcctgatgagccgggtggcccagcctgccagcaagaagatcgatcagaacaagctgaaacctgagatggacgagaagggcaacctgaccaccgccggctttgcctgctctcagtgtggccagcccctgttcgtgtacaagctggagcaggtgtctgagaagggcaaggcttacaccaactacttcggacggtgcaatgtggccgagcacgaaaagctgatcctgctggcccagctgaagcccgagaaggatagcgacgaagccgtgacatatagcctgggaaagtttgggcagagggccctggatttctacagcattcatgtgaccaaggagtccacccaccccgtgaagcccctggcccagatcgccggaaacagatacgcctccggacctgtgggaaaggccctgagcgacgcatgtatgggcacaatcgcctccttcctgtctaagtaccaggacatcatcatcgaacaccagaaggtggtgaagggcaaccagaagagactggagagcctgcgggagctggccggcaaggaaaacctggaataccctagcgtgaccctgccacctcagcctcacaccaaggagggcgttgatgcctacaacgaagtgatcgcccgggtgcgaatgtgggtgaacctgaacctgtggcagaagctgaagctaagcagagatgatgccaagcctctgctgagactgaagggattcccttcctttcctctggtcgagagacaggccaacgaagtggactggtgggacatggtgtgtaacgtgaagaagctgatcaacgagaaaaaggaggatggcaaggtgttttggcagaatctggctggctacaagagacaggaagccctgagaccatacctgagcagcgaggaagatcggaagaagggaaagaaattcgctcggtaccagctgggcgacctgctgctgcacctggaaaagaagcacggcgaggactggggaaaggtgtacgacgaggcctgggagcggattgacaagaaagtggaaggcctgagcaagcacatcaagctggaagaggaacggagaagcgaggacgcccagagcaaggccgccctgaccgactggctgcgggctaaggccagcttcgtgatcgagggcctgaaggaggccgacaaggacgagttctgcagatgcgagctgaagctgcagaagtggtacggggacctgcggggaaagcccttcgccatcgaagccgagaacagcatcctggacatcagcggcttcagcaagcagtacaactgtgccttcatctggcagaaggacggcgtgaagaagctgaacctgtacctgatcatcaactacttcaagggcggcaagctgcggttcaagaagatcaaacctgaagccttcgaagccaacagattctacaccgtgatcaacaaaaagagcggcgagatcgtgcccatggaggtgaacttcaacttcgacgaccccaacctgatcatcctgcctctggcctttggcaagagacagggcagagaattcatctggaacgacctgctgtccctggaaaccggcagcctgaagctggccaacggaagagtgatcgagaagacactgtacaacagaagaacccggcaggatgagcctgccctgttcgtggccctgaccttcgagcggcgggaggtcctggactcctccaatatcaaaccaatgaacctgatcggcgtggcaagaggcgaaaacatccccgccgtgatcgccctgaccgaccccgagggctgcccactgagccggtttaaggatagcctgggaaacccaacccacatcctgagaatcggcgagagctataaggagaagcagcggaccatccaggccaagaaggaggtggagcagcggagagccggcggctacagccggaagtacgccagcaaagccaagaatctggcagacgatatggtgagaaacaccgctagagatctgctgtactacgccgtgacccaggatgccatgctgatcttcgccaacctgagccggggcttcggccggcagggcaagcggaccttcatggccgagagacagtacacacggatggaggactggctgaccgccaagctggcctacgagggcctgagcaagacctacctgtccaagacactggcccagtacacctccaagacatgcagcaactgtgggtttaccatcaccagcgccgactacgacagggtgctggagaagctgaagaagacagcaacaggctggatgaccacaattaacggcaaggagctgaaggtggagggccagattacctactacaacagatacaagagacagaacgtagtcaaggacctgtccgtcgagctggatagactgagcgaagaatctgtgaacaacgacatctcctcctggacaaagggcagaagcggagaagctctgagcctcctgaagaaaagattctcccatagacccgtgcaggagaagttcgtgtgcctgaactgcggcttcgagacacacgcagccgagcaagccgccctgaacatcgccagatcctggctgttcctgcggagccaggagtacaagaaataccagacaaacaagacaaccggcaacaccgataagagagccttcgtcgagacctggcagtccttttaccggaagaagcttaaggaggtgtggaaacctgccgtgcggtctggcggatctggcggaggctccacaagcgaggagctgcccgccgtgttcgaggacgtggccgtgtacttcaccagggaggagtggggcatgctggacaagaggcagaaggagctgtacagggacgtgatgaggctgaactacgagctgctggccagcctgggccccgccgccgccaagcccgacctgatcagcaagctggagaggagggccgccccctggatcaaggaccccaacggccccaagtggggcaagggcggcccccccggcaagaccagccccaagaaaaagagaaaagtctaagctgccttctgcggggcttgccttctggccatgcccttcttctctcccttgcacctgtacctcttggtctttgaataaagcctgagtaggaaggctagcaaaaaaaaaaaaaaaaaaaaaaaaaaaaaaaaaaaaaaaaaaaaaaaaaaaaaaaaaaaaaaaaaaaaaaaaaaaaaaaa

SEQ ID NO: 3582 - RNA, 5419 nt, synthetic construct
  source 1..5419: mol_type = other RNA
aggaaataagagagaaaagaagagtaagaagaaatataagagccaccatggcccctaagaagaagcgtaaagtgagccgggtgaacggcagcggcagcggcggcggcatgaaccacgaccaggagttcgacccccctaaggtgtaccctcccgtccccgccgagaagagaaagcccatccgggtcctgagcctgttcgatggcatcgccaccggtctgctggtgctgaaggacctgggcatccaggtggataggtacattgcctccgaggtgtgcgaggactccatcaccgtgggaatggtgcgtcatcagggcaagatcatgtacgtgggcgacgtgcggagcgtgacacagaagcatatccaggagtggggccctttcgacctggtgatcggcggcagcccttgcaatgacctgagcatcgtgaacccagcccggaagggcctgtacgagggaaccggcagactgttcttcgagttttacagactgctgcacgacgcccggcctaaggaaggcgacgaccggcccttcttttggctgttcgagaatgtggtggccatgggagtcagcgacaagcgggatattagccggttcctggagagcaaccccgtgatgatcgatgccaaggaagtgagcgccgcccaccgggccagatacttctggggcaatctgcctggcatgaacagacccctggccagcaccgtgaacgacaagctggagctgcaggagtgcctggagcacggccggatcgccaagttcagcaaggtgagaaccatcaccacccgaagcaacagcatcaaacaaggcaaggaccagcactttcctgtgttcatgaacgagaaggaggacatcctgtggtgtaccgagatggagagagtgttcgggttcccagtccactacacagatgtcagcaacatgtctagactggccagacagagactgctgggaagaagctggtccgtccctgtgatcagacacctgttcgcccctctgaaggagtacttcgcctgcgtgagcagcggcaacagcaacgccaacagccggggccccagcttctctagcggcctggtgccactgtccctgagagggagccacatgggccccatggagatctacaaaaccgtgagcgcctggaagcggcagcctgtgcgcgtgctgagcctgtttcggaatatcgataaagtcctgaaaagcctgggattcctggagagcggctctggctccggcggtggcaccctgaagtacgtggaggatgtgacaaacgtggtcagacgggatgtggagaagtggggccccttcgatctggtgtacggcagcacccaacccctgggcagctcttgtgaccggtgccctggctggtacatgtttcagttccaccggatcctgcagtacgccctgccgagacaggagtcccagcggccattcttttggattttcatggacaacttgctgctgaccgaggatgaccaggaaactaccactcggttcctgcagaccgaagccgtgaccctgcaggacgtgagaggccgggactaccagaacgccatgcgggtgtggtccaacatccctggactgaaaagcaagcacgcacctctgacccctaaagaagaggagtacctgcaggcccaggtgcggagcagaagcaagctggacgcccctaaggtggatctgctggtgaagaattgcctcctgcccctgagagagtacttcaagtatttcagccagaatagtctgcccctgggcggcccaagcagcggcgcccctcctcccagcggcggcagcccagccggctccccaacctctaccgaggagggcacctctgagtccgccacccccgagagcggccctggcacctccaccgagcccagcgagggcagcgcacccggcagccctgccggcagccccacctccacagaggagggaaccagcaccgagcccagcgaaggcagcgccccaggcaccagcaccgagcctagtgagggcggctctggcggcggcagcgcccaggagattaaacggatcaacaagatcagaagaagacttgtgaaagacagcaacaccaagaaggccggcaagacaggccccatgaaaaccctgctggttagagtgatgacacccgatctgagagagcggctggaaaacctgagaaagaagcctgaaaatatcccccagcccatcagcaatacatctagagccaacctgaataagctgctgaccgattacaccgaaatgaagaaggcgatcctgcatgtgtactgggaagagttccagaaggaccctgtgggcctgatgagccgggtggcccagcctgccagcaagaagatcgatcagaacaagctgaaacctgagatggacgagaagggcaacctgaccaccgccggctttgcctgctctcagtgtggccagcccctgttcgtgtacaagctggagcaggtgtctgagaagggcaaggcttacaccaactacttcggacggtgcaatgtggccgagcacgaaaagctgatcctgctggcccagctgaagcccgagaaggatagcgacgaagccgtgacatatagcctgggaaagtttgggcagagggccctggatttctacagcattcatgtgaccaaggagtccacccaccccgtgaagcccctggcccagatcgccggaaacagatacgcctccggacctgtgggaaaggccctgagcgacgcatgtatgggcacaatcgcctccttcctgtctaagtaccaggacatcatcatcgaacaccagaaggtggtgaagggcaaccagaagagactggagagcctgcgggagctggccggcaaggaaaacctggaataccctagcgtgaccctgccacctcagcctcacaccaaggagggcgttgatgcctacaacgaagtgatcgcccgggtgcgaatgtgggtgaacctgaacctgtggcagaagctgaagctaagcagagatgatgccaagcctctgctgagactgaagggattcccttcctttcctctggtcgagagacaggccaacgaagtggactggtgggacatggtgtgtaacgtgaagaagctgatcaacgagaaaaaggaggatggcaaggtgttttggcagaatctggctggctacaagagacaggaagccctgagaccatacctgagcagcgaggaagatcggaagaagggaaagaaattcgctcggtaccagctgggcgacctgctgctgcacctggaaaagaagcacggcgaggactggggaaaggtgtacgacgaggcctgggagcggattgacaagaaagtggaaggcctgagcaagcacatcaagctggaagaggaacggagaagcgaggacgcccagagcaaggccgccctgaccgactggctgcgggctaaggccagcttcgtgatcgagggcctgaaggaggccgacaaggacgagttctgcagatgcgagctgaagctgcagaagtggtacggggacctgcggggaaagcccttcgccatcgaagccgagaacagcatcctggacatcagcggcttcagcaagcagtacaactgtgccttcatctggcagaaggacggcgtgaagaagctgaacctgtacctgatcatcaactacttcaagggcggcaagctgcggttcaagaagatcaaacctgaagccttcgaagccaacagattctacaccgtgatcaacaaaaagagcggcgagatcgtgcccatggaggtgaacttcaacttcgacgaccccaacctgatcatcctgcctctggcctttggcaagagacagggcagagaattcatctggaacgacctgctgtccctggaaaccggcagcctgaagctggccaacggaagagtgatcgagaagacactgtacaacagaagaacccggcaggatgagcctgccctgttcgtggccctgaccttcgagcggcgggaggtcctggactcctccaatatcaaaccaatgaacctgatcggcgtggcaagaggcgaaaacatccccgccgtgatcgccctgaccgaccccgagggctgcccactgagccggtttaaggatagcctgggaaacccaacccacatcctgagaatcggcgagagctataaggagaagcagcggaccatccaggccaagaaggaggtggagcagcggagagccggcggctacagccggaagtacgccagcaaagccaagaatctggcagacgatatggtgagaaacaccgctagagatctgctgtactacgccgtgacccaggatgccatgctgatcttcgccaacctgagccggggcttcggccggcagggcaagcggaccttcatggccgagagacagtacacacggatggaggactggctgaccgccaagctggcctacgagggcctgagcaagacctacctgtccaagacactggcccagtacacctccaagacatgcagcaactgtgggtttaccatcaccagcgccgactacgacagggtgctggagaagctgaagaagacagcaacaggctggatgaccacaattaacggcaaggagctgaaggtggagggccagattacctactacaacagatacaagagacagaacgtagtcaaggacctgtccgtcgagctggatagactgagcgaagaatctgtgaacaacgacatctcctcctggacaaagggcagaagcggagaagctctgagcctcctgaagaaaagattctcccatagacccgtgcaggagaagttcgtgtgcctgaactgcggcttcgagacacacgcagccgagcaagccgccctgaacatcgccagatcctggctgttcctgcggagccaggagtacaagaaataccagacaaacaagacaaccggcaacaccgataagagagccttcgtcgagacctggcagtccttttaccggaagaagcttaaggaggtgtggaaacctgccgtgcggtctggcggatctggcggaggctccacaagcatggcccacatggccttcagggacgtggccgtggacttcacccaggacgagtggaggctgctgagccccgcccagaggaccctgtacagggaggtgatgctggagaactacagcaacctggtgagcctgggcatcagcttcagcaagcccgagatcatcacccagctggagcagggcaaggagacctggagggaggagaagaagtgcccccccgccacctgccccgccgaccccgagcccgagaccagccccaagaaaaagagaaaagtctaagctgccttctgcggggcttgccttctggccatgcccttcttctctcccttgcacctgtacctcttggtctttgaataaagcctgagtaggaaggctagcaaaaaaaaaaaaaaaaaaaaaaaaaaaaaaaaaaaaaaaaaaaaaaaaaaaaaaaaaaaaaaaaaaaaaaaaaaaaaaaa

SEQ ID NO: 3583 - RNA, 5419 nt, synthetic construct
  source 1..5419: mol_type = other RNA
aggaaataagagagaaaagaagagtaagaagaaatataagagccaccatggcccctaagaagaagcgtaaagtgagccgggtgaacggcagcggcagcggcggcggcatgaaccacgaccaggagttcgacccccctaaggtgtaccctcccgtccccgccgagaagagaaagcccatccgggtcctgagcctgttcgatggcatcgccaccggtctgctggtgctgaaggacctgggcatccaggtggataggtacattgcctccgaggtgtgcgaggactccatcaccgtgggaatggtgcgtcatcagggcaagatcatgtacgtgggcgacgtgcggagcgtgacacagaagcatatccaggagtggggccctttcgacctggtgatcggcggcagcccttgcaatgacctgagcatcgtgaacccagcccggaagggcctgtacgagggaaccggcagactgttcttcgagttttacagactgctgcacgacgcccggcctaaggaaggcgacgaccggcccttcttttggctgttcgagaatgtggtggccatgggagtcagcgacaagcgggatattagccggttcctggagagcaaccccgtgatgatcgatgccaaggaagtgagcgccgcccaccgggccagatacttctggggcaatctgcctggcatgaacagacccctggccagcaccgtgaacgacaagctggagctgcaggagtgcctggagcacggccggatcgccaagttcagcaaggtgagaaccatcaccacccgaagcaacagcatcaaacaaggcaaggaccagcactttcctgtgttcatgaacgagaaggaggacatcctgtggtgtaccgagatggagagagtgttcgggttcccagtccactacacagatgtcagcaacatgtctagactggccagacagagactgctgggaagaagctggtccgtccctgtgatcagacacctgttcgcccctctgaaggagtacttcgcctgcgtgagcagcggcaacagcaacgccaacagccggggccccagcttctctagcggcctggtgccactgtccctgagagggagccacatgggccccatggagatctacaaaaccgtgagcgcctggaagcggcagcctgtgcgcgtgctgagcctgtttcggaatatcgataaagtcctgaaaagcctgggattcctggagagcggctctggctccggcggtggcaccctgaagtacgtggaggatgtgacaaacgtggtcagacgggatgtggagaagtggggccccttcgatctggtgtacggcagcacccaacccctgggcagctcttgtgaccggtgccctggctggtacatgtttcagttccaccggatcctgcagtacgccctgccgagacaggagtcccagcggccattcttttggattttcatggacaacttgctgctgaccgaggatgaccaggaaactaccactcggttcctgcagaccgaagccgtgaccctgcaggacgtgagaggccgggactaccagaacgccatgcgggtgtggtccaacatccctggactgaaaagcaagcacgcacctctgacccctaaagaagaggagtacctgcaggcccaggtgcggagcagaagcaagctggacgcccctaaggtggatctgctggtgaagaattgcctcctgcccctgagagagtacttcaagtatttcagccagaatagtctgcccctgggcggcccaagcagcggcgcccctcctcccagcggcggcagcccagccggctccccaacctctaccgaggagggcacctctgagtccgccacccccgagagcggccctggcacctccaccgagcccagcgagggcagcgcacccggcagccctgccggcagccccacctccacagaggagggaaccagcaccgagcccagcgaaggcagcgccccaggcaccagcaccgagcctagtgagggcggctctggcggcggcagcgcccaggagattaaacggatcaacaagatcagaagaagacttgtgaaagacagcaacaccaagaaggccggcaagacaggccccatgaaaaccctgctggttagagtgatgacacccgatctgagagagcggctggaaaacctgagaaagaagcctgaaaatatcccccagcccatcagcaatacatctagagccaacctgaataagctgctgaccgattacaccgaaatgaagaaggcgatcctgcatgtgtactgggaagagttccagaaggaccctgtgggcctgatgagccgggtggcccagcctgccagcaagaagatcgatcagaacaagctgaaacctgagatggacgagaagggcaacctgaccaccgccggctttgcctgctctcagtgtggccagcccctgttcgtgtacaagctggagcaggtgtctgagaagggcaaggcttacaccaactacttcggacggtgcaatgtggccgagcacgaaaagctgatcctgctggcccagctgaagcccgagaaggatagcgacgaagccgtgacatatagcctgggaaagtttgggcagagggccctggatttctacagcattcatgtgaccaaggagtccacccaccccgtgaagcccctggcccagatcgccggaaacagatacgcctccggacctgtgggaaaggccctgagcgacgcatgtatgggcacaatcgcctccttcctgtctaagtaccaggacatcatcatcgaacaccagaaggtggtgaagggcaaccagaagagactggagagcctgcgggagctggccggcaaggaaaacctggaataccctagcgtgaccctgccacctcagcctcacaccaaggagggcgttgatgcctacaacgaagtgatcgcccgggtgcgaatgtgggtgaacctgaacctgtggcagaagctgaagctaagcagagatgatgccaagcctctgctgagactgaagggattcccttcctttcctctggtcgagagacaggccaacgaagtggactggtgggacatggtgtgtaacgtgaagaagctgatcaacgagaaaaaggaggatggcaaggtgttttggcagaatctggctggctacaagagacaggaagccctgagaccatacctgagcagcgaggaagatcggaagaagggaaagaaattcgctcggtaccagctgggcgacctgctgctgcacctggaaaagaagcacggcgaggactggggaaaggtgtacgacgaggcctgggagcggattgacaagaaagtggaaggcctgagcaagcacatcaagctggaagaggaacggagaagcgaggacgcccagagcaaggccgccctgaccgactggctgcgggctaaggccagcttcgtgatcgagggcctgaaggaggccgacaaggacgagttctgcagatgcgagctgaagctgcagaagtggtacggggacctgcggggaaagcccttcgccatcgaagccgagaacagcatcctggacatcagcggcttcagcaagcagtacaactgtgccttcatctggcagaaggacggcgtgaagaagctgaacctgtacctgatcatcaactacttcaagggcggcaagctgcggttcaagaagatcaaacctgaagccttcgaagccaacagattctacaccgtgatcaacaaaaagagcggcgagatcgtgcccatggaggtgaacttcaacttcgacgaccccaacctgatcatcctgcctctggcctttggcaagagacagggcagagaattcatctggaacgacctgctgtccctggaaaccggcagcctgaagctggccaacggaagagtgatcgagaagacactgtacaacagaagaacccggcaggatgagcctgccctgttcgtggccctgaccttcgagcggcgggaggtcctggactcctccaatatcaaaccaatgaacctgatcggcgtggcaagaggcgaaaacatccccgccgtgatcgccctgaccgaccccgagggctgcccactgagccggtttaaggatagcctgggaaacccaacccacatcctgagaatcggcgagagctataaggagaagcagcggaccatccaggccaagaaggaggtggagcagcggagagccggcggctacagccggaagtacgccagcaaagccaagaatctggcagacgatatggtgagaaacaccgctagagatctgctgtactacgccgtgacccaggatgccatgctgatcttcgccaacctgagccggggcttcggccggcagggcaagcggaccttcatggccgagagacagtacacacggatggaggactggctgaccgccaagctggcctacgagggcctgagcaagacctacctgtccaagacactggcccagtacacctccaagacatgcagcaactgtgggtttaccatcaccagcgccgactacgacagggtgctggagaagctgaagaagacagcaacaggctggatgaccacaattaacggcaaggagctgaaggtggagggccagattacctactacaacagatacaagagacagaacgtagtcaaggacctgtccgtcgagctggatagactgagcgaagaatctgtgaacaacgacatctcctcctggacaaagggcagaagcggagaagctctgagcctcctgaagaaaagattctcccatagacccgtgcaggagaagttcgtgtgcctgaactgcggcttcgagacacacgcagccgagcaagccgccctgaacatcgccagatcctggctgttcctgcggagccaggagtacaagaaataccagacaaacaagacaaccggcaacaccgataagagagccttcgtcgagacctggcagtccttttaccggaagaagcttaaggaggtgtggaaacctgccgtgcggtctggcggatctggcggaggctccacaagcagcctgggcatggtgagcttcgaggacgtggccgtgaccttcagcagggaggagtggcagcagctggacgaggcccagaggaccctgtacagggaggtgatgctggaggcctacagcaacctgaagaccgtgggctgctgctggagcaagcccgaggtgatcatcaggctggagcagggcgtggagccctggaccgtggagggcgtgaccaaccagaggttcagcgacgtgctgaccgtggacaccagccccaagaaaaagagaaaagtctaagctgccttctgcggggcttgccttctggccatgcccttcttctctcccttgcacctgtacctcttggtctttgaataaagcctgagtaggaaggctagcaaaaaaaaaaaaaaaaaaaaaaaaaaaaaaaaaaaaaaaaaaaaaaaaaaaaaaaaaaaaaaaaaaaaaaaaaaaaaaaa

SEQ ID NO: 3584 - RNA, 5419 nt, synthetic construct
  source 1..5419: mol_type = other RNA
aggaaataagagagaaaagaagagtaagaagaaatataagagccaccatggcccctaagaagaagcgtaaagtgagccgggtgaacggcagcggcagcggcggcggcatgaaccacgaccaggagttcgacccccctaaggtgtaccctcccgtccccgccgagaagagaaagcccatccgggtcctgagcctgttcgatggcatcgccaccggtctgctggtgctgaaggacctgggcatccaggtggataggtacattgcctccgaggtgtgcgaggactccatcaccgtgggaatggtgcgtcatcagggcaagatcatgtacgtgggcgacgtgcggagcgtgacacagaagcatatccaggagtggggccctttcgacctggtgatcggcggcagcccttgcaatgacctgagcatcgtgaacccagcccggaagggcctgtacgagggaaccggcagactgttcttcgagttttacagactgctgcacgacgcccggcctaaggaaggcgacgaccggcccttcttttggctgttcgagaatgtggtggccatgggagtcagcgacaagcgggatattagccggttcctggagagcaaccccgtgatgatcgatgccaaggaagtgagcgccgcccaccgggccagatacttctggggcaatctgcctggcatgaacagacccctggccagcaccgtgaacgacaagctggagctgcaggagtgcctggagcacggccggatcgccaagttcagcaaggtgagaaccatcaccacccgaagcaacagcatcaaacaaggcaaggaccagcactttcctgtgttcatgaacgagaaggaggacatcctgtggtgtaccgagatggagagagtgttcgggttcccagtccactacacagatgtcagcaacatgtctagactggccagacagagactgctgggaagaagctggtccgtccctgtgatcagacacctgttcgcccctctgaaggagtacttcgcctgcgtgagcagcggcaacagcaacgccaacagccggggccccagcttctctagcggcctggtgccactgtccctgagagggagccacatgggccccatggagatctacaaaaccgtgagcgcctggaagcggcagcctgtgcgcgtgctgagcctgtttcggaatatcgataaagtcctgaaaagcctgggattcctggagagcggctctggctccggcggtggcaccctgaagtacgtggaggatgtgacaaacgtggtcagacgggatgtggagaagtggggccccttcgatctggtgtacggcagcacccaacccctgggcagctcttgtgaccggtgccctggctggtacatgtttcagttccaccggatcctgcagtacgccctgccgagacaggagtcccagcggccattcttttggattttcatggacaacttgctgctgaccgaggatgaccaggaaactaccactcggttcctgcagaccgaagccgtgaccctgcaggacgtgagaggccgggactaccagaacgccatgcgggtgtggtccaacatccctggactgaaaagcaagcacgcacctctgacccctaaagaagaggagtacctgcaggcccaggtgcggagcagaagcaagctggacgcccctaaggtggatctgctggtgaagaattgcctcctgcccctgagagagtacttcaagtatttcagccagaatagtctgcccctgggcggcccaagcagcggcgcccctcctcccagcggcggcagcccagccggctccccaacctctaccgaggagggcacctctgagtccgccacccccgagagcggccctggcacctccaccgagcccagcgagggcagcgcacccggcagccctgccggcagccccacctccacagaggagggaaccagcaccgagcccagcgaaggcagcgccccaggcaccagcaccgagcctagtgagggcggctctggcggcggcagcgcccaggagattaaacggatcaacaagatcagaagaagacttgtgaaagacagcaacaccaagaaggccggcaagacaggccccatgaaaaccctgctggttagagtgatgacacccgatctgagagagcggctggaaaacctgagaaagaagcctgaaaatatcccccagcccatcagcaatacatctagagccaacctgaataagctgctgaccgattacaccgaaatgaagaaggcgatcctgcatgtgtactgggaagagttccagaaggaccctgtgggcctgatgagccgggtggcccagcctgccagcaagaagatcgatcagaacaagctgaaacctgagatggacgagaagggcaacctgaccaccgccggctttgcctgctctcagtgtggccagcccctgttcgtgtacaagctggagcaggtgtctgagaagggcaaggcttacaccaactacttcggacggtgcaatgtggccgagcacgaaaagctgatcctgctggcccagctgaagcccgagaaggatagcgacgaagccgtgacatatagcctgggaaagtttgggcagagggccctggatttctacagcattcatgtgaccaaggagtccacccaccccgtgaagcccctggcccagatcgccggaaacagatacgcctccggacctgtgggaaaggccctgagcgacgcatgtatgggcacaatcgcctccttcctgtctaagtaccaggacatcatcatcgaacaccagaaggtggtgaagggcaaccagaagagactggagagcctgcgggagctggccggcaaggaaaacctggaataccctagcgtgaccctgccacctcagcctcacaccaaggagggcgttgatgcctacaacgaagtgatcgcccgggtgcgaatgtgggtgaacctgaacctgtggcagaagctgaagctaagcagagatgatgccaagcctctgctgagactgaagggattcccttcctttcctctggtcgagagacaggccaacgaagtggactggtgggacatggtgtgtaacgtgaagaagctgatcaacgagaaaaaggaggatggcaaggtgttttggcagaatctggctggctacaagagacaggaagccctgagaccatacctgagcagcgaggaagatcggaagaagggaaagaaattcgctcggtaccagctgggcgacctgctgctgcacctggaaaagaagcacggcgaggactggggaaaggtgtacgacgaggcctgggagcggattgacaagaaagtggaaggcctgagcaagcacatcaagctggaagaggaacggagaagcgaggacgcccagagcaaggccgccctgaccgactggctgcgggctaaggccagcttcgtgatcgagggcctgaaggaggccgacaaggacgagttctgcagatgcgagctgaagctgcagaagtggtacggggacctgcggggaaagcccttcgccatcgaagccgagaacagcatcctggacatcagcggcttcagcaagcagtacaactgtgccttcatctggcagaaggacggcgtgaagaagctgaacctgtacctgatcatcaactacttcaagggcggcaagctgcggttcaagaagatcaaacctgaagccttcgaagccaacagattctacaccgtgatcaacaaaaagagcggcgagatcgtgcccatggaggtgaacttcaacttcgacgaccccaacctgatcatcctgcctctggcctttggcaagagacagggcagagaattcatctggaacgacctgctgtccctggaaaccggcagcctgaagctggccaacggaagagtgatcgagaagacactgtacaacagaagaacccggcaggatgagcctgccctgttcgtggccctgaccttcgagcggcgggaggtcctggactcctccaatatcaaaccaatgaacctgatcggcgtggcaagaggcgaaaacatccccgccgtgatcgccctgaccgaccccgagggctgcccactgagccggtttaaggatagcctgggaaacccaacccacatcctgagaatcggcgagagctataaggagaagcagcggaccatccaggccaagaaggaggtggagcagcggagagccggcggctacagccggaagtacgccagcaaagccaagaatctggcagacgatatggtgagaaacaccgctagagatctgctgtactacgccgtgacccaggatgccatgctgatcttcgccaacctgagccggggcttcggccggcagggcaagcggaccttcatggccgagagacagtacacacggatggaggactggctgaccgccaagctggcctacgagggcctgagcaagacctacctgtccaagacactggcccagtacacctccaagacatgcagcaactgtgggtttaccatcaccagcgccgactacgacagggtgctggagaagctgaagaagacagcaacaggctggatgaccacaattaacggcaaggagctgaaggtggagggccagattacctactacaacagatacaagagacagaacgtagtcaaggacctgtccgtcgagctggatagactgagcgaagaatctgtgaacaacgacatctcctcctggacaaagggcagaagcggagaagctctgagcctcctgaagaaaagattctcccatagacccgtgcaggagaagttcgtgtgcctgaactgcggcttcgagacacacgcagccgagcaagccgccctgaacatcgccagatcctggctgttcctgcggagccaggagtacaagaaataccagacaaacaagacaaccggcaacaccgataagagagccttcgtcgagacctggcagtccttttaccggaagaagcttaaggaggtgtggaaacctgccgtgcggtctggcggatctggcggaggctccacaagcaagcccggcgtgctgaccttcgccgacgtggccgtgtacttcagcagcgaggagtggggctgcctgaggcccgcccagagggccctgtacagggacgtgatgagggagacctacggccacctgggcgccctgggcttccccggccccaagcccgccctgatcagctggatggagcaggagagcgaggagagcgaggcctggagccccgccgccaaggaccccgaggagggcgagagcctgggcaccagccccaagaaaaagagaaaagtctaagctgccttctgcggggcttgccttctggccatgcccttcttctctcccttgcacctgtacctcttggtctttgaataaagcctgagtaggaaggctagcaaaaaaaaaaaaaaaaaaaaaaaaaaaaaaaaaaaaaaaaaaaaaaaaaaaaaaaaaaaaaaaaaaaaaaaaaaaaaaaa

SEQ ID NO: 3585 - RNA, 5419 nt, synthetic construct
  source 1..5419: mol_type = other RNA
aggaaataagagagaaaagaagagtaagaagaaatataagagccaccatggcccctaagaagaagcgtaaagtgagccgggtgaacggcagcggcagcggcggcggcatgaaccacgaccaggagttcgacccccctaaggtgtaccctcccgtccccgccgagaagagaaagcccatccgggtcctgagcctgttcgatggcatcgccaccggtctgctggtgctgaaggacctgggcatccaggtggataggtacattgcctccgaggtgtgcgaggactccatcaccgtgggaatggtgcgtcatcagggcaagatcatgtacgtgggcgacgtgcggagcgtgacacagaagcatatccaggagtggggccctttcgacctggtgatcggcggcagcccttgcaatgacctgagcatcgtgaacccagcccggaagggcctgtacgagggaaccggcagactgttcttcgagttttacagactgctgcacgacgcccggcctaaggaaggcgacgaccggcccttcttttggctgttcgagaatgtggtggccatgggagtcagcgacaagcgggatattagccggttcctggagagcaaccccgtgatgatcgatgccaaggaagtgagcgccgcccaccgggccagatacttctggggcaatctgcctggcatgaacagacccctggccagcaccgtgaacgacaagctggagctgcaggagtgcctggagcacggccggatcgccaagttcagcaaggtgagaaccatcaccacccgaagcaacagcatcaaacaaggcaaggaccagcactttcctgtgttcatgaacgagaaggaggacatcctgtggtgtaccgagatggagagagtgttcgggttcccagtccactacacagatgtcagcaacatgtctagactggccagacagagactgctgggaagaagctggtccgtccctgtgatcagacacctgttcgcccctctgaaggagtacttcgcctgcgtgagcagcggcaacagcaacgccaacagccggggccccagcttctctagcggcctggtgccactgtccctgagagggagccacatgggccccatggagatctacaaaaccgtgagcgcctggaagcggcagcctgtgcgcgtgctgagcctgtttcggaatatcgataaagtcctgaaaagcctgggattcctggagagcggctctggctccggcggtggcaccctgaagtacgtggaggatgtgacaaacgtggtcagacgggatgtggagaagtggggccccttcgatctggtgtacggcagcacccaacccctgggcagctcttgtgaccggtgccctggctggtacatgtttcagttccaccggatcctgcagtacgccctgccgagacaggagtcccagcggccattcttttggattttcatggacaacttgctgctgaccgaggatgaccaggaaactaccactcggttcctgcagaccgaagccgtgaccctgcaggacgtgagaggccgggactaccagaacgccatgcgggtgtggtccaacatccctggactgaaaagcaagcacgcacctctgacccctaaagaagaggagtacctgcaggcccaggtgcggagcagaagcaagctggacgcccctaaggtggatctgctggtgaagaattgcctcctgcccctgagagagtacttcaagtatttcagccagaatagtctgcccctgggcggcccaagcagcggcgcccctcctcccagcggcggcagcccagccggctccccaacctctaccgaggagggcacctctgagtccgccacccccgagagcggccctggcacctccaccgagcccagcgagggcagcgcacccggcagccctgccggcagccccacctccacagaggagggaaccagcaccgagcccagcgaaggcagcgccccaggcaccagcaccgagcctagtgagggcggctctggcggcggcagcgcccaggagattaaacggatcaacaagatcagaagaagacttgtgaaagacagcaacaccaagaaggccggcaagacaggccccatgaaaaccctgctggttagagtgatgacacccgatctgagagagcggctggaaaacctgagaaagaagcctgaaaatatcccccagcccatcagcaatacatctagagccaacctgaataagctgctgaccgattacaccgaaatgaagaaggcgatcctgcatgtgtactgggaagagttccagaaggaccctgtgggcctgatgagccgggtggcccagcctgccagcaagaagatcgatcagaacaagctgaaacctgagatggacgagaagggcaacctgaccaccgccggctttgcctgctctcagtgtggccagcccctgttcgtgtacaagctggagcaggtgtctgagaagggcaaggcttacaccaactacttcggacggtgcaatgtggccgagcacgaaaagctgatcctgctggcccagctgaagcccgagaaggatagcgacgaagccgtgacatatagcctgggaaagtttgggcagagggccctggatttctacagcattcatgtgaccaaggagtccacccaccccgtgaagcccctggcccagatcgccggaaacagatacgcctccggacctgtgggaaaggccctgagcgacgcatgtatgggcacaatcgcctccttcctgtctaagtaccaggacatcatcatcgaacaccagaaggtggtgaagggcaaccagaagagactggagagcctgcgggagctggccggcaaggaaaacctggaataccctagcgtgaccctgccacctcagcctcacaccaaggagggcgttgatgcctacaacgaagtgatcgcccgggtgcgaatgtgggtgaacctgaacctgtggcagaagctgaagctaagcagagatgatgccaagcctctgctgagactgaagggattcccttcctttcctctggtcgagagacaggccaacgaagtggactggtgggacatggtgtgtaacgtgaagaagctgatcaacgagaaaaaggaggatggcaaggtgttttggcagaatctggctggctacaagagacaggaagccctgagaccatacctgagcagcgaggaagatcggaagaagggaaagaaattcgctcggtaccagctgggcgacctgctgctgcacctggaaaagaagcacggcgaggactggggaaaggtgtacgacgaggcctgggagcggattgacaagaaagtggaaggcctgagcaagcacatcaagctggaagaggaacggagaagcgaggacgcccagagcaaggccgccctgaccgactggctgcgggctaaggccagcttcgtgatcgagggcctgaaggaggccgacaaggacgagttctgcagatgcgagctgaagctgcagaagtggtacggggacctgcggggaaagcccttcgccatcgaagccgagaacagcatcctggacatcagcggcttcagcaagcagtacaactgtgccttcatctggcagaaggacggcgtgaagaagctgaacctgtacctgatcatcaactacttcaagggcggcaagctgcggttcaagaagatcaaacctgaagccttcgaagccaacagattctacaccgtgatcaacaaaaagagcggcgagatcgtgcccatggaggtgaacttcaacttcgacgaccccaacctgatcatcctgcctctggcctttggcaagagacagggcagagaattcatctggaacgacctgctgtccctggaaaccggcagcctgaagctggccaacggaagagtgatcgagaagacactgtacaacagaagaacccggcaggatgagcctgccctgttcgtggccctgaccttcgagcggcgggaggtcctggactcctccaatatcaaaccaatgaacctgatcggcgtggcaagaggcgaaaacatccccgccgtgatcgccctgaccgaccccgagggctgcccactgagccggtttaaggatagcctgggaaacccaacccacatcctgagaatcggcgagagctataaggagaagcagcggaccatccaggccaagaaggaggtggagcagcggagagccggcggctacagccggaagtacgccagcaaagccaagaatctggcagacgatatggtgagaaacaccgctagagatctgctgtactacgccgtgacccaggatgccatgctgatcttcgccaacctgagccggggcttcggccggcagggcaagcggaccttcatggccgagagacagtacacacggatggaggactggctgaccgccaagctggcctacgagggcctgagcaagacctacctgtccaagacactggcccagtacacctccaagacatgcagcaactgtgggtttaccatcaccagcgccgactacgacagggtgctggagaagctgaagaagacagcaacaggctggatgaccacaattaacggcaaggagctgaaggtggagggccagattacctactacaacagatacaagagacagaacgtagtcaaggacctgtccgtcgagctggatagactgagcgaagaatctgtgaacaacgacatctcctcctggacaaagggcagaagcggagaagctctgagcctcctgaagaaaagattctcccatagacccgtgcaggagaagttcgtgtgcctgaactgcggcttcgagacacacgcagccgagcaagccgccctgaacatcgccagatcctggctgttcctgcggagccaggagtacaagaaataccagacaaacaagacaaccggcaacaccgataagagagccttcgtcgagacctggcagtccttttaccggaagaagcttaaggaggtgtggaaacctgccgtgcggtctggcggatctggcggaggctccacaagccaggtgcccgtgaccttcgaggacatcgccgtgtacttcagccaggaggagtgggaggacctggaggagcagcagagggagctgtacaaggacgtgatgaaggagaactacgagaccctgagcagcctgggcaccggcccccccgccgtgacccccgacatcatcagccacatcgagaggggcgaggagccctacatcaggttcgagagcggccccgaggagagggagatcggcaagagcagcaccagccccaagaaaaagagaaaagtctaagctgccttctgcggggcttgccttctggccatgcccttcttctctcccttgcacctgtacctcttggtctttgaataaagcctgagtaggaaggctagcaaaaaaaaaaaaaaaaaaaaaaaaaaaaaaaaaaaaaaaaaaaaaaaaaaaaaaaaaaaaaaaaaaaaaaaaaaaaaaaa

SEQ ID NO: 3586 - RNA, 5419 nt, synthetic construct
  source 1..5419: mol_type = other RNA
aggaaataagagagaaaagaagagtaagaagaaatataagagccaccatggcccctaagaagaagcgtaaagtgagccgggtgaacggcagcggcagcggcggcggcatgaaccacgaccaggagttcgacccccctaaggtgtaccctcccgtccccgccgagaagagaaagcccatccgggtcctgagcctgttcgatggcatcgccaccggtctgctggtgctgaaggacctgggcatccaggtggataggtacattgcctccgaggtgtgcgaggactccatcaccgtgggaatggtgcgtcatcagggcaagatcatgtacgtgggcgacgtgcggagcgtgacacagaagcatatccaggagtggggccctttcgacctggtgatcggcggcagcccttgcaatgacctgagcatcgtgaacccagcccggaagggcctgtacgagggaaccggcagactgttcttcgagttttacagactgctgcacgacgcccggcctaaggaaggcgacgaccggcccttcttttggctgttcgagaatgtggtggccatgggagtcagcgacaagcgggatattagccggttcctggagagcaaccccgtgatgatcgatgccaaggaagtgagcgccgcccaccgggccagatacttctggggcaatctgcctggcatgaacagacccctggccagcaccgtgaacgacaagctggagctgcaggagtgcctggagcacggccggatcgccaagttcagcaaggtgagaaccatcaccacccgaagcaacagcatcaaacaaggcaaggaccagcactttcctgtgttcatgaacgagaaggaggacatcctgtggtgtaccgagatggagagagtgttcgggttcccagtccactacacagatgtcagcaacatgtctagactggccagacagagactgctgggaagaagctggtccgtccctgtgatcagacacctgttcgcccctctgaaggagtacttcgcctgcgtgagcagcggcaacagcaacgccaacagccggggccccagcttctctagcggcctggtgccactgtccctgagagggagccacatgggccccatggagatctacaaaaccgtgagcgcctggaagcggcagcctgtgcgcgtgctgagcctgtttcggaatatcgataaagtcctgaaaagcctgggattcctggagagcggctctggctccggcggtggcaccctgaagtacgtggaggatgtgacaaacgtggtcagacgggatgtggagaagtggggccccttcgatctggtgtacggcagcacccaacccctgggcagctcttgtgaccggtgccctggctggtacatgtttcagttccaccggatcctgcagtacgccctgccgagacaggagtcccagcggccattcttttggattttcatggacaacttgctgctgaccgaggatgaccaggaaactaccactcggttcctgcagaccgaagccgtgaccctgcaggacgtgagaggccgggactaccagaacgccatgcgggtgtggtccaacatccctggactgaaaagcaagcacgcacctctgacccctaaagaagaggagtacctgcaggcccaggtgcggagcagaagcaagctggacgcccctaaggtggatctgctggtgaagaattgcctcctgcccctgagagagtacttcaagtatttcagccagaatagtctgcccctgggcggcccaagcagcggcgcccctcctcccagcggcggcagcccagccggctccccaacctctaccgaggagggcacctctgagtccgccacccccgagagcggccctggcacctccaccgagcccagcgagggcagcgcacccggcagccctgccggcagccccacctccacagaggagggaaccagcaccgagcccagcgaaggcagcgccccaggcaccagcaccgagcctagtgagggcggctctggcggcggcagcgcccaggagattaaacggatcaacaagatcagaagaagacttgtgaaagacagcaacaccaagaaggccggcaagacaggccccatgaaaaccctgctggttagagtgatgacacccgatctgagagagcggctggaaaacctgagaaagaagcctgaaaatatcccccagcccatcagcaatacatctagagccaacctgaataagctgctgaccgattacaccgaaatgaagaaggcgatcctgcatgtgtactgggaagagttccagaaggaccctgtgggcctgatgagccgggtggcccagcctgccagcaagaagatcgatcagaacaagctgaaacctgagatggacgagaagggcaacctgaccaccgccggctttgcctgctctcagtgtggccagcccctgttcgtgtacaagctggagcaggtgtctgagaagggcaaggcttacaccaactacttcggacggtgcaatgtggccgagcacgaaaagctgatcctgctggcccagctgaagcccgagaaggatagcgacgaagccgtgacatatagcctgggaaagtttgggcagagggccctggatttctacagcattcatgtgaccaaggagtccacccaccccgtgaagcccctggcccagatcgccggaaacagatacgcctccggacctgtgggaaaggccctgagcgacgcatgtatgggcacaatcgcctccttcctgtctaagtaccaggacatcatcatcgaacaccagaaggtggtgaagggcaaccagaagagactggagagcctgcgggagctggccggcaaggaaaacctggaataccctagcgtgaccctgccacctcagcctcacaccaaggagggcgttgatgcctacaacgaagtgatcgcccgggtgcgaatgtgggtgaacctgaacctgtggcagaagctgaagctaagcagagatgatgccaagcctctgctgagactgaagggattcccttcctttcctctggtcgagagacaggccaacgaagtggactggtgggacatggtgtgtaacgtgaagaagctgatcaacgagaaaaaggaggatggcaaggtgttttggcagaatctggctggctacaagagacaggaagccctgagaccatacctgagcagcgaggaagatcggaagaagggaaagaaattcgctcggtaccagctgggcgacctgctgctgcacctggaaaagaagcacggcgaggactggggaaaggtgtacgacgaggcctgggagcggattgacaagaaagtggaaggcctgagcaagcacatcaagctggaagaggaacggagaagcgaggacgcccagagcaaggccgccctgaccgactggctgcgggctaaggccagcttcgtgatcgagggcctgaaggaggccgacaaggacgagttctgcagatgcgagctgaagctgcagaagtggtacggggacctgcggggaaagcccttcgccatcgaagccgagaacagcatcctggacatcagcggcttcagcaagcagtacaactgtgccttcatctggcagaaggacggcgtgaagaagctgaacctgtacctgatcatcaactacttcaagggcggcaagctgcggttcaagaagatcaaacctgaagccttcgaagccaacagattctacaccgtgatcaacaaaaagagcggcgagatcgtgcccatggaggtgaacttcaacttcgacgaccccaacctgatcatcctgcctctggcctttggcaagagacagggcagagaattcatctggaacgacctgctgtccctggaaaccggcagcctgaagctggccaacggaagagtgatcgagaagacactgtacaacagaagaacccggcaggatgagcctgccctgttcgtggccctgaccttcgagcggcgggaggtcctggactcctccaatatcaaaccaatgaacctgatcggcgtggcaagaggcgaaaacatccccgccgtgatcgccctgaccgaccccgagggctgcccactgagccggtttaaggatagcctgggaaacccaacccacatcctgagaatcggcgagagctataaggagaagcagcggaccatccaggccaagaaggaggtggagcagcggagagccggcggctacagccggaagtacgccagcaaagccaagaatctggcagacgatatggtgagaaacaccgctagagatctgctgtactacgccgtgacccaggatgccatgctgatcttcgccaacctgagccggggcttcggccggcagggcaagcggaccttcatggccgagagacagtacacacggatggaggactggctgaccgccaagctggcctacgagggcctgagcaagacctacctgtccaagacactggcccagtacacctccaagacatgcagcaactgtgggtttaccatcaccagcgccgactacgacagggtgctggagaagctgaagaagacagcaacaggctggatgaccacaattaacggcaaggagctgaaggtggagggccagattacctactacaacagatacaagagacagaacgtagtcaaggacctgtccgtcgagctggatagactgagcgaagaatctgtgaacaacgacatctcctcctggacaaagggcagaagcggagaagctctgagcctcctgaagaaaagattctcccatagacccgtgcaggagaagttcgtgtgcctgaactgcggcttcgagacacacgcagccgagcaagccgccctgaacatcgccagatcctggctgttcctgcggagccaggagtacaagaaataccagacaaacaagacaaccggcaacaccgataagagagccttcgtcgagacctggcagtccttttaccggaagaagcttaaggaggtgtggaaacctgccgtgcggtctggcggatctggcggaggctccacaagcgaggagcccgtgagcttcgccgaggtggccgtgtacttcagcagggaggagtgggccctgctggaccccgcccagagggccctgtacagggacgtgatgctggagacctaccagtgcgtggccagcatggagagcctgctgcccgcccccaagcccatcgtgatcagcctgctggagggcggcgaggacctgtggatccccgacatgcagagccccgaggacgtggccggcgacctgaggcccaccagccccaagaaaaagagaaaagtctaagctgccttctgcggggcttgccttctggccatgcccttcttctctcccttgcacctgtacctcttggtctttgaataaagcctgagtaggaaggctagcaaaaaaaaaaaaaaaaaaaaaaaaaaaaaaaaaaaaaaaaaaaaaaaaaaaaaaaaaaaaaaaaaaaaaaaaaaaaaaaa

SEQ ID NO: 3587 - RNA, 5419 nt, synthetic construct
  source 1..5419: mol_type = other RNA
aggaaataagagagaaaagaagagtaagaagaaatataagagccaccatggcccctaagaagaagcgtaaagtgagccgggtgaacggcagcggcagcggcggcggcatgaaccacgaccaggagttcgacccccctaaggtgtaccctcccgtccccgccgagaagagaaagcccatccgggtcctgagcctgttcgatggcatcgccaccggtctgctggtgctgaaggacctgggcatccaggtggataggtacattgcctccgaggtgtgcgaggactccatcaccgtgggaatggtgcgtcatcagggcaagatcatgtacgtgggcgacgtgcggagcgtgacacagaagcatatccaggagtggggccctttcgacctggtgatcggcggcagcccttgcaatgacctgagcatcgtgaacccagcccggaagggcctgtacgagggaaccggcagactgttcttcgagttttacagactgctgcacgacgcccggcctaaggaaggcgacgaccggcccttcttttggctgttcgagaatgtggtggccatgggagtcagcgacaagcgggatattagccggttcctggagagcaaccccgtgatgatcgatgccaaggaagtgagcgccgcccaccgggccagatacttctggggcaatctgcctggcatgaacagacccctggccagcaccgtgaacgacaagctggagctgcaggagtgcctggagcacggccggatcgccaagttcagcaaggtgagaaccatcaccacccgaagcaacagcatcaaacaaggcaaggaccagcactttcctgtgttcatgaacgagaaggaggacatcctgtggtgtaccgagatggagagagtgttcgggttcccagtccactacacagatgtcagcaacatgtctagactggccagacagagactgctgggaagaagctggtccgtccctgtgatcagacacctgttcgcccctctgaaggagtacttcgcctgcgtgagcagcggcaacagcaacgccaacagccggggccccagcttctctagcggcctggtgccactgtccctgagagggagccacatgggccccatggagatctacaaaaccgtgagcgcctggaagcggcagcctgtgcgcgtgctgagcctgtttcggaatatcgataaagtcctgaaaagcctgggattcctggagagcggctctggctccggcggtggcaccctgaagtacgtggaggatgtgacaaacgtggtcagacgggatgtggagaagtggggccccttcgatctggtgtacggcagcacccaacccctgggcagctcttgtgaccggtgccctggctggtacatgtttcagttccaccggatcctgcagtacgccctgccgagacaggagtcccagcggccattcttttggattttcatggacaacttgctgctgaccgaggatgaccaggaaactaccactcggttcctgcagaccgaagccgtgaccctgcaggacgtgagaggccgggactaccagaacgccatgcgggtgtggtccaacatccctggactgaaaagcaagcacgcacctctgacccctaaagaagaggagtacctgcaggcccaggtgcggagcagaagcaagctggacgcccctaaggtggatctgctggtgaagaattgcctcctgcccctgagagagtacttcaagtatttcagccagaatagtctgcccctgggcggcccaagcagcggcgcccctcctcccagcggcggcagcccagccggctccccaacctctaccgaggagggcacctctgagtccgccacccccgagagcggccctggcacctccaccgagcccagcgagggcagcgcacccggcagccctgccggcagccccacctccacagaggagggaaccagcaccgagcccagcgaaggcagcgccccaggcaccagcaccgagcctagtgagggcggctctggcggcggcagcgcccaggagattaaacggatcaacaagatcagaagaagacttgtgaaagacagcaacaccaagaaggccggcaagacaggccccatgaaaaccctgctggttagagtgatgacacccgatctgagagagcggctggaaaacctgagaaagaagcctgaaaatatcccccagcccatcagcaatacatctagagccaacctgaataagctgctgaccgattacaccgaaatgaagaaggcgatcctgcatgtgtactgggaagagttccagaaggaccctgtgggcctgatgagccgggtggcccagcctgccagcaagaagatcgatcagaacaagctgaaacctgagatggacgagaagggcaacctgaccaccgccggctttgcctgctctcagtgtggccagcccctgttcgtgtacaagctggagcaggtgtctgagaagggcaaggcttacaccaactacttcggacggtgcaatgtggccgagcacgaaaagctgatcctgctggcccagctgaagcccgagaaggatagcgacgaagccgtgacatatagcctgggaaagtttgggcagagggccctggatttctacagcattcatgtgaccaaggagtccacccaccccgtgaagcccctggcccagatcgccggaaacagatacgcctccggacctgtgggaaaggccctgagcgacgcatgtatgggcacaatcgcctccttcctgtctaagtaccaggacatcatcatcgaacaccagaaggtggtgaagggcaaccagaagagactggagagcctgcgggagctggccggcaaggaaaacctggaataccctagcgtgaccctgccacctcagcctcacaccaaggagggcgttgatgcctacaacgaagtgatcgcccgggtgcgaatgtgggtgaacctgaacctgtggcagaagctgaagctaagcagagatgatgccaagcctctgctgagactgaagggattcccttcctttcctctggtcgagagacaggccaacgaagtggactggtgggacatggtgtgtaacgtgaagaagctgatcaacgagaaaaaggaggatggcaaggtgttttggcagaatctggctggctacaagagacaggaagccctgagaccatacctgagcagcgaggaagatcggaagaagggaaagaaattcgctcggtaccagctgggcgacctgctgctgcacctggaaaagaagcacggcgaggactggggaaaggtgtacgacgaggcctgggagcggattgacaagaaagtggaaggcctgagcaagcacatcaagctggaagaggaacggagaagcgaggacgcccagagcaaggccgccctgaccgactggctgcgggctaaggccagcttcgtgatcgagggcctgaaggaggccgacaaggacgagttctgcagatgcgagctgaagctgcagaagtggtacggggacctgcggggaaagcccttcgccatcgaagccgagaacagcatcctggacatcagcggcttcagcaagcagtacaactgtgccttcatctggcagaaggacggcgtgaagaagctgaacctgtacctgatcatcaactacttcaagggcggcaagctgcggttcaagaagatcaaacctgaagccttcgaagccaacagattctacaccgtgatcaacaaaaagagcggcgagatcgtgcccatggaggtgaacttcaacttcgacgaccccaacctgatcatcctgcctctggcctttggcaagagacagggcagagaattcatctggaacgacctgctgtccctggaaaccggcagcctgaagctggccaacggaagagtgatcgagaagacactgtacaacagaagaacccggcaggatgagcctgccctgttcgtggccctgaccttcgagcggcgggaggtcctggactcctccaatatcaaaccaatgaacctgatcggcgtggcaagaggcgaaaacatccccgccgtgatcgccctgaccgaccccgagggctgcccactgagccggtttaaggatagcctgggaaacccaacccacatcctgagaatcggcgagagctataaggagaagcagcggaccatccaggccaagaaggaggtggagcagcggagagccggcggctacagccggaagtacgccagcaaagccaagaatctggcagacgatatggtgagaaacaccgctagagatctgctgtactacgccgtgacccaggatgccatgctgatcttcgccaacctgagccggggcttcggccggcagggcaagcggaccttcatggccgagagacagtacacacggatggaggactggctgaccgccaagctggcctacgagggcctgagcaagacctacctgtccaagacactggcccagtacacctccaagacatgcagcaactgtgggtttaccatcaccagcgccgactacgacagggtgctggagaagctgaagaagacagcaacaggctggatgaccacaattaacggcaaggagctgaaggtggagggccagattacctactacaacagatacaagagacagaacgtagtcaaggacctgtccgtcgagctggatagactgagcgaagaatctgtgaacaacgacatctcctcctggacaaagggcagaagcggagaagctctgagcctcctgaagaaaagattctcccatagacccgtgcaggagaagttcgtgtgcctgaactgcggcttcgagacacacgcagccgagcaagccgccctgaacatcgccagatcctggctgttcctgcggagccaggagtacaagaaataccagacaaacaagacaaccggcaacaccgataagagagccttcgtcgagacctggcagtccttttaccggaagaagcttaaggaggtgtggaaacctgccgtgcggtctggcggatctggcggaggctccacaagcatgagcctgggcagcgagctgttcagggacgtggccatcgtgttcagccaggaggagtggcagtggctggcccccgcccagagggacctgtacagggacgtgatgctggagacctacagcaacctggtgagcctgggcctggccgtgagcaagcccgacgtgatcagcttcctggagcagggcaaggagccctggatggtggagagggtggtgagcggcggcctgtgccccgtgctggagagcaccagccccaagaaaaagagaaaagtctaagctgccttctgcggggcttgccttctggccatgcccttcttctctcccttgcacctgtacctcttggtctttgaataaagcctgagtaggaaggctagcaaaaaaaaaaaaaaaaaaaaaaaaaaaaaaaaaaaaaaaaaaaaaaaaaaaaaaaaaaaaaaaaaaaaaaaaaaaaaaaa

SEQ ID NO: 3588 - RNA, 5419 nt, synthetic construct
  source 1..5419: mol_type = other RNA
aggaaataagagagaaaagaagagtaagaagaaatataagagccaccatggcccctaagaagaagcgtaaagtgagccgggtgaacggcagcggcagcggcggcggcatgaaccacgaccaggagttcgacccccctaaggtgtaccctcccgtccccgccgagaagagaaagcccatccgggtcctgagcctgttcgatggcatcgccaccggtctgctggtgctgaaggacctgggcatccaggtggataggtacattgcctccgaggtgtgcgaggactccatcaccgtgggaatggtgcgtcatcagggcaagatcatgtacgtgggcgacgtgcggagcgtgacacagaagcatatccaggagtggggccctttcgacctggtgatcggcggcagcccttgcaatgacctgagcatcgtgaacccagcccggaagggcctgtacgagggaaccggcagactgttcttcgagttttacagactgctgcacgacgcccggcctaaggaaggcgacgaccggcccttcttttggctgttcgagaatgtggtggccatgggagtcagcgacaagcgggatattagccggttcctggagagcaaccccgtgatgatcgatgccaaggaagtgagcgccgcccaccgggccagatacttctggggcaatctgcctggcatgaacagacccctggccagcaccgtgaacgacaagctggagctgcaggagtgcctggagcacggccggatcgccaagttcagcaaggtgagaaccatcaccacccgaagcaacagcatcaaacaaggcaaggaccagcactttcctgtgttcatgaacgagaaggaggacatcctgtggtgtaccgagatggagagagtgttcgggttcccagtccactacacagatgtcagcaacatgtctagactggccagacagagactgctgggaagaagctggtccgtccctgtgatcagacacctgttcgcccctctgaaggagtacttcgcctgcgtgagcagcggcaacagcaacgccaacagccggggccccagcttctctagcggcctggtgccactgtccctgagagggagccacatgggccccatggagatctacaaaaccgtgagcgcctggaagcggcagcctgtgcgcgtgctgagcctgtttcggaatatcgataaagtcctgaaaagcctgggattcctggagagcggctctggctccggcggtggcaccctgaagtacgtggaggatgtgacaaacgtggtcagacgggatgtggagaagtggggccccttcgatctggtgtacggcagcacccaacccctgggcagctcttgtgaccggtgccctggctggtacatgtttcagttccaccggatcctgcagtacgccctgccgagacaggagtcccagcggccattcttttggattttcatggacaacttgctgctgaccgaggatgaccaggaaactaccactcggttcctgcagaccgaagccgtgaccctgcaggacgtgagaggccgggactaccagaacgccatgcgggtgtggtccaacatccctggactgaaaagcaagcacgcacctctgacccctaaagaagaggagtacctgcaggcccaggtgcggagcagaagcaagctggacgcccctaaggtggatctgctggtgaagaattgcctcctgcccctgagagagtacttcaagtatttcagccagaatagtctgcccctgggcggcccaagcagcggcgcccctcctcccagcggcggcagcccagccggctccccaacctctaccgaggagggcacctctgagtccgccacccccgagagcggccctggcacctccaccgagcccagcgagggcagcgcacccggcagccctgccggcagccccacctccacagaggagggaaccagcaccgagcccagcgaaggcagcgccccaggcaccagcaccgagcctagtgagggcggctctggcggcggcagcgcccaggagattaaacggatcaacaagatcagaagaagacttgtgaaagacagcaacaccaagaaggccggcaagacaggccccatgaaaaccctgctggttagagtgatgacacccgatctgagagagcggctggaaaacctgagaaagaagcctgaaaatatcccccagcccatcagcaatacatctagagccaacctgaataagctgctgaccgattacaccgaaatgaagaaggcgatcctgcatgtgtactgggaagagttccagaaggaccctgtgggcctgatgagccgggtggcccagcctgccagcaagaagatcgatcagaacaagctgaaacctgagatggacgagaagggcaacctgaccaccgccggctttgcctgctctcagtgtggccagcccctgttcgtgtacaagctggagcaggtgtctgagaagggcaaggcttacaccaactacttcggacggtgcaatgtggccgagcacgaaaagctgatcctgctggcccagctgaagcccgagaaggatagcgacgaagccgtgacatatagcctgggaaagtttgggcagagggccctggatttctacagcattcatgtgaccaaggagtccacccaccccgtgaagcccctggcccagatcgccggaaacagatacgcctccggacctgtgggaaaggccctgagcgacgcatgtatgggcacaatcgcctccttcctgtctaagtaccaggacatcatcatcgaacaccagaaggtggtgaagggcaaccagaagagactggagagcctgcgggagctggccggcaaggaaaacctggaataccctagcgtgaccctgccacctcagcctcacaccaaggagggcgttgatgcctacaacgaagtgatcgcccgggtgcgaatgtgggtgaacctgaacctgtggcagaagctgaagctaagcagagatgatgccaagcctctgctgagactgaagggattcccttcctttcctctggtcgagagacaggccaacgaagtggactggtgggacatggtgtgtaacgtgaagaagctgatcaacgagaaaaaggaggatggcaaggtgttttggcagaatctggctggctacaagagacaggaagccctgagaccatacctgagcagcgaggaagatcggaagaagggaaagaaattcgctcggtaccagctgggcgacctgctgctgcacctggaaaagaagcacggcgaggactggggaaaggtgtacgacgaggcctgggagcggattgacaagaaagtggaaggcctgagcaagcacatcaagctggaagaggaacggagaagcgaggacgcccagagcaaggccgccctgaccgactggctgcgggctaaggccagcttcgtgatcgagggcctgaaggaggccgacaaggacgagttctgcagatgcgagctgaagctgcagaagtggtacggggacctgcggggaaagcccttcgccatcgaagccgagaacagcatcctggacatcagcggcttcagcaagcagtacaactgtgccttcatctggcagaaggacggcgtgaagaagctgaacctgtacctgatcatcaactacttcaagggcggcaagctgcggttcaagaagatcaaacctgaagccttcgaagccaacagattctacaccgtgatcaacaaaaagagcggcgagatcgtgcccatggaggtgaacttcaacttcgacgaccccaacctgatcatcctgcctctggcctttggcaagagacagggcagagaattcatctggaacgacctgctgtccctggaaaccggcagcctgaagctggccaacggaagagtgatcgagaagacactgtacaacagaagaacccggcaggatgagcctgccctgttcgtggccctgaccttcgagcggcgggaggtcctggactcctccaatatcaaaccaatgaacctgatcggcgtggcaagaggcgaaaacatccccgccgtgatcgccctgaccgaccccgagggctgcccactgagccggtttaaggatagcctgggaaacccaacccacatcctgagaatcggcgagagctataaggagaagcagcggaccatccaggccaagaaggaggtggagcagcggagagccggcggctacagccggaagtacgccagcaaagccaagaatctggcagacgatatggtgagaaacaccgctagagatctgctgtactacgccgtgacccaggatgccatgctgatcttcgccaacctgagccggggcttcggccggcagggcaagcggaccttcatggccgagagacagtacacacggatggaggactggctgaccgccaagctggcctacgagggcctgagcaagacctacctgtccaagacactggcccagtacacctccaagacatgcagcaactgtgggtttaccatcaccagcgccgactacgacagggtgctggagaagctgaagaagacagcaacaggctggatgaccacaattaacggcaaggagctgaaggtggagggccagattacctactacaacagatacaagagacagaacgtagtcaaggacctgtccgtcgagctggatagactgagcgaagaatctgtgaacaacgacatctcctcctggacaaagggcagaagcggagaagctctgagcctcctgaagaaaagattctcccatagacccgtgcaggagaagttcgtgtgcctgaactgcggcttcgagacacacgcagccgagcaagccgccctgaacatcgccagatcctggctgttcctgcggagccaggagtacaagaaataccagacaaacaagacaaccggcaacaccgataagagagccttcgtcgagacctggcagtccttttaccggaagaagcttaaggaggtgtggaaacctgccgtgcggtctggcggatctggcggaggctccacaagcagccccgagagcgtggccttcgaggacgtggccgtgtacttcaccaagaaggagtgggccagcctgctgcccgcccagagggccctgtacaaggaggtgatgctggagaactacggcatggtggccagcctggcccccccccccatcagcaagcccgccctgatcagccagctggagcagggcaaggagccctggttcaccaggccccagggcgccctgaacaggagggccaggagggtggtgaccagccccaagaaaaagagaaaagtctaagctgccttctgcggggcttgccttctggccatgcccttcttctctcccttgcacctgtacctcttggtctttgaataaagcctgagtaggaaggctagcaaaaaaaaaaaaaaaaaaaaaaaaaaaaaaaaaaaaaaaaaaaaaaaaaaaaaaaaaaaaaaaaaaaaaaaaaaaaaaaa

SEQ ID NO: 3589 - RNA, 5419 nt, synthetic construct
  source 1..5419: mol_type = other RNA
aggaaataagagagaaaagaagagtaagaagaaatataagagccaccatggcccctaagaagaagcgtaaagtgagccgggtgaacggcagcggcagcggcggcggcatgaaccacgaccaggagttcgacccccctaaggtgtaccctcccgtccccgccgagaagagaaagcccatccgggtcctgagcctgttcgatggcatcgccaccggtctgctggtgctgaaggacctgggcatccaggtggataggtacattgcctccgaggtgtgcgaggactccatcaccgtgggaatggtgcgtcatcagggcaagatcatgtacgtgggcgacgtgcggagcgtgacacagaagcatatccaggagtggggccctttcgacctggtgatcggcggcagcccttgcaatgacctgagcatcgtgaacccagcccggaagggcctgtacgagggaaccggcagactgttcttcgagttttacagactgctgcacgacgcccggcctaaggaaggcgacgaccggcccttcttttggctgttcgagaatgtggtggccatgggagtcagcgacaagcgggatattagccggttcctggagagcaaccccgtgatgatcgatgccaaggaagtgagcgccgcccaccgggccagatacttctggggcaatctgcctggcatgaacagacccctggccagcaccgtgaacgacaagctggagctgcaggagtgcctggagcacggccggatcgccaagttcagcaaggtgagaaccatcaccacccgaagcaacagcatcaaacaaggcaaggaccagcactttcctgtgttcatgaacgagaaggaggacatcctgtggtgtaccgagatggagagagtgttcgggttcccagtccactacacagatgtcagcaacatgtctagactggccagacagagactgctgggaagaagctggtccgtccctgtgatcagacacctgttcgcccctctgaaggagtacttcgcctgcgtgagcagcggcaacagcaacgccaacagccggggccccagcttctctagcggcctggtgccactgtccctgagagggagccacatgggccccatggagatctacaaaaccgtgagcgcctggaagcggcagcctgtgcgcgtgctgagcctgtttcggaatatcgataaagtcctgaaaagcctgggattcctggagagcggctctggctccggcggtggcaccctgaagtacgtggaggatgtgacaaacgtggtcagacgggatgtggagaagtggggccccttcgatctggtgtacggcagcacccaacccctgggcagctcttgtgaccggtgccctggctggtacatgtttcagttccaccggatcctgcagtacgccctgccgagacaggagtcccagcggccattcttttggattttcatggacaacttgctgctgaccgaggatgaccaggaaactaccactcggttcctgcagaccgaagccgtgaccctgcaggacgtgagaggccgggactaccagaacgccatgcgggtgtggtccaacatccctggactgaaaagcaagcacgcacctctgacccctaaagaagaggagtacctgcaggcccaggtgcggagcagaagcaagctggacgcccctaaggtggatctgctggtgaagaattgcctcctgcccctgagagagtacttcaagtatttcagccagaatagtctgcccctgggcggcccaagcagcggcgcccctcctcccagcggcggcagcccagccggctccccaacctctaccgaggagggcacctctgagtccgccacccccgagagcggccctggcacctccaccgagcccagcgagggcagcgcacccggcagccctgccggcagccccacctccacagaggagggaaccagcaccgagcccagcgaaggcagcgccccaggcaccagcaccgagcctagtgagggcggctctggcggcggcagcgcccaggagattaaacggatcaacaagatcagaagaagacttgtgaaagacagcaacaccaagaaggccggcaagacaggccccatgaaaaccctgctggttagagtgatgacacccgatctgagagagcggctggaaaacctgagaaagaagcctgaaaatatcccccagcccatcagcaatacatctagagccaacctgaataagctgctgaccgattacaccgaaatgaagaaggcgatcctgcatgtgtactgggaagagttccagaaggaccctgtgggcctgatgagccgggtggcccagcctgccagcaagaagatcgatcagaacaagctgaaacctgagatggacgagaagggcaacctgaccaccgccggctttgcctgctctcagtgtggccagcccctgttcgtgtacaagctggagcaggtgtctgagaagggcaaggcttacaccaactacttcggacggtgcaatgtggccgagcacgaaaagctgatcctgctggcccagctgaagcccgagaaggatagcgacgaagccgtgacatatagcctgggaaagtttgggcagagggccctggatttctacagcattcatgtgaccaaggagtccacccaccccgtgaagcccctggcccagatcgccggaaacagatacgcctccggacctgtgggaaaggccctgagcgacgcatgtatgggcacaatcgcctccttcctgtctaagtaccaggacatcatcatcgaacaccagaaggtggtgaagggcaaccagaagagactggagagcctgcgggagctggccggcaaggaaaacctggaataccctagcgtgaccctgccacctcagcctcacaccaaggagggcgttgatgcctacaacgaagtgatcgcccgggtgcgaatgtgggtgaacctgaacctgtggcagaagctgaagctaagcagagatgatgccaagcctctgctgagactgaagggattcccttcctttcctctggtcgagagacaggccaacgaagtggactggtgggacatggtgtgtaacgtgaagaagctgatcaacgagaaaaaggaggatggcaaggtgttttggcagaatctggctggctacaagagacaggaagccctgagaccatacctgagcagcgaggaagatcggaagaagggaaagaaattcgctcggtaccagctgggcgacctgctgctgcacctggaaaagaagcacggcgaggactggggaaaggtgtacgacgaggcctgggagcggattgacaagaaagtggaaggcctgagcaagcacatcaagctggaagaggaacggagaagcgaggacgcccagagcaaggccgccctgaccgactggctgcgggctaaggccagcttcgtgatcgagggcctgaaggaggccgacaaggacgagttctgcagatgcgagctgaagctgcagaagtggtacggggacctgcggggaaagcccttcgccatcgaagccgagaacagcatcctggacatcagcggcttcagcaagcagtacaactgtgccttcatctggcagaaggacggcgtgaagaagctgaacctgtacctgatcatcaactacttcaagggcggcaagctgcggttcaagaagatcaaacctgaagccttcgaagccaacagattctacaccgtgatcaacaaaaagagcggcgagatcgtgcccatggaggtgaacttcaacttcgacgaccccaacctgatcatcctgcctctggcctttggcaagagacagggcagagaattcatctggaacgacctgctgtccctggaaaccggcagcctgaagctggccaacggaagagtgatcgagaagacactgtacaacagaagaacccggcaggatgagcctgccctgttcgtggccctgaccttcgagcggcgggaggtcctggactcctccaatatcaaaccaatgaacctgatcggcgtggcaagaggcgaaaacatccccgccgtgatcgccctgaccgaccccgagggctgcccactgagccggtttaaggatagcctgggaaacccaacccacatcctgagaatcggcgagagctataaggagaagcagcggaccatccaggccaagaaggaggtggagcagcggagagccggcggctacagccggaagtacgccagcaaagccaagaatctggcagacgatatggtgagaaacaccgctagagatctgctgtactacgccgtgacccaggatgccatgctgatcttcgccaacctgagccggggcttcggccggcagggcaagcggaccttcatggccgagagacagtacacacggatggaggactggctgaccgccaagctggcctacgagggcctgagcaagacctacctgtccaagacactggcccagtacacctccaagacatgcagcaactgtgggtttaccatcaccagcgccgactacgacagggtgctggagaagctgaagaagacagcaacaggctggatgaccacaattaacggcaaggagctgaaggtggagggccagattacctactacaacagatacaagagacagaacgtagtcaaggacctgtccgtcgagctggatagactgagcgaagaatctgtgaacaacgacatctcctcctggacaaagggcagaagcggagaagctctgagcctcctgaagaaaagattctcccatagacccgtgcaggagaagttcgtgtgcctgaactgcggcttcgagacacacgcagccgagcaagccgccctgaacatcgccagatcctggctgttcctgcggagccaggagtacaagaaataccagacaaacaagacaaccggcaacaccgataagagagccttcgtcgagacctggcagtccttttaccggaagaagcttaaggaggtgtggaaacctgccgtgcggtctggcggatctggcggaggctccacaagcccccaggagcccgtgaccttcgaggacgtggccgtgtacttcacccagaaccagtgggccagcctggaccccatgcagagggccctgtacagggaggtgatgctggagaactacgccagcgtggccagcctggccttccccttccccaagcccgacctggtgagccagctggagaggggcgaggccccctggagccccgacccctgggaggccgaggtgctgaagggcacctgccccggcggcaccagccccaagaaaaagagaaaagtctaagctgccttctgcggggcttgccttctggccatgcccttcttctctcccttgcacctgtacctcttggtctttgaataaagcctgagtaggaaggctagcaaaaaaaaaaaaaaaaaaaaaaaaaaaaaaaaaaaaaaaaaaaaaaaaaaaaaaaaaaaaaaaaaaaaaaaaaaaaaaaa

SEQ ID NO: 3590 - RNA, 5419 nt, synthetic construct
  source 1..5419: mol_type = other RNA
aggaaataagagagaaaagaagagtaagaagaaatataagagccaccatggcccctaagaagaagcgtaaagtgagccgggtgaacggcagcggcagcggcggcggcatgaaccacgaccaggagttcgacccccctaaggtgtaccctcccgtccccgccgagaagagaaagcccatccgggtcctgagcctgttcgatggcatcgccaccggtctgctggtgctgaaggacctgggcatccaggtggataggtacattgcctccgaggtgtgcgaggactccatcaccgtgggaatggtgcgtcatcagggcaagatcatgtacgtgggcgacgtgcggagcgtgacacagaagcatatccaggagtggggccctttcgacctggtgatcggcggcagcccttgcaatgacctgagcatcgtgaacccagcccggaagggcctgtacgagggaaccggcagactgttcttcgagttttacagactgctgcacgacgcccggcctaaggaaggcgacgaccggcccttcttttggctgttcgagaatgtggtggccatgggagtcagcgacaagcgggatattagccggttcctggagagcaaccccgtgatgatcgatgccaaggaagtgagcgccgcccaccgggccagatacttctggggcaatctgcctggcatgaacagacccctggccagcaccgtgaacgacaagctggagctgcaggagtgcctggagcacggccggatcgccaagttcagcaaggtgagaaccatcaccacccgaagcaacagcatcaaacaaggcaaggaccagcactttcctgtgttcatgaacgagaaggaggacatcctgtggtgtaccgagatggagagagtgttcgggttcccagtccactacacagatgtcagcaacatgtctagactggccagacagagactgctgggaagaagctggtccgtccctgtgatcagacacctgttcgcccctctgaaggagtacttcgcctgcgtgagcagcggcaacagcaacgccaacagccggggccccagcttctctagcggcctggtgccactgtccctgagagggagccacatgggccccatggagatctacaaaaccgtgagcgcctggaagcggcagcctgtgcgcgtgctgagcctgtttcggaatatcgataaagtcctgaaaagcctgggattcctggagagcggctctggctccggcggtggcaccctgaagtacgtggaggatgtgacaaacgtggtcagacgggatgtggagaagtggggccccttcgatctggtgtacggcagcacccaacccctgggcagctcttgtgaccggtgccctggctggtacatgtttcagttccaccggatcctgcagtacgccctgccgagacaggagtcccagcggccattcttttggattttcatggacaacttgctgctgaccgaggatgaccaggaaactaccactcggttcctgcagaccgaagccgtgaccctgcaggacgtgagaggccgggactaccagaacgccatgcgggtgtggtccaacatccctggactgaaaagcaagcacgcacctctgacccctaaagaagaggagtacctgcaggcccaggtgcggagcagaagcaagctggacgcccctaaggtggatctgctggtgaagaattgcctcctgcccctgagagagtacttcaagtatttcagccagaatagtctgcccctgggcggcccaagcagcggcgcccctcctcccagcggcggcagcccagccggctccccaacctctaccgaggagggcacctctgagtccgccacccccgagagcggccctggcacctccaccgagcccagcgagggcagcgcacccggcagccctgccggcagccccacctccacagaggagggaaccagcaccgagcccagcgaaggcagcgccccaggcaccagcaccgagcctagtgagggcggctctggcggcggcagcgcccaggagattaaacggatcaacaagatcagaagaagacttgtgaaagacagcaacaccaagaaggccggcaagacaggccccatgaaaaccctgctggttagagtgatgacacccgatctgagagagcggctggaaaacctgagaaagaagcctgaaaatatcccccagcccatcagcaatacatctagagccaacctgaataagctgctgaccgattacaccgaaatgaagaaggcgatcctgcatgtgtactgggaagagttccagaaggaccctgtgggcctgatgagccgggtggcccagcctgccagcaagaagatcgatcagaacaagctgaaacctgagatggacgagaagggcaacctgaccaccgccggctttgcctgctctcagtgtggccagcccctgttcgtgtacaagctggagcaggtgtctgagaagggcaaggcttacaccaactacttcggacggtgcaatgtggccgagcacgaaaagctgatcctgctggcccagctgaagcccgagaaggatagcgacgaagccgtgacatatagcctgggaaagtttgggcagagggccctggatttctacagcattcatgtgaccaaggagtccacccaccccgtgaagcccctggcccagatcgccggaaacagatacgcctccggacctgtgggaaaggccctgagcgacgcatgtatgggcacaatcgcctccttcctgtctaagtaccaggacatcatcatcgaacaccagaaggtggtgaagggcaaccagaagagactggagagcctgcgggagctggccggcaaggaaaacctggaataccctagcgtgaccctgccacctcagcctcacaccaaggagggcgttgatgcctacaacgaagtgatcgcccgggtgcgaatgtgggtgaacctgaacctgtggcagaagctgaagctaagcagagatgatgccaagcctctgctgagactgaagggattcccttcctttcctctggtcgagagacaggccaacgaagtggactggtgggacatggtgtgtaacgtgaagaagctgatcaacgagaaaaaggaggatggcaaggtgttttggcagaatctggctggctacaagagacaggaagccctgagaccatacctgagcagcgaggaagatcggaagaagggaaagaaattcgctcggtaccagctgggcgacctgctgctgcacctggaaaagaagcacggcgaggactggggaaaggtgtacgacgaggcctgggagcggattgacaagaaagtggaaggcctgagcaagcacatcaagctggaagaggaacggagaagcgaggacgcccagagcaaggccgccctgaccgactggctgcgggctaaggccagcttcgtgatcgagggcctgaaggaggccgacaaggacgagttctgcagatgcgagctgaagctgcagaagtggtacggggacctgcggggaaagcccttcgccatcgaagccgagaacagcatcctggacatcagcggcttcagcaagcagtacaactgtgccttcatctggcagaaggacggcgtgaagaagctgaacctgtacctgatcatcaactacttcaagggcggcaagctgcggttcaagaagatcaaacctgaagccttcgaagccaacagattctacaccgtgatcaacaaaaagagcggcgagatcgtgcccatggaggtgaacttcaacttcgacgaccccaacctgatcatcctgcctctggcctttggcaagagacagggcagagaattcatctggaacgacctgctgtccctggaaaccggcagcctgaagctggccaacggaagagtgatcgagaagacactgtacaacagaagaacccggcaggatgagcctgccctgttcgtggccctgaccttcgagcggcgggaggtcctggactcctccaatatcaaaccaatgaacctgatcggcgtggcaagaggcgaaaacatccccgccgtgatcgccctgaccgaccccgagggctgcccactgagccggtttaaggatagcctgggaaacccaacccacatcctgagaatcggcgagagctataaggagaagcagcggaccatccaggccaagaaggaggtggagcagcggagagccggcggctacagccggaagtacgccagcaaagccaagaatctggcagacgatatggtgagaaacaccgctagagatctgctgtactacgccgtgacccaggatgccatgctgatcttcgccaacctgagccggggcttcggccggcagggcaagcggaccttcatggccgagagacagtacacacggatggaggactggctgaccgccaagctggcctacgagggcctgagcaagacctacctgtccaagacactggcccagtacacctccaagacatgcagcaactgtgggtttaccatcaccagcgccgactacgacagggtgctggagaagctgaagaagacagcaacaggctggatgaccacaattaacggcaaggagctgaaggtggagggccagattacctactacaacagatacaagagacagaacgtagtcaaggacctgtccgtcgagctggatagactgagcgaagaatctgtgaacaacgacatctcctcctggacaaagggcagaagcggagaagctctgagcctcctgaagaaaagattctcccatagacccgtgcaggagaagttcgtgtgcctgaactgcggcttcgagacacacgcagccgagcaagccgccctgaacatcgccagatcctggctgttcctgcggagccaggagtacaagaaataccagacaaacaagacaaccggcaacaccgataagagagccttcgtcgagacctggcagtccttttaccggaagaagcttaaggaggtgtggaaacctgccgtgcggtctggcggatctggcggaggctccacaagccccagggtgagcctgaccttcgaggacgtggccgtgctgttcaccagggacgagtggaggaagctgggccccagcgagaggaacctgtaccaggacgtgatgctggagaactacagcaacctggtgagcctgggcctgctgttcagcaagcccaaggtgatcagcctgctgcagcagggcgaggacccctggaaggtggagaaggagagccccggcggccccagcctgggctacaagagcagcaccagccccaagaaaaagagaaaagtctaagctgccttctgcggggcttgccttctggccatgcccttcttctctcccttgcacctgtacctcttggtctttgaataaagcctgagtaggaaggctagcaaaaaaaaaaaaaaaaaaaaaaaaaaaaaaaaaaaaaaaaaaaaaaaaaaaaaaaaaaaaaaaaaaaaaaaaaaaaaaaa

SEQ ID NO: 3591 - RNA, 5419 nt, synthetic construct
  source 1..5419: mol_type = other RNA
aggaaataagagagaaaagaagagtaagaagaaatataagagccaccatggcccctaagaagaagcgtaaagtgagccgggtgaacggcagcggcagcggcggcggcatgaaccacgaccaggagttcgacccccctaaggtgtaccctcccgtccccgccgagaagagaaagcccatccgggtcctgagcctgttcgatggcatcgccaccggtctgctggtgctgaaggacctgggcatccaggtggataggtacattgcctccgaggtgtgcgaggactccatcaccgtgggaatggtgcgtcatcagggcaagatcatgtacgtgggcgacgtgcggagcgtgacacagaagcatatccaggagtggggccctttcgacctggtgatcggcggcagcccttgcaatgacctgagcatcgtgaacccagcccggaagggcctgtacgagggaaccggcagactgttcttcgagttttacagactgctgcacgacgcccggcctaaggaaggcgacgaccggcccttcttttggctgttcgagaatgtggtggccatgggagtcagcgacaagcgggatattagccggttcctggagagcaaccccgtgatgatcgatgccaaggaagtgagcgccgcccaccgggccagatacttctggggcaatctgcctggcatgaacagacccctggccagcaccgtgaacgacaagctggagctgcaggagtgcctggagcacggccggatcgccaagttcagcaaggtgagaaccatcaccacccgaagcaacagcatcaaacaaggcaaggaccagcactttcctgtgttcatgaacgagaaggaggacatcctgtggtgtaccgagatggagagagtgttcgggttcccagtccactacacagatgtcagcaacatgtctagactggccagacagagactgctgggaagaagctggtccgtccctgtgatcagacacctgttcgcccctctgaaggagtacttcgcctgcgtgagcagcggcaacagcaacgccaacagccggggccccagcttctctagcggcctggtgccactgtccctgagagggagccacatgggccccatggagatctacaaaaccgtgagcgcctggaagcggcagcctgtgcgcgtgctgagcctgtttcggaatatcgataaagtcctgaaaagcctgggattcctggagagcggctctggctccggcggtggcaccctgaagtacgtggaggatgtgacaaacgtggtcagacgggatgtggagaagtggggccccttcgatctggtgtacggcagcacccaacccctgggcagctcttgtgaccggtgccctggctggtacatgtttcagttccaccggatcctgcagtacgccctgccgagacaggagtcccagcggccattcttttggattttcatggacaacttgctgctgaccgaggatgaccaggaaactaccactcggttcctgcagaccgaagccgtgaccctgcaggacgtgagaggccgggactaccagaacgccatgcgggtgtggtccaacatccctggactgaaaagcaagcacgcacctctgacccctaaagaagaggagtacctgcaggcccaggtgcggagcagaagcaagctggacgcccctaaggtggatctgctggtgaagaattgcctcctgcccctgagagagtacttcaagtatttcagccagaatagtctgcccctgggcggcccaagcagcggcgcccctcctcccagcggcggcagcccagccggctccccaacctctaccgaggagggcacctctgagtccgccacccccgagagcggccctggcacctccaccgagcccagcgagggcagcgcacccggcagccctgccggcagccccacctccacagaggagggaaccagcaccgagcccagcgaaggcagcgccccaggcaccagcaccgagcctagtgagggcggctctggcggcggcagcgcccaggagattaaacggatcaacaagatcagaagaagacttgtgaaagacagcaacaccaagaaggccggcaagacaggccccatgaaaaccctgctggttagagtgatgacacccgatctgagagagcggctggaaaacctgagaaagaagcctgaaaatatcccccagcccatcagcaatacatctagagccaacctgaataagctgctgaccgattacaccgaaatgaagaaggcgatcctgcatgtgtactgggaagagttccagaaggaccctgtgggcctgatgagccgggtggcccagcctgccagcaagaagatcgatcagaacaagctgaaacctgagatggacgagaagggcaacctgaccaccgccggctttgcctgctctcagtgtggccagcccctgttcgtgtacaagctggagcaggtgtctgagaagggcaaggcttacaccaactacttcggacggtgcaatgtggccgagcacgaaaagctgatcctgctggcccagctgaagcccgagaaggatagcgacgaagccgtgacatatagcctgggaaagtttgggcagagggccctggatttctacagcattcatgtgaccaaggagtccacccaccccgtgaagcccctggcccagatcgccggaaacagatacgcctccggacctgtgggaaaggccctgagcgacgcatgtatgggcacaatcgcctccttcctgtctaagtaccaggacatcatcatcgaacaccagaaggtggtgaagggcaaccagaagagactggagagcctgcgggagctggccggcaaggaaaacctggaataccctagcgtgaccctgccacctcagcctcacaccaaggagggcgttgatgcctacaacgaagtgatcgcccgggtgcgaatgtgggtgaacctgaacctgtggcagaagctgaagctaagcagagatgatgccaagcctctgctgagactgaagggattcccttcctttcctctggtcgagagacaggccaacgaagtggactggtgggacatggtgtgtaacgtgaagaagctgatcaacgagaaaaaggaggatggcaaggtgttttggcagaatctggctggctacaagagacaggaagccctgagaccatacctgagcagcgaggaagatcggaagaagggaaagaaattcgctcggtaccagctgggcgacctgctgctgcacctggaaaagaagcacggcgaggactggggaaaggtgtacgacgaggcctgggagcggattgacaagaaagtggaaggcctgagcaagcacatcaagctggaagaggaacggagaagcgaggacgcccagagcaaggccgccctgaccgactggctgcgggctaaggccagcttcgtgatcgagggcctgaaggaggccgacaaggacgagttctgcagatgcgagctgaagctgcagaagtggtacggggacctgcggggaaagcccttcgccatcgaagccgagaacagcatcctggacatcagcggcttcagcaagcagtacaactgtgccttcatctggcagaaggacggcgtgaagaagctgaacctgtacctgatcatcaactacttcaagggcggcaagctgcggttcaagaagatcaaacctgaagccttcgaagccaacagattctacaccgtgatcaacaaaaagagcggcgagatcgtgcccatggaggtgaacttcaacttcgacgaccccaacctgatcatcctgcctctggcctttggcaagagacagggcagagaattcatctggaacgacctgctgtccctggaaaccggcagcctgaagctggccaacggaagagtgatcgagaagacactgtacaacagaagaacccggcaggatgagcctgccctgttcgtggccctgaccttcgagcggcgggaggtcctggactcctccaatatcaaaccaatgaacctgatcggcgtggcaagaggcgaaaacatccccgccgtgatcgccctgaccgaccccgagggctgcccactgagccggtttaaggatagcctgggaaacccaacccacatcctgagaatcggcgagagctataaggagaagcagcggaccatccaggccaagaaggaggtggagcagcggagagccggcggctacagccggaagtacgccagcaaagccaagaatctggcagacgatatggtgagaaacaccgctagagatctgctgtactacgccgtgacccaggatgccatgctgatcttcgccaacctgagccggggcttcggccggcagggcaagcggaccttcatggccgagagacagtacacacggatggaggactggctgaccgccaagctggcctacgagggcctgagcaagacctacctgtccaagacactggcccagtacacctccaagacatgcagcaactgtgggtttaccatcaccagcgccgactacgacagggtgctggagaagctgaagaagacagcaacaggctggatgaccacaattaacggcaaggagctgaaggtggagggccagattacctactacaacagatacaagagacagaacgtagtcaaggacctgtccgtcgagctggatagactgagcgaagaatctgtgaacaacgacatctcctcctggacaaagggcagaagcggagaagctctgagcctcctgaagaaaagattctcccatagacccgtgcaggagaagttcgtgtgcctgaactgcggcttcgagacacacgcagccgagcaagccgccctgaacatcgccagatcctggctgttcctgcggagccaggagtacaagaaataccagacaaacaagacaaccggcaacaccgataagagagccttcgtcgagacctggcagtccttttaccggaagaagcttaaggaggtgtggaaacctgccgtgcggtctggcggatctggcggaggctccacaagctaccagacccccgtgagcttcaaggacgtggtggtgggcttcacccaggaggagtggcacaggctgagccccgcccagagggccctgtacagggacgtgatgctggagacctacagcaacctggtgagcgtgggctacgagggcaccaagcccgacgtgatcctgaggctggagcaggaggaggccccctggatcggcggcgccgccaggcccggctgccactgctgggaggacatctggcagaccagccccaagaaaaagagaaaagtctaagctgccttctgcggggcttgccttctggccatgcccttcttctctcccttgcacctgtacctcttggtctttgaataaagcctgagtaggaaggctagcaaaaaaaaaaaaaaaaaaaaaaaaaaaaaaaaaaaaaaaaaaaaaaaaaaaaaaaaaaaaaaaaaaaaaaaaaaaaaaaa

SEQ ID NO: 3592 - RNA, 5419 nt, synthetic construct
  source 1..5419: mol_type = other RNA
aggaaataagagagaaaagaagagtaagaagaaatataagagccaccatggcccctaagaagaagcgtaaagtgagccgggtgaacggcagcggcagcggcggcggcatgaaccacgaccaggagttcgacccccctaaggtgtaccctcccgtccccgccgagaagagaaagcccatccgggtcctgagcctgttcgatggcatcgccaccggtctgctggtgctgaaggacctgggcatccaggtggataggtacattgcctccgaggtgtgcgaggactccatcaccgtgggaatggtgcgtcatcagggcaagatcatgtacgtgggcgacgtgcggagcgtgacacagaagcatatccaggagtggggccctttcgacctggtgatcggcggcagcccttgcaatgacctgagcatcgtgaacccagcccggaagggcctgtacgagggaaccggcagactgttcttcgagttttacagactgctgcacgacgcccggcctaaggaaggcgacgaccggcccttcttttggctgttcgagaatgtggtggccatgggagtcagcgacaagcgggatattagccggttcctggagagcaaccccgtgatgatcgatgccaaggaagtgagcgccgcccaccgggccagatacttctggggcaatctgcctggcatgaacagacccctggccagcaccgtgaacgacaagctggagctgcaggagtgcctggagcacggccggatcgccaagttcagcaaggtgagaaccatcaccacccgaagcaacagcatcaaacaaggcaaggaccagcactttcctgtgttcatgaacgagaaggaggacatcctgtggtgtaccgagatggagagagtgttcgggttcccagtccactacacagatgtcagcaacatgtctagactggccagacagagactgctgggaagaagctggtccgtccctgtgatcagacacctgttcgcccctctgaaggagtacttcgcctgcgtgagcagcggcaacagcaacgccaacagccggggccccagcttctctagcggcctggtgccactgtccctgagagggagccacatgggccccatggagatctacaaaaccgtgagcgcctggaagcggcagcctgtgcgcgtgctgagcctgtttcggaatatcgataaagtcctgaaaagcctgggattcctggagagcggctctggctccggcggtggcaccctgaagtacgtggaggatgtgacaaacgtggtcagacgggatgtggagaagtggggccccttcgatctggtgtacggcagcacccaacccctgggcagctcttgtgaccggtgccctggctggtacatgtttcagttccaccggatcctgcagtacgccctgccgagacaggagtcccagcggccattcttttggattttcatggacaacttgctgctgaccgaggatgaccaggaaactaccactcggttcctgcagaccgaagccgtgaccctgcaggacgtgagaggccgggactaccagaacgccatgcgggtgtggtccaacatccctggactgaaaagcaagcacgcacctctgacccctaaagaagaggagtacctgcaggcccaggtgcggagcagaagcaagctggacgcccctaaggtggatctgctggtgaagaattgcctcctgcccctgagagagtacttcaagtatttcagccagaatagtctgcccctgggcggcccaagcagcggcgcccctcctcccagcggcggcagcccagccggctccccaacctctaccgaggagggcacctctgagtccgccacccccgagagcggccctggcacctccaccgagcccagcgagggcagcgcacccggcagccctgccggcagccccacctccacagaggagggaaccagcaccgagcccagcgaaggcagcgccccaggcaccagcaccgagcctagtgagggcggctctggcggcggcagcgcccaggagattaaacggatcaacaagatcagaagaagacttgtgaaagacagcaacaccaagaaggccggcaagacaggccccatgaaaaccctgctggttagagtgatgacacccgatctgagagagcggctggaaaacctgagaaagaagcctgaaaatatcccccagcccatcagcaatacatctagagccaacctgaataagctgctgaccgattacaccgaaatgaagaaggcgatcctgcatgtgtactgggaagagttccagaaggaccctgtgggcctgatgagccgggtggcccagcctgccagcaagaagatcgatcagaacaagctgaaacctgagatggacgagaagggcaacctgaccaccgccggctttgcctgctctcagtgtggccagcccctgttcgtgtacaagctggagcaggtgtctgagaagggcaaggcttacaccaactacttcggacggtgcaatgtggccgagcacgaaaagctgatcctgctggcccagctgaagcccgagaaggatagcgacgaagccgtgacatatagcctgggaaagtttgggcagagggccctggatttctacagcattcatgtgaccaaggagtccacccaccccgtgaagcccctggcccagatcgccggaaacagatacgcctccggacctgtgggaaaggccctgagcgacgcatgtatgggcacaatcgcctccttcctgtctaagtaccaggacatcatcatcgaacaccagaaggtggtgaagggcaaccagaagagactggagagcctgcgggagctggccggcaaggaaaacctggaataccctagcgtgaccctgccacctcagcctcacaccaaggagggcgttgatgcctacaacgaagtgatcgcccgggtgcgaatgtgggtgaacctgaacctgtggcagaagctgaagctaagcagagatgatgccaagcctctgctgagactgaagggattcccttcctttcctctggtcgagagacaggccaacgaagtggactggtgggacatggtgtgtaacgtgaagaagctgatcaacgagaaaaaggaggatggcaaggtgttttggcagaatctggctggctacaagagacaggaagccctgagaccatacctgagcagcgaggaagatcggaagaagggaaagaaattcgctcggtaccagctgggcgacctgctgctgcacctggaaaagaagcacggcgaggactggggaaaggtgtacgacgaggcctgggagcggattgacaagaaagtggaaggcctgagcaagcacatcaagctggaagaggaacggagaagcgaggacgcccagagcaaggccgccctgaccgactggctgcgggctaaggccagcttcgtgatcgagggcctgaaggaggccgacaaggacgagttctgcagatgcgagctgaagctgcagaagtggtacggggacctgcggggaaagcccttcgccatcgaagccgagaacagcatcctggacatcagcggcttcagcaagcagtacaactgtgccttcatctggcagaaggacggcgtgaagaagctgaacctgtacctgatcatcaactacttcaagggcggcaagctgcggttcaagaagatcaaacctgaagccttcgaagccaacagattctacaccgtgatcaacaaaaagagcggcgagatcgtgcccatggaggtgaacttcaacttcgacgaccccaacctgatcatcctgcctctggcctttggcaagagacagggcagagaattcatctggaacgacctgctgtccctggaaaccggcagcctgaagctggccaacggaagagtgatcgagaagacactgtacaacagaagaacccggcaggatgagcctgccctgttcgtggccctgaccttcgagcggcgggaggtcctggactcctccaatatcaaaccaatgaacctgatcggcgtggcaagaggcgaaaacatccccgccgtgatcgccctgaccgaccccgagggctgcccactgagccggtttaaggatagcctgggaaacccaacccacatcctgagaatcggcgagagctataaggagaagcagcggaccatccaggccaagaaggaggtggagcagcggagagccggcggctacagccggaagtacgccagcaaagccaagaatctggcagacgatatggtgagaaacaccgctagagatctgctgtactacgccgtgacccaggatgccatgctgatcttcgccaacctgagccggggcttcggccggcagggcaagcggaccttcatggccgagagacagtacacacggatggaggactggctgaccgccaagctggcctacgagggcctgagcaagacctacctgtccaagacactggcccagtacacctccaagacatgcagcaactgtgggtttaccatcaccagcgccgactacgacagggtgctggagaagctgaagaagacagcaacaggctggatgaccacaattaacggcaaggagctgaaggtggagggccagattacctactacaacagatacaagagacagaacgtagtcaaggacctgtccgtcgagctggatagactgagcgaagaatctgtgaacaacgacatctcctcctggacaaagggcagaagcggagaagctctgagcctcctgaagaaaagattctcccatagacccgtgcaggagaagttcgtgtgcctgaactgcggcttcgagacacacgcagccgagcaagccgccctgaacatcgccagatcctggctgttcctgcggagccaggagtacaagaaataccagacaaacaagacaaccggcaacaccgataagagagccttcgtcgagacctggcagtccttttaccggaagaagcttaaggaggtgtggaaacctgccgtgcggtctggcggatctggcggaggctccacaagcatccagggcagcctgaccttcaaggacgtggccatgaacttcacccaggaggagtggtgcctgctggaccacagccagaaggagctgtacctggaggtgatgctggagaacgtgcagaacctgctgagcgtgggcctgcccgtgcccagggagtactacaccagctacttccagcaggagaaggccccctggctgctggtgcagaagggccccaggaacagcagccccgaggccgagaccaacaccagccccaagaaaaagagaaaagtctaagctgccttctgcggggcttgccttctggccatgcccttcttctctcccttgcacctgtacctcttggtctttgaataaagcctgagtaggaaggctagcaaaaaaaaaaaaaaaaaaaaaaaaaaaaaaaaaaaaaaaaaaaaaaaaaaaaaaaaaaaaaaaaaaaaaaaaaaaaaaaa

SEQ ID NO: 3593 - RNA, 5419 nt, synthetic construct
  source 1..5419: mol_type = other RNA
aggaaataagagagaaaagaagagtaagaagaaatataagagccaccatggcccctaagaagaagcgtaaagtgagccgggtgaacggcagcggcagcggcggcggcatgaaccacgaccaggagttcgacccccctaaggtgtaccctcccgtccccgccgagaagagaaagcccatccgggtcctgagcctgttcgatggcatcgccaccggtctgctggtgctgaaggacctgggcatccaggtggataggtacattgcctccgaggtgtgcgaggactccatcaccgtgggaatggtgcgtcatcagggcaagatcatgtacgtgggcgacgtgcggagcgtgacacagaagcatatccaggagtggggccctttcgacctggtgatcggcggcagcccttgcaatgacctgagcatcgtgaacccagcccggaagggcctgtacgagggaaccggcagactgttcttcgagttttacagactgctgcacgacgcccggcctaaggaaggcgacgaccggcccttcttttggctgttcgagaatgtggtggccatgggagtcagcgacaagcgggatattagccggttcctggagagcaaccccgtgatgatcgatgccaaggaagtgagcgccgcccaccgggccagatacttctggggcaatctgcctggcatgaacagacccctggccagcaccgtgaacgacaagctggagctgcaggagtgcctggagcacggccggatcgccaagttcagcaaggtgagaaccatcaccacccgaagcaacagcatcaaacaaggcaaggaccagcactttcctgtgttcatgaacgagaaggaggacatcctgtggtgtaccgagatggagagagtgttcgggttcccagtccactacacagatgtcagcaacatgtctagactggccagacagagactgctgggaagaagctggtccgtccctgtgatcagacacctgttcgcccctctgaaggagtacttcgcctgcgtgagcagcggcaacagcaacgccaacagccggggccccagcttctctagcggcctggtgccactgtccctgagagggagccacatgggccccatggagatctacaaaaccgtgagcgcctggaagcggcagcctgtgcgcgtgctgagcctgtttcggaatatcgataaagtcctgaaaagcctgggattcctggagagcggctctggctccggcggtggcaccctgaagtacgtggaggatgtgacaaacgtggtcagacgggatgtggagaagtggggccccttcgatctggtgtacggcagcacccaacccctgggcagctcttgtgaccggtgccctggctggtacatgtttcagttccaccggatcctgcagtacgccctgccgagacaggagtcccagcggccattcttttggattttcatggacaacttgctgctgaccgaggatgaccaggaaactaccactcggttcctgcagaccgaagccgtgaccctgcaggacgtgagaggccgggactaccagaacgccatgcgggtgtggtccaacatccctggactgaaaagcaagcacgcacctctgacccctaaagaagaggagtacctgcaggcccaggtgcggagcagaagcaagctggacgcccctaaggtggatctgctggtgaagaattgcctcctgcccctgagagagtacttcaagtatttcagccagaatagtctgcccctgggcggcccaagcagcggcgcccctcctcccagcggcggcagcccagccggctccccaacctctaccgaggagggcacctctgagtccgccacccccgagagcggccctggcacctccaccgagcccagcgagggcagcgcacccggcagccctgccggcagccccacctccacagaggagggaaccagcaccgagcccagcgaaggcagcgccccaggcaccagcaccgagcctagtgagggcggctctggcggcggcagcgcccaggagattaaacggatcaacaagatcagaagaagacttgtgaaagacagcaacaccaagaaggccggcaagacaggccccatgaaaaccctgctggttagagtgatgacacccgatctgagagagcggctggaaaacctgagaaagaagcctgaaaatatcccccagcccatcagcaatacatctagagccaacctgaataagctgctgaccgattacaccgaaatgaagaaggcgatcctgcatgtgtactgggaagagttccagaaggaccctgtgggcctgatgagccgggtggcccagcctgccagcaagaagatcgatcagaacaagctgaaacctgagatggacgagaagggcaacctgaccaccgccggctttgcctgctctcagtgtggccagcccctgttcgtgtacaagctggagcaggtgtctgagaagggcaaggcttacaccaactacttcggacggtgcaatgtggccgagcacgaaaagctgatcctgctggcccagctgaagcccgagaaggatagcgacgaagccgtgacatatagcctgggaaagtttgggcagagggccctggatttctacagcattcatgtgaccaaggagtccacccaccccgtgaagcccctggcccagatcgccggaaacagatacgcctccggacctgtgggaaaggccctgagcgacgcatgtatgggcacaatcgcctccttcctgtctaagtaccaggacatcatcatcgaacaccagaaggtggtgaagggcaaccagaagagactggagagcctgcgggagctggccggcaaggaaaacctggaataccctagcgtgaccctgccacctcagcctcacaccaaggagggcgttgatgcctacaacgaagtgatcgcccgggtgcgaatgtgggtgaacctgaacctgtggcagaagctgaagctaagcagagatgatgccaagcctctgctgagactgaagggattcccttcctttcctctggtcgagagacaggccaacgaagtggactggtgggacatggtgtgtaacgtgaagaagctgatcaacgagaaaaaggaggatggcaaggtgttttggcagaatctggctggctacaagagacaggaagccctgagaccatacctgagcagcgaggaagatcggaagaagggaaagaaattcgctcggtaccagctgggcgacctgctgctgcacctggaaaagaagcacggcgaggactggggaaaggtgtacgacgaggcctgggagcggattgacaagaaagtggaaggcctgagcaagcacatcaagctggaagaggaacggagaagcgaggacgcccagagcaaggccgccctgaccgactggctgcgggctaaggccagcttcgtgatcgagggcctgaaggaggccgacaaggacgagttctgcagatgcgagctgaagctgcagaagtggtacggggacctgcggggaaagcccttcgccatcgaagccgagaacagcatcctggacatcagcggcttcagcaagcagtacaactgtgccttcatctggcagaaggacggcgtgaagaagctgaacctgtacctgatcatcaactacttcaagggcggcaagctgcggttcaagaagatcaaacctgaagccttcgaagccaacagattctacaccgtgatcaacaaaaagagcggcgagatcgtgcccatggaggtgaacttcaacttcgacgaccccaacctgatcatcctgcctctggcctttggcaagagacagggcagagaattcatctggaacgacctgctgtccctggaaaccggcagcctgaagctggccaacggaagagtgatcgagaagacactgtacaacagaagaacccggcaggatgagcctgccctgttcgtggccctgaccttcgagcggcgggaggtcctggactcctccaatatcaaaccaatgaacctgatcggcgtggcaagaggcgaaaacatccccgccgtgatcgccctgaccgaccccgagggctgcccactgagccggtttaaggatagcctgggaaacccaacccacatcctgagaatcggcgagagctataaggagaagcagcggaccatccaggccaagaaggaggtggagcagcggagagccggcggctacagccggaagtacgccagcaaagccaagaatctggcagacgatatggtgagaaacaccgctagagatctgctgtactacgccgtgacccaggatgccatgctgatcttcgccaacctgagccggggcttcggccggcagggcaagcggaccttcatggccgagagacagtacacacggatggaggactggctgaccgccaagctggcctacgagggcctgagcaagacctacctgtccaagacactggcccagtacacctccaagacatgcagcaactgtgggtttaccatcaccagcgccgactacgacagggtgctggagaagctgaagaagacagcaacaggctggatgaccacaattaacggcaaggagctgaaggtggagggccagattacctactacaacagatacaagagacagaacgtagtcaaggacctgtccgtcgagctggatagactgagcgaagaatctgtgaacaacgacatctcctcctggacaaagggcagaagcggagaagctctgagcctcctgaagaaaagattctcccatagacccgtgcaggagaagttcgtgtgcctgaactgcggcttcgagacacacgcagccgagcaagccgccctgaacatcgccagatcctggctgttcctgcggagccaggagtacaagaaataccagacaaacaagacaaccggcaacaccgataagagagccttcgtcgagacctggcagtccttttaccggaagaagcttaaggaggtgtggaaacctgccgtgcggtctggcggatctggcggaggctccacaagcatgagcgtgaccttcgaggacgtggccatgtacttcagccccgccgagtgggtgctgctgggcgaggagcagaagcagctgtacaggcacgtgatgtgggagaactaccagaccctggtgagcctgggcatccagatcagcaagcccgtggtgatcagcagcatcgagaggggcgaggagctgtgggcccagagccccaccgaggacgaggacgaggacatcctgagcggcaccagccccggcaccagccccaagaaaaagagaaaagtctaagctgccttctgcggggcttgccttctggccatgcccttcttctctcccttgcacctgtacctcttggtctttgaataaagcctgagtaggaaggctagcaaaaaaaaaaaaaaaaaaaaaaaaaaaaaaaaaaaaaaaaaaaaaaaaaaaaaaaaaaaaaaaaaaaaaaaaaaaaaaaa

SEQ ID NO: 3594 - RNA, 5419 nt, synthetic construct
  source 1..5419: mol_type = other RNA
aggaaataagagagaaaagaagagtaagaagaaatataagagccaccatggcccctaagaagaagcgtaaagtgagccgggtgaacggcagcggcagcggcggcggcatgaaccacgaccaggagttcgacccccctaaggtgtaccctcccgtccccgccgagaagagaaagcccatccgggtcctgagcctgttcgatggcatcgccaccggtctgctggtgctgaaggacctgggcatccaggtggataggtacattgcctccgaggtgtgcgaggactccatcaccgtgggaatggtgcgtcatcagggcaagatcatgtacgtgggcgacgtgcggagcgtgacacagaagcatatccaggagtggggccctttcgacctggtgatcggcggcagcccttgcaatgacctgagcatcgtgaacccagcccggaagggcctgtacgagggaaccggcagactgttcttcgagttttacagactgctgcacgacgcccggcctaaggaaggcgacgaccggcccttcttttggctgttcgagaatgtggtggccatgggagtcagcgacaagcgggatattagccggttcctggagagcaaccccgtgatgatcgatgccaaggaagtgagcgccgcccaccgggccagatacttctggggcaatctgcctggcatgaacagacccctggccagcaccgtgaacgacaagctggagctgcaggagtgcctggagcacggccggatcgccaagttcagcaaggtgagaaccatcaccacccgaagcaacagcatcaaacaaggcaaggaccagcactttcctgtgttcatgaacgagaaggaggacatcctgtggtgtaccgagatggagagagtgttcgggttcccagtccactacacagatgtcagcaacatgtctagactggccagacagagactgctgggaagaagctggtccgtccctgtgatcagacacctgttcgcccctctgaaggagtacttcgcctgcgtgagcagcggcaacagcaacgccaacagccggggccccagcttctctagcggcctggtgccactgtccctgagagggagccacatgggccccatggagatctacaaaaccgtgagcgcctggaagcggcagcctgtgcgcgtgctgagcctgtttcggaatatcgataaagtcctgaaaagcctgggattcctggagagcggctctggctccggcggtggcaccctgaagtacgtggaggatgtgacaaacgtggtcagacgggatgtggagaagtggggccccttcgatctggtgtacggcagcacccaacccctgggcagctcttgtgaccggtgccctggctggtacatgtttcagttccaccggatcctgcagtacgccctgccgagacaggagtcccagcggccattcttttggattttcatggacaacttgctgctgaccgaggatgaccaggaaactaccactcggttcctgcagaccgaagccgtgaccctgcaggacgtgagaggccgggactaccagaacgccatgcgggtgtggtccaacatccctggactgaaaagcaagcacgcacctctgacccctaaagaagaggagtacctgcaggcccaggtgcggagcagaagcaagctggacgcccctaaggtggatctgctggtgaagaattgcctcctgcccctgagagagtacttcaagtatttcagccagaatagtctgcccctgggcggcccaagcagcggcgcccctcctcccagcggcggcagcccagccggctccccaacctctaccgaggagggcacctctgagtccgccacccccgagagcggccctggcacctccaccgagcccagcgagggcagcgcacccggcagccctgccggcagccccacctccacagaggagggaaccagcaccgagcccagcgaaggcagcgccccaggcaccagcaccgagcctagtgagggcggctctggcggcggcagcgcccaggagattaaacggatcaacaagatcagaagaagacttgtgaaagacagcaacaccaagaaggccggcaagacaggccccatgaaaaccctgctggttagagtgatgacacccgatctgagagagcggctggaaaacctgagaaagaagcctgaaaatatcccccagcccatcagcaatacatctagagccaacctgaataagctgctgaccgattacaccgaaatgaagaaggcgatcctgcatgtgtactgggaagagttccagaaggaccctgtgggcctgatgagccgggtggcccagcctgccagcaagaagatcgatcagaacaagctgaaacctgagatggacgagaagggcaacctgaccaccgccggctttgcctgctctcagtgtggccagcccctgttcgtgtacaagctggagcaggtgtctgagaagggcaaggcttacaccaactacttcggacggtgcaatgtggccgagcacgaaaagctgatcctgctggcccagctgaagcccgagaaggatagcgacgaagccgtgacatatagcctgggaaagtttgggcagagggccctggatttctacagcattcatgtgaccaaggagtccacccaccccgtgaagcccctggcccagatcgccggaaacagatacgcctccggacctgtgggaaaggccctgagcgacgcatgtatgggcacaatcgcctccttcctgtctaagtaccaggacatcatcatcgaacaccagaaggtggtgaagggcaaccagaagagactggagagcctgcgggagctggccggcaaggaaaacctggaataccctagcgtgaccctgccacctcagcctcacaccaaggagggcgttgatgcctacaacgaagtgatcgcccgggtgcgaatgtgggtgaacctgaacctgtggcagaagctgaagctaagcagagatgatgccaagcctctgctgagactgaagggattcccttcctttcctctggtcgagagacaggccaacgaagtggactggtgggacatggtgtgtaacgtgaagaagctgatcaacgagaaaaaggaggatggcaaggtgttttggcagaatctggctggctacaagagacaggaagccctgagaccatacctgagcagcgaggaagatcggaagaagggaaagaaattcgctcggtaccagctgggcgacctgctgctgcacctggaaaagaagcacggcgaggactggggaaaggtgtacgacgaggcctgggagcggattgacaagaaagtggaaggcctgagcaagcacatcaagctggaagaggaacggagaagcgaggacgcccagagcaaggccgccctgaccgactggctgcgggctaaggccagcttcgtgatcgagggcctgaaggaggccgacaaggacgagttctgcagatgcgagctgaagctgcagaagtggtacggggacctgcggggaaagcccttcgccatcgaagccgagaacagcatcctggacatcagcggcttcagcaagcagtacaactgtgccttcatctggcagaaggacggcgtgaagaagctgaacctgtacctgatcatcaactacttcaagggcggcaagctgcggttcaagaagatcaaacctgaagccttcgaagccaacagattctacaccgtgatcaacaaaaagagcggcgagatcgtgcccatggaggtgaacttcaacttcgacgaccccaacctgatcatcctgcctctggcctttggcaagagacagggcagagaattcatctggaacgacctgctgtccctggaaaccggcagcctgaagctggccaacggaagagtgatcgagaagacactgtacaacagaagaacccggcaggatgagcctgccctgttcgtggccctgaccttcgagcggcgggaggtcctggactcctccaatatcaaaccaatgaacctgatcggcgtggcaagaggcgaaaacatccccgccgtgatcgccctgaccgaccccgagggctgcccactgagccggtttaaggatagcctgggaaacccaacccacatcctgagaatcggcgagagctataaggagaagcagcggaccatccaggccaagaaggaggtggagcagcggagagccggcggctacagccggaagtacgccagcaaagccaagaatctggcagacgatatggtgagaaacaccgctagagatctgctgtactacgccgtgacccaggatgccatgctgatcttcgccaacctgagccggggcttcggccggcagggcaagcggaccttcatggccgagagacagtacacacggatggaggactggctgaccgccaagctggcctacgagggcctgagcaagacctacctgtccaagacactggcccagtacacctccaagacatgcagcaactgtgggtttaccatcaccagcgccgactacgacagggtgctggagaagctgaagaagacagcaacaggctggatgaccacaattaacggcaaggagctgaaggtggagggccagattacctactacaacagatacaagagacagaacgtagtcaaggacctgtccgtcgagctggatagactgagcgaagaatctgtgaacaacgacatctcctcctggacaaagggcagaagcggagaagctctgagcctcctgaagaaaagattctcccatagacccgtgcaggagaagttcgtgtgcctgaactgcggcttcgagacacacgcagccgagcaagccgccctgaacatcgccagatcctggctgttcctgcggagccaggagtacaagaaataccagacaaacaagacaaccggcaacaccgataagagagccttcgtcgagacctggcagtccttttaccggaagaagcttaaggaggtgtggaaacctgccgtgcggtctggcggatctggcggaggctccacaagcgagagcgtgaccttcgaggacgtggccgtgtacttcagcgagaacgagtggatcggcctgggccccgcccagagggccctgtacagggacgtgatgctggagaactacggcgccgtggccagcctggccttccccttccccaagcccgccctgatcagccagctggagaggggcgaggccccctggtgcagcgccccccagggcgccctggacggcgagagccccaggggcatcagcagcgagaccagccccaagaaaaagagaaaagtctaagctgccttctgcggggcttgccttctggccatgcccttcttctctcccttgcacctgtacctcttggtctttgaataaagcctgagtaggaaggctagcaaaaaaaaaaaaaaaaaaaaaaaaaaaaaaaaaaaaaaaaaaaaaaaaaaaaaaaaaaaaaaaaaaaaaaaaaaaaaaaa

SEQ ID NO: 3595 - RNA, 5419 nt, synthetic construct
  source 1..5419: mol_type = other RNA
aggaaataagagagaaaagaagagtaagaagaaatataagagccaccatggcccctaagaagaagcgtaaagtgagccgggtgaacggcagcggcagcggcggcggcatgaaccacgaccaggagttcgacccccctaaggtgtaccctcccgtccccgccgagaagagaaagcccatccgggtcctgagcctgttcgatggcatcgccaccggtctgctggtgctgaaggacctgggcatccaggtggataggtacattgcctccgaggtgtgcgaggactccatcaccgtgggaatggtgcgtcatcagggcaagatcatgtacgtgggcgacgtgcggagcgtgacacagaagcatatccaggagtggggccctttcgacctggtgatcggcggcagcccttgcaatgacctgagcatcgtgaacccagcccggaagggcctgtacgagggaaccggcagactgttcttcgagttttacagactgctgcacgacgcccggcctaaggaaggcgacgaccggcccttcttttggctgttcgagaatgtggtggccatgggagtcagcgacaagcgggatattagccggttcctggagagcaaccccgtgatgatcgatgccaaggaagtgagcgccgcccaccgggccagatacttctggggcaatctgcctggcatgaacagacccctggccagcaccgtgaacgacaagctggagctgcaggagtgcctggagcacggccggatcgccaagttcagcaaggtgagaaccatcaccacccgaagcaacagcatcaaacaaggcaaggaccagcactttcctgtgttcatgaacgagaaggaggacatcctgtggtgtaccgagatggagagagtgttcgggttcccagtccactacacagatgtcagcaacatgtctagactggccagacagagactgctgggaagaagctggtccgtccctgtgatcagacacctgttcgcccctctgaaggagtacttcgcctgcgtgagcagcggcaacagcaacgccaacagccggggccccagcttctctagcggcctggtgccactgtccctgagagggagccacatgggccccatggagatctacaaaaccgtgagcgcctggaagcggcagcctgtgcgcgtgctgagcctgtttcggaatatcgataaagtcctgaaaagcctgggattcctggagagcggctctggctccggcggtggcaccctgaagtacgtggaggatgtgacaaacgtggtcagacgggatgtggagaagtggggccccttcgatctggtgtacggcagcacccaacccctgggcagctcttgtgaccggtgccctggctggtacatgtttcagttccaccggatcctgcagtacgccctgccgagacaggagtcccagcggccattcttttggattttcatggacaacttgctgctgaccgaggatgaccaggaaactaccactcggttcctgcagaccgaagccgtgaccctgcaggacgtgagaggccgggactaccagaacgccatgcgggtgtggtccaacatccctggactgaaaagcaagcacgcacctctgacccctaaagaagaggagtacctgcaggcccaggtgcggagcagaagcaagctggacgcccctaaggtggatctgctggtgaagaattgcctcctgcccctgagagagtacttcaagtatttcagccagaatagtctgcccctgggcggcccaagcagcggcgcccctcctcccagcggcggcagcccagccggctccccaacctctaccgaggagggcacctctgagtccgccacccccgagagcggccctggcacctccaccgagcccagcgagggcagcgcacccggcagccctgccggcagccccacctccacagaggagggaaccagcaccgagcccagcgaaggcagcgccccaggcaccagcaccgagcctagtgagggcggctctggcggcggcagcgcccaggagattaaacggatcaacaagatcagaagaagacttgtgaaagacagcaacaccaagaaggccggcaagacaggccccatgaaaaccctgctggttagagtgatgacacccgatctgagagagcggctggaaaacctgagaaagaagcctgaaaatatcccccagcccatcagcaatacatctagagccaacctgaataagctgctgaccgattacaccgaaatgaagaaggcgatcctgcatgtgtactgggaagagttccagaaggaccctgtgggcctgatgagccgggtggcccagcctgccagcaagaagatcgatcagaacaagctgaaacctgagatggacgagaagggcaacctgaccaccgccggctttgcctgctctcagtgtggccagcccctgttcgtgtacaagctggagcaggtgtctgagaagggcaaggcttacaccaactacttcggacggtgcaatgtggccgagcacgaaaagctgatcctgctggcccagctgaagcccgagaaggatagcgacgaagccgtgacatatagcctgggaaagtttgggcagagggccctggatttctacagcattcatgtgaccaaggagtccacccaccccgtgaagcccctggcccagatcgccggaaacagatacgcctccggacctgtgggaaaggccctgagcgacgcatgtatgggcacaatcgcctccttcctgtctaagtaccaggacatcatcatcgaacaccagaaggtggtgaagggcaaccagaagagactggagagcctgcgggagctggccggcaaggaaaacctggaataccctagcgtgaccctgccacctcagcctcacaccaaggagggcgttgatgcctacaacgaagtgatcgcccgggtgcgaatgtgggtgaacctgaacctgtggcagaagctgaagctaagcagagatgatgccaagcctctgctgagactgaagggattcccttcctttcctctggtcgagagacaggccaacgaagtggactggtgggacatggtgtgtaacgtgaagaagctgatcaacgagaaaaaggaggatggcaaggtgttttggcagaatctggctggctacaagagacaggaagccctgagaccatacctgagcagcgaggaagatcggaagaagggaaagaaattcgctcggtaccagctgggcgacctgctgctgcacctggaaaagaagcacggcgaggactggggaaaggtgtacgacgaggcctgggagcggattgacaagaaagtggaaggcctgagcaagcacatcaagctggaagaggaacggagaagcgaggacgcccagagcaaggccgccctgaccgactggctgcgggctaaggccagcttcgtgatcgagggcctgaaggaggccgacaaggacgagttctgcagatgcgagctgaagctgcagaagtggtacggggacctgcggggaaagcccttcgccatcgaagccgagaacagcatcctggacatcagcggcttcagcaagcagtacaactgtgccttcatctggcagaaggacggcgtgaagaagctgaacctgtacctgatcatcaactacttcaagggcggcaagctgcggttcaagaagatcaaacctgaagccttcgaagccaacagattctacaccgtgatcaacaaaaagagcggcgagatcgtgcccatggaggtgaacttcaacttcgacgaccccaacctgatcatcctgcctctggcctttggcaagagacagggcagagaattcatctggaacgacctgctgtccctggaaaccggcagcctgaagctggccaacggaagagtgatcgagaagacactgtacaacagaagaacccggcaggatgagcctgccctgttcgtggccctgaccttcgagcggcgggaggtcctggactcctccaatatcaaaccaatgaacctgatcggcgtggcaagaggcgaaaacatccccgccgtgatcgccctgaccgaccccgagggctgcccactgagccggtttaaggatagcctgggaaacccaacccacatcctgagaatcggcgagagctataaggagaagcagcggaccatccaggccaagaaggaggtggagcagcggagagccggcggctacagccggaagtacgccagcaaagccaagaatctggcagacgatatggtgagaaacaccgctagagatctgctgtactacgccgtgacccaggatgccatgctgatcttcgccaacctgagccggggcttcggccggcagggcaagcggaccttcatggccgagagacagtacacacggatggaggactggctgaccgccaagctggcctacgagggcctgagcaagacctacctgtccaagacactggcccagtacacctccaagacatgcagcaactgtgggtttaccatcaccagcgccgactacgacagggtgctggagaagctgaagaagacagcaacaggctggatgaccacaattaacggcaaggagctgaaggtggagggccagattacctactacaacagatacaagagacagaacgtagtcaaggacctgtccgtcgagctggatagactgagcgaagaatctgtgaacaacgacatctcctcctggacaaagggcagaagcggagaagctctgagcctcctgaagaaaagattctcccatagacccgtgcaggagaagttcgtgtgcctgaactgcggcttcgagacacacgcagccgagcaagccgccctgaacatcgccagatcctggctgttcctgcggagccaggagtacaagaaataccagacaaacaagacaaccggcaacaccgataagagagccttcgtcgagacctggcagtccttttaccggaagaagcttaaggaggtgtggaaacctgccgtgcggtctggcggatctggcggaggctccacaagcgcccaggagctggtgaccttccaggacgtggccgtggacttcacccaggaggagtggggcctgctggaccacccccagaaggagctgtacaaggaggtgatgctggagaacgccaggaacgccctgagcctgggcctgcccgtgcccagggagggcctgatcagccacttcggccagagggaggccccctggatgatggagctggaggaccccaggaccagctaccccgtgagccagaagctgaccagccccaagaaaaagagaaaagtctaagctgccttctgcggggcttgccttctggccatgcccttcttctctcccttgcacctgtacctcttggtctttgaataaagcctgagtaggaaggctagcaaaaaaaaaaaaaaaaaaaaaaaaaaaaaaaaaaaaaaaaaaaaaaaaaaaaaaaaaaaaaaaaaaaaaaaaaaaaaaaa

SEQ ID NO: 3596 - RNA, 5419 nt, synthetic construct
  source 1..5419: mol_type = other RNA
aggaaataagagagaaaagaagagtaagaagaaatataagagccaccatggcccctaagaagaagcgtaaagtgagccgggtgaacggcagcggcagcggcggcggcatgaaccacgaccaggagttcgacccccctaaggtgtaccctcccgtccccgccgagaagagaaagcccatccgggtcctgagcctgttcgatggcatcgccaccggtctgctggtgctgaaggacctgggcatccaggtggataggtacattgcctccgaggtgtgcgaggactccatcaccgtgggaatggtgcgtcatcagggcaagatcatgtacgtgggcgacgtgcggagcgtgacacagaagcatatccaggagtggggccctttcgacctggtgatcggcggcagcccttgcaatgacctgagcatcgtgaacccagcccggaagggcctgtacgagggaaccggcagactgttcttcgagttttacagactgctgcacgacgcccggcctaaggaaggcgacgaccggcccttcttttggctgttcgagaatgtggtggccatgggagtcagcgacaagcgggatattagccggttcctggagagcaaccccgtgatgatcgatgccaaggaagtgagcgccgcccaccgggccagatacttctggggcaatctgcctggcatgaacagacccctggccagcaccgtgaacgacaagctggagctgcaggagtgcctggagcacggccggatcgccaagttcagcaaggtgagaaccatcaccacccgaagcaacagcatcaaacaaggcaaggaccagcactttcctgtgttcatgaacgagaaggaggacatcctgtggtgtaccgagatggagagagtgttcgggttcccagtccactacacagatgtcagcaacatgtctagactggccagacagagactgctgggaagaagctggtccgtccctgtgatcagacacctgttcgcccctctgaaggagtacttcgcctgcgtgagcagcggcaacagcaacgccaacagccggggccccagcttctctagcggcctggtgccactgtccctgagagggagccacatgggccccatggagatctacaaaaccgtgagcgcctggaagcggcagcctgtgcgcgtgctgagcctgtttcggaatatcgataaagtcctgaaaagcctgggattcctggagagcggctctggctccggcggtggcaccctgaagtacgtggaggatgtgacaaacgtggtcagacgggatgtggagaagtggggccccttcgatctggtgtacggcagcacccaacccctgggcagctcttgtgaccggtgccctggctggtacatgtttcagttccaccggatcctgcagtacgccctgccgagacaggagtcccagcggccattcttttggattttcatggacaacttgctgctgaccgaggatgaccaggaaactaccactcggttcctgcagaccgaagccgtgaccctgcaggacgtgagaggccgggactaccagaacgccatgcgggtgtggtccaacatccctggactgaaaagcaagcacgcacctctgacccctaaagaagaggagtacctgcaggcccaggtgcggagcagaagcaagctggacgcccctaaggtggatctgctggtgaagaattgcctcctgcccctgagagagtacttcaagtatttcagccagaatagtctgcccctgggcggcccaagcagcggcgcccctcctcccagcggcggcagcccagccggctccccaacctctaccgaggagggcacctctgagtccgccacccccgagagcggccctggcacctccaccgagcccagcgagggcagcgcacccggcagccctgccggcagccccacctccacagaggagggaaccagcaccgagcccagcgaaggcagcgccccaggcaccagcaccgagcctagtgagggcggctctggcggcggcagcgcccaggagattaaacggatcaacaagatcagaagaagacttgtgaaagacagcaacaccaagaaggccggcaagacaggccccatgaaaaccctgctggttagagtgatgacacccgatctgagagagcggctggaaaacctgagaaagaagcctgaaaatatcccccagcccatcagcaatacatctagagccaacctgaataagctgctgaccgattacaccgaaatgaagaaggcgatcctgcatgtgtactgggaagagttccagaaggaccctgtgggcctgatgagccgggtggcccagcctgccagcaagaagatcgatcagaacaagctgaaacctgagatggacgagaagggcaacctgaccaccgccggctttgcctgctctcagtgtggccagcccctgttcgtgtacaagctggagcaggtgtctgagaagggcaaggcttacaccaactacttcggacggtgcaatgtggccgagcacgaaaagctgatcctgctggcccagctgaagcccgagaaggatagcgacgaagccgtgacatatagcctgggaaagtttgggcagagggccctggatttctacagcattcatgtgaccaaggagtccacccaccccgtgaagcccctggcccagatcgccggaaacagatacgcctccggacctgtgggaaaggccctgagcgacgcatgtatgggcacaatcgcctccttcctgtctaagtaccaggacatcatcatcgaacaccagaaggtggtgaagggcaaccagaagagactggagagcctgcgggagctggccggcaaggaaaacctggaataccctagcgtgaccctgccacctcagcctcacaccaaggagggcgttgatgcctacaacgaagtgatcgcccgggtgcgaatgtgggtgaacctgaacctgtggcagaagctgaagctaagcagagatgatgccaagcctctgctgagactgaagggattcccttcctttcctctggtcgagagacaggccaacgaagtggactggtgggacatggtgtgtaacgtgaagaagctgatcaacgagaaaaaggaggatggcaaggtgttttggcagaatctggctggctacaagagacaggaagccctgagaccatacctgagcagcgaggaagatcggaagaagggaaagaaattcgctcggtaccagctgggcgacctgctgctgcacctggaaaagaagcacggcgaggactggggaaaggtgtacgacgaggcctgggagcggattgacaagaaagtggaaggcctgagcaagcacatcaagctggaagaggaacggagaagcgaggacgcccagagcaaggccgccctgaccgactggctgcgggctaaggccagcttcgtgatcgagggcctgaaggaggccgacaaggacgagttctgcagatgcgagctgaagctgcagaagtggtacggggacctgcggggaaagcccttcgccatcgaagccgagaacagcatcctggacatcagcggcttcagcaagcagtacaactgtgccttcatctggcagaaggacggcgtgaagaagctgaacctgtacctgatcatcaactacttcaagggcggcaagctgcggttcaagaagatcaaacctgaagccttcgaagccaacagattctacaccgtgatcaacaaaaagagcggcgagatcgtgcccatggaggtgaacttcaacttcgacgaccccaacctgatcatcctgcctctggcctttggcaagagacagggcagagaattcatctggaacgacctgctgtccctggaaaccggcagcctgaagctggccaacggaagagtgatcgagaagacactgtacaacagaagaacccggcaggatgagcctgccctgttcgtggccctgaccttcgagcggcgggaggtcctggactcctccaatatcaaaccaatgaacctgatcggcgtggcaagaggcgaaaacatccccgccgtgatcgccctgaccgaccccgagggctgcccactgagccggtttaaggatagcctgggaaacccaacccacatcctgagaatcggcgagagctataaggagaagcagcggaccatccaggccaagaaggaggtggagcagcggagagccggcggctacagccggaagtacgccagcaaagccaagaatctggcagacgatatggtgagaaacaccgctagagatctgctgtactacgccgtgacccaggatgccatgctgatcttcgccaacctgagccggggcttcggccggcagggcaagcggaccttcatggccgagagacagtacacacggatggaggactggctgaccgccaagctggcctacgagggcctgagcaagacctacctgtccaagacactggcccagtacacctccaagacatgcagcaactgtgggtttaccatcaccagcgccgactacgacagggtgctggagaagctgaagaagacagcaacaggctggatgaccacaattaacggcaaggagctgaaggtggagggccagattacctactacaacagatacaagagacagaacgtagtcaaggacctgtccgtcgagctggatagactgagcgaagaatctgtgaacaacgacatctcctcctggacaaagggcagaagcggagaagctctgagcctcctgaagaaaagattctcccatagacccgtgcaggagaagttcgtgtgcctgaactgcggcttcgagacacacgcagccgagcaagccgccctgaacatcgccagatcctggctgttcctgcggagccaggagtacaagaaataccagacaaacaagacaaccggcaacaccgataagagagccttcgtcgagacctggcagtccttttaccggaagaagcttaaggaggtgtggaaacctgccgtgcggtctggcggatctggcggaggctccacaagcagccaggagcccgtgaccttcgccgacgtggccgtggtgttcacccccgaggagtgggtgttcctggacagcacccagaggagcctgtacagggacgtgatgctggagaactacaggaacctggccagcgtggccggcgaccagctgtgcaagcccaacgccctgagctacctggagcagaggggcgagcagtggaccaccgagaggggcgtgatcagcgacacctgccccgagccccagctgaccagccccaagaaaaagagaaaagtctaagctgccttctgcggggcttgccttctggccatgcccttcttctctcccttgcacctgtacctcttggtctttgaataaagcctgagtaggaaggctagcaaaaaaaaaaaaaaaaaaaaaaaaaaaaaaaaaaaaaaaaaaaaaaaaaaaaaaaaaaaaaaaaaaaaaaaaaaaaaaaa

SEQ ID NO: 3597 - RNA, 5419 nt, synthetic construct
  source 1..5419: mol_type = other RNA
aggaaataagagagaaaagaagagtaagaagaaatataagagccaccatggcccctaagaagaagcgtaaagtgagccgggtgaacggcagcggcagcggcggcggcatgaaccacgaccaggagttcgacccccctaaggtgtaccctcccgtccccgccgagaagagaaagcccatccgggtcctgagcctgttcgatggcatcgccaccggtctgctggtgctgaaggacctgggcatccaggtggataggtacattgcctccgaggtgtgcgaggactccatcaccgtgggaatggtgcgtcatcagggcaagatcatgtacgtgggcgacgtgcggagcgtgacacagaagcatatccaggagtggggccctttcgacctggtgatcggcggcagcccttgcaatgacctgagcatcgtgaacccagcccggaagggcctgtacgagggaaccggcagactgttcttcgagttttacagactgctgcacgacgcccggcctaaggaaggcgacgaccggcccttcttttggctgttcgagaatgtggtggccatgggagtcagcgacaagcgggatattagccggttcctggagagcaaccccgtgatgatcgatgccaaggaagtgagcgccgcccaccgggccagatacttctggggcaatctgcctggcatgaacagacccctggccagcaccgtgaacgacaagctggagctgcaggagtgcctggagcacggccggatcgccaagttcagcaaggtgagaaccatcaccacccgaagcaacagcatcaaacaaggcaaggaccagcactttcctgtgttcatgaacgagaaggaggacatcctgtggtgtaccgagatggagagagtgttcgggttcccagtccactacacagatgtcagcaacatgtctagactggccagacagagactgctgggaagaagctggtccgtccctgtgatcagacacctgttcgcccctctgaaggagtacttcgcctgcgtgagcagcggcaacagcaacgccaacagccggggccccagcttctctagcggcctggtgccactgtccctgagagggagccacatgggccccatggagatctacaaaaccgtgagcgcctggaagcggcagcctgtgcgcgtgctgagcctgtttcggaatatcgataaagtcctgaaaagcctgggattcctggagagcggctctggctccggcggtggcaccctgaagtacgtggaggatgtgacaaacgtggtcagacgggatgtggagaagtggggccccttcgatctggtgtacggcagcacccaacccctgggcagctcttgtgaccggtgccctggctggtacatgtttcagttccaccggatcctgcagtacgccctgccgagacaggagtcccagcggccattcttttggattttcatggacaacttgctgctgaccgaggatgaccaggaaactaccactcggttcctgcagaccgaagccgtgaccctgcaggacgtgagaggccgggactaccagaacgccatgcgggtgtggtccaacatccctggactgaaaagcaagcacgcacctctgacccctaaagaagaggagtacctgcaggcccaggtgcggagcagaagcaagctggacgcccctaaggtggatctgctggtgaagaattgcctcctgcccctgagagagtacttcaagtatttcagccagaatagtctgcccctgggcggcccaagcagcggcgcccctcctcccagcggcggcagcccagccggctccccaacctctaccgaggagggcacctctgagtccgccacccccgagagcggccctggcacctccaccgagcccagcgagggcagcgcacccggcagccctgccggcagccccacctccacagaggagggaaccagcaccgagcccagcgaaggcagcgccccaggcaccagcaccgagcctagtgagggcggctctggcggcggcagcgcccaggagattaaacggatcaacaagatcagaagaagacttgtgaaagacagcaacaccaagaaggccggcaagacaggccccatgaaaaccctgctggttagagtgatgacacccgatctgagagagcggctggaaaacctgagaaagaagcctgaaaatatcccccagcccatcagcaatacatctagagccaacctgaataagctgctgaccgattacaccgaaatgaagaaggcgatcctgcatgtgtactgggaagagttccagaaggaccctgtgggcctgatgagccgggtggcccagcctgccagcaagaagatcgatcagaacaagctgaaacctgagatggacgagaagggcaacctgaccaccgccggctttgcctgctctcagtgtggccagcccctgttcgtgtacaagctggagcaggtgtctgagaagggcaaggcttacaccaactacttcggacggtgcaatgtggccgagcacgaaaagctgatcctgctggcccagctgaagcccgagaaggatagcgacgaagccgtgacatatagcctgggaaagtttgggcagagggccctggatttctacagcattcatgtgaccaaggagtccacccaccccgtgaagcccctggcccagatcgccggaaacagatacgcctccggacctgtgggaaaggccctgagcgacgcatgtatgggcacaatcgcctccttcctgtctaagtaccaggacatcatcatcgaacaccagaaggtggtgaagggcaaccagaagagactggagagcctgcgggagctggccggcaaggaaaacctggaataccctagcgtgaccctgccacctcagcctcacaccaaggagggcgttgatgcctacaacgaagtgatcgcccgggtgcgaatgtgggtgaacctgaacctgtggcagaagctgaagctaagcagagatgatgccaagcctctgctgagactgaagggattcccttcctttcctctggtcgagagacaggccaacgaagtggactggtgggacatggtgtgtaacgtgaagaagctgatcaacgagaaaaaggaggatggcaaggtgttttggcagaatctggctggctacaagagacaggaagccctgagaccatacctgagcagcgaggaagatcggaagaagggaaagaaattcgctcggtaccagctgggcgacctgctgctgcacctggaaaagaagcacggcgaggactggggaaaggtgtacgacgaggcctgggagcggattgacaagaaagtggaaggcctgagcaagcacatcaagctggaagaggaacggagaagcgaggacgcccagagcaaggccgccctgaccgactggctgcgggctaaggccagcttcgtgatcgagggcctgaaggaggccgacaaggacgagttctgcagatgcgagctgaagctgcagaagtggtacggggacctgcggggaaagcccttcgccatcgaagccgagaacagcatcctggacatcagcggcttcagcaagcagtacaactgtgccttcatctggcagaaggacggcgtgaagaagctgaacctgtacctgatcatcaactacttcaagggcggcaagctgcggttcaagaagatcaaacctgaagccttcgaagccaacagattctacaccgtgatcaacaaaaagagcggcgagatcgtgcccatggaggtgaacttcaacttcgacgaccccaacctgatcatcctgcctctggcctttggcaagagacagggcagagaattcatctggaacgacctgctgtccctggaaaccggcagcctgaagctggccaacggaagagtgatcgagaagacactgtacaacagaagaacccggcaggatgagcctgccctgttcgtggccctgaccttcgagcggcgggaggtcctggactcctccaatatcaaaccaatgaacctgatcggcgtggcaagaggcgaaaacatccccgccgtgatcgccctgaccgaccccgagggctgcccactgagccggtttaaggatagcctgggaaacccaacccacatcctgagaatcggcgagagctataaggagaagcagcggaccatccaggccaagaaggaggtggagcagcggagagccggcggctacagccggaagtacgccagcaaagccaagaatctggcagacgatatggtgagaaacaccgctagagatctgctgtactacgccgtgacccaggatgccatgctgatcttcgccaacctgagccggggcttcggccggcagggcaagcggaccttcatggccgagagacagtacacacggatggaggactggctgaccgccaagctggcctacgagggcctgagcaagacctacctgtccaagacactggcccagtacacctccaagacatgcagcaactgtgggtttaccatcaccagcgccgactacgacagggtgctggagaagctgaagaagacagcaacaggctggatgaccacaattaacggcaaggagctgaaggtggagggccagattacctactacaacagatacaagagacagaacgtagtcaaggacctgtccgtcgagctggatagactgagcgaagaatctgtgaacaacgacatctcctcctggacaaagggcagaagcggagaagctctgagcctcctgaagaaaagattctcccatagacccgtgcaggagaagttcgtgtgcctgaactgcggcttcgagacacacgcagccgagcaagccgccctgaacatcgccagatcctggctgttcctgcggagccaggagtacaagaaataccagacaaacaagacaaccggcaacaccgataagagagccttcgtcgagacctggcagtccttttaccggaagaagcttaaggaggtgtggaaacctgccgtgcggtctggcggatctggcggaggctccacaagcttcgaggagctggtgaccttcgaggacgtgttcgtggacttcagccccgaggagctgagcagcctgagcgccccccagaggaacctgtacagggaggtgatgctggagaactacaggaacctggtgttcctgggctaccagttcagcaagcccgacatcatcagcaggctggaggtggaggagagccacgccatggagaccgacagcaggcacaccgtgatctgccagggcgaggcccacgacaccagccccaagaaaaagagaaaagtctaagctgccttctgcggggcttgccttctggccatgcccttcttctctcccttgcacctgtacctcttggtctttgaataaagcctgagtaggaaggctagcaaaaaaaaaaaaaaaaaaaaaaaaaaaaaaaaaaaaaaaaaaaaaaaaaaaaaaaaaaaaaaaaaaaaaaaaaaaaaaaa

SEQ ID NO: 3598 - RNA, 5419 nt, synthetic construct
  source 1..5419: mol_type = other RNA
aggaaataagagagaaaagaagagtaagaagaaatataagagccaccatggcccctaagaagaagcgtaaagtgagccgggtgaacggcagcggcagcggcggcggcatgaaccacgaccaggagttcgacccccctaaggtgtaccctcccgtccccgccgagaagagaaagcccatccgggtcctgagcctgttcgatggcatcgccaccggtctgctggtgctgaaggacctgggcatccaggtggataggtacattgcctccgaggtgtgcgaggactccatcaccgtgggaatggtgcgtcatcagggcaagatcatgtacgtgggcgacgtgcggagcgtgacacagaagcatatccaggagtggggccctttcgacctggtgatcggcggcagcccttgcaatgacctgagcatcgtgaacccagcccggaagggcctgtacgagggaaccggcagactgttcttcgagttttacagactgctgcacgacgcccggcctaaggaaggcgacgaccggcccttcttttggctgttcgagaatgtggtggccatgggagtcagcgacaagcgggatattagccggttcctggagagcaaccccgtgatgatcgatgccaaggaagtgagcgccgcccaccgggccagatacttctggggcaatctgcctggcatgaacagacccctggccagcaccgtgaacgacaagctggagctgcaggagtgcctggagcacggccggatcgccaagttcagcaaggtgagaaccatcaccacccgaagcaacagcatcaaacaaggcaaggaccagcactttcctgtgttcatgaacgagaaggaggacatcctgtggtgtaccgagatggagagagtgttcgggttcccagtccactacacagatgtcagcaacatgtctagactggccagacagagactgctgggaagaagctggtccgtccctgtgatcagacacctgttcgcccctctgaaggagtacttcgcctgcgtgagcagcggcaacagcaacgccaacagccggggccccagcttctctagcggcctggtgccactgtccctgagagggagccacatgggccccatggagatctacaaaaccgtgagcgcctggaagcggcagcctgtgcgcgtgctgagcctgtttcggaatatcgataaagtcctgaaaagcctgggattcctggagagcggctctggctccggcggtggcaccctgaagtacgtggaggatgtgacaaacgtggtcagacgggatgtggagaagtggggccccttcgatctggtgtacggcagcacccaacccctgggcagctcttgtgaccggtgccctggctggtacatgtttcagttccaccggatcctgcagtacgccctgccgagacaggagtcccagcggccattcttttggattttcatggacaacttgctgctgaccgaggatgaccaggaaactaccactcggttcctgcagaccgaagccgtgaccctgcaggacgtgagaggccgggactaccagaacgccatgcgggtgtggtccaacatccctggactgaaaagcaagcacgcacctctgacccctaaagaagaggagtacctgcaggcccaggtgcggagcagaagcaagctggacgcccctaaggtggatctgctggtgaagaattgcctcctgcccctgagagagtacttcaagtatttcagccagaatagtctgcccctgggcggcccaagcagcggcgcccctcctcccagcggcggcagcccagccggctccccaacctctaccgaggagggcacctctgagtccgccacccccgagagcggccctggcacctccaccgagcccagcgagggcagcgcacccggcagccctgccggcagccccacctccacagaggagggaaccagcaccgagcccagcgaaggcagcgccccaggcaccagcaccgagcctagtgagggcggctctggcggcggcagcgcccaggagattaaacggatcaacaagatcagaagaagacttgtgaaagacagcaacaccaagaaggccggcaagacaggccccatgaaaaccctgctggttagagtgatgacacccgatctgagagagcggctggaaaacctgagaaagaagcctgaaaatatcccccagcccatcagcaatacatctagagccaacctgaataagctgctgaccgattacaccgaaatgaagaaggcgatcctgcatgtgtactgggaagagttccagaaggaccctgtgggcctgatgagccgggtggcccagcctgccagcaagaagatcgatcagaacaagctgaaacctgagatggacgagaagggcaacctgaccaccgccggctttgcctgctctcagtgtggccagcccctgttcgtgtacaagctggagcaggtgtctgagaagggcaaggcttacaccaactacttcggacggtgcaatgtggccgagcacgaaaagctgatcctgctggcccagctgaagcccgagaaggatagcgacgaagccgtgacatatagcctgggaaagtttgggcagagggccctggatttctacagcattcatgtgaccaaggagtccacccaccccgtgaagcccctggcccagatcgccggaaacagatacgcctccggacctgtgggaaaggccctgagcgacgcatgtatgggcacaatcgcctccttcctgtctaagtaccaggacatcatcatcgaacaccagaaggtggtgaagggcaaccagaagagactggagagcctgcgggagctggccggcaaggaaaacctggaataccctagcgtgaccctgccacctcagcctcacaccaaggagggcgttgatgcctacaacgaagtgatcgcccgggtgcgaatgtgggtgaacctgaacctgtggcagaagctgaagctaagcagagatgatgccaagcctctgctgagactgaagggattcccttcctttcctctggtcgagagacaggccaacgaagtggactggtgggacatggtgtgtaacgtgaagaagctgatcaacgagaaaaaggaggatggcaaggtgttttggcagaatctggctggctacaagagacaggaagccctgagaccatacctgagcagcgaggaagatcggaagaagggaaagaaattcgctcggtaccagctgggcgacctgctgctgcacctggaaaagaagcacggcgaggactggggaaaggtgtacgacgaggcctgggagcggattgacaagaaagtggaaggcctgagcaagcacatcaagctggaagaggaacggagaagcgaggacgcccagagcaaggccgccctgaccgactggctgcgggctaaggccagcttcgtgatcgagggcctgaaggaggccgacaaggacgagttctgcagatgcgagctgaagctgcagaagtggtacggggacctgcggggaaagcccttcgccatcgaagccgagaacagcatcctggacatcagcggcttcagcaagcagtacaactgtgccttcatctggcagaaggacggcgtgaagaagctgaacctgtacctgatcatcaactacttcaagggcggcaagctgcggttcaagaagatcaaacctgaagccttcgaagccaacagattctacaccgtgatcaacaaaaagagcggcgagatcgtgcccatggaggtgaacttcaacttcgacgaccccaacctgatcatcctgcctctggcctttggcaagagacagggcagagaattcatctggaacgacctgctgtccctggaaaccggcagcctgaagctggccaacggaagagtgatcgagaagacactgtacaacagaagaacccggcaggatgagcctgccctgttcgtggccctgaccttcgagcggcgggaggtcctggactcctccaatatcaaaccaatgaacctgatcggcgtggcaagaggcgaaaacatccccgccgtgatcgccctgaccgaccccgagggctgcccactgagccggtttaaggatagcctgggaaacccaacccacatcctgagaatcggcgagagctataaggagaagcagcggaccatccaggccaagaaggaggtggagcagcggagagccggcggctacagccggaagtacgccagcaaagccaagaatctggcagacgatatggtgagaaacaccgctagagatctgctgtactacgccgtgacccaggatgccatgctgatcttcgccaacctgagccggggcttcggccggcagggcaagcggaccttcatggccgagagacagtacacacggatggaggactggctgaccgccaagctggcctacgagggcctgagcaagacctacctgtccaagacactggcccagtacacctccaagacatgcagcaactgtgggtttaccatcaccagcgccgactacgacagggtgctggagaagctgaagaagacagcaacaggctggatgaccacaattaacggcaaggagctgaaggtggagggccagattacctactacaacagatacaagagacagaacgtagtcaaggacctgtccgtcgagctggatagactgagcgaagaatctgtgaacaacgacatctcctcctggacaaagggcagaagcggagaagctctgagcctcctgaagaaaagattctcccatagacccgtgcaggagaagttcgtgtgcctgaactgcggcttcgagacacacgcagccgagcaagccgccctgaacatcgccagatcctggctgttcctgcggagccaggagtacaagaaataccagacaaacaagacaaccggcaacaccgataagagagccttcgtcgagacctggcagtccttttaccggaagaagcttaaggaggtgtggaaacctgccgtgcggtctggcggatctggcggaggctccacaagcatggcccaggagagcgtgatgttcagcgacgtgagcgtggacttcagccaggaggagtgggagtgcctgaacgacgaccagagggacctgtacagggacgtgatgctggagaactacagcaacctggtgagcatggccggccacagcgtgagcaagcccaacgtgatcagctacctggagcagggcaaggagccctggctggtggacagggagctgaccaggggccagtggcccgtgctggagaccagccccaagaaaaagagaaaagtctaagctgccttctgcggggcttgccttctggccatgcccttcttctctcccttgcacctgtacctcttggtctttgaataaagcctgagtaggaaggctagcaaaaaaaaaaaaaaaaaaaaaaaaaaaaaaaaaaaaaaaaaaaaaaaaaaaaaaaaaaaaaaaaaaaaaaaaaaaaaaaa

SEQ ID NO: 3599 - RNA, 5419 nt, synthetic construct
  source 1..5419: mol_type = other RNA
aggaaataagagagaaaagaagagtaagaagaaatataagagccaccatggcccctaagaagaagcgtaaagtgagccgggtgaacggcagcggcagcggcggcggcatgaaccacgaccaggagttcgacccccctaaggtgtaccctcccgtccccgccgagaagagaaagcccatccgggtcctgagcctgttcgatggcatcgccaccggtctgctggtgctgaaggacctgggcatccaggtggataggtacattgcctccgaggtgtgcgaggactccatcaccgtgggaatggtgcgtcatcagggcaagatcatgtacgtgggcgacgtgcggagcgtgacacagaagcatatccaggagtggggccctttcgacctggtgatcggcggcagcccttgcaatgacctgagcatcgtgaacccagcccggaagggcctgtacgagggaaccggcagactgttcttcgagttttacagactgctgcacgacgcccggcctaaggaaggcgacgaccggcccttcttttggctgttcgagaatgtggtggccatgggagtcagcgacaagcgggatattagccggttcctggagagcaaccccgtgatgatcgatgccaaggaagtgagcgccgcccaccgggccagatacttctggggcaatctgcctggcatgaacagacccctggccagcaccgtgaacgacaagctggagctgcaggagtgcctggagcacggccggatcgccaagttcagcaaggtgagaaccatcaccacccgaagcaacagcatcaaacaaggcaaggaccagcactttcctgtgttcatgaacgagaaggaggacatcctgtggtgtaccgagatggagagagtgttcgggttcccagtccactacacagatgtcagcaacatgtctagactggccagacagagactgctgggaagaagctggtccgtccctgtgatcagacacctgttcgcccctctgaaggagtacttcgcctgcgtgagcagcggcaacagcaacgccaacagccggggccccagcttctctagcggcctggtgccactgtccctgagagggagccacatgggccccatggagatctacaaaaccgtgagcgcctggaagcggcagcctgtgcgcgtgctgagcctgtttcggaatatcgataaagtcctgaaaagcctgggattcctggagagcggctctggctccggcggtggcaccctgaagtacgtggaggatgtgacaaacgtggtcagacgggatgtggagaagtggggccccttcgatctggtgtacggcagcacccaacccctgggcagctcttgtgaccggtgccctggctggtacatgtttcagttccaccggatcctgcagtacgccctgccgagacaggagtcccagcggccattcttttggattttcatggacaacttgctgctgaccgaggatgaccaggaaactaccactcggttcctgcagaccgaagccgtgaccctgcaggacgtgagaggccgggactaccagaacgccatgcgggtgtggtccaacatccctggactgaaaagcaagcacgcacctctgacccctaaagaagaggagtacctgcaggcccaggtgcggagcagaagcaagctggacgcccctaaggtggatctgctggtgaagaattgcctcctgcccctgagagagtacttcaagtatttcagccagaatagtctgcccctgggcggcccaagcagcggcgcccctcctcccagcggcggcagcccagccggctccccaacctctaccgaggagggcacctctgagtccgccacccccgagagcggccctggcacctccaccgagcccagcgagggcagcgcacccggcagccctgccggcagccccacctccacagaggagggaaccagcaccgagcccagcgaaggcagcgccccaggcaccagcaccgagcctagtgagggcggctctggcggcggcagcgcccaggagattaaacggatcaacaagatcagaagaagacttgtgaaagacagcaacaccaagaaggccggcaagacaggccccatgaaaaccctgctggttagagtgatgacacccgatctgagagagcggctggaaaacctgagaaagaagcctgaaaatatcccccagcccatcagcaatacatctagagccaacctgaataagctgctgaccgattacaccgaaatgaagaaggcgatcctgcatgtgtactgggaagagttccagaaggaccctgtgggcctgatgagccgggtggcccagcctgccagcaagaagatcgatcagaacaagctgaaacctgagatggacgagaagggcaacctgaccaccgccggctttgcctgctctcagtgtggccagcccctgttcgtgtacaagctggagcaggtgtctgagaagggcaaggcttacaccaactacttcggacggtgcaatgtggccgagcacgaaaagctgatcctgctggcccagctgaagcccgagaaggatagcgacgaagccgtgacatatagcctgggaaagtttgggcagagggccctggatttctacagcattcatgtgaccaaggagtccacccaccccgtgaagcccctggcccagatcgccggaaacagatacgcctccggacctgtgggaaaggccctgagcgacgcatgtatgggcacaatcgcctccttcctgtctaagtaccaggacatcatcatcgaacaccagaaggtggtgaagggcaaccagaagagactggagagcctgcgggagctggccggcaaggaaaacctggaataccctagcgtgaccctgccacctcagcctcacaccaaggagggcgttgatgcctacaacgaagtgatcgcccgggtgcgaatgtgggtgaacctgaacctgtggcagaagctgaagctaagcagagatgatgccaagcctctgctgagactgaagggattcccttcctttcctctggtcgagagacaggccaacgaagtggactggtgggacatggtgtgtaacgtgaagaagctgatcaacgagaaaaaggaggatggcaaggtgttttggcagaatctggctggctacaagagacaggaagccctgagaccatacctgagcagcgaggaagatcggaagaagggaaagaaattcgctcggtaccagctgggcgacctgctgctgcacctggaaaagaagcacggcgaggactggggaaaggtgtacgacgaggcctgggagcggattgacaagaaagtggaaggcctgagcaagcacatcaagctggaagaggaacggagaagcgaggacgcccagagcaaggccgccctgaccgactggctgcgggctaaggccagcttcgtgatcgagggcctgaaggaggccgacaaggacgagttctgcagatgcgagctgaagctgcagaagtggtacggggacctgcggggaaagcccttcgccatcgaagccgagaacagcatcctggacatcagcggcttcagcaagcagtacaactgtgccttcatctggcagaaggacggcgtgaagaagctgaacctgtacctgatcatcaactacttcaagggcggcaagctgcggttcaagaagatcaaacctgaagccttcgaagccaacagattctacaccgtgatcaacaaaaagagcggcgagatcgtgcccatggaggtgaacttcaacttcgacgaccccaacctgatcatcctgcctctggcctttggcaagagacagggcagagaattcatctggaacgacctgctgtccctggaaaccggcagcctgaagctggccaacggaagagtgatcgagaagacactgtacaacagaagaacccggcaggatgagcctgccctgttcgtggccctgaccttcgagcggcgggaggtcctggactcctccaatatcaaaccaatgaacctgatcggcgtggcaagaggcgaaaacatccccgccgtgatcgccctgaccgaccccgagggctgcccactgagccggtttaaggatagcctgggaaacccaacccacatcctgagaatcggcgagagctataaggagaagcagcggaccatccaggccaagaaggaggtggagcagcggagagccggcggctacagccggaagtacgccagcaaagccaagaatctggcagacgatatggtgagaaacaccgctagagatctgctgtactacgccgtgacccaggatgccatgctgatcttcgccaacctgagccggggcttcggccggcagggcaagcggaccttcatggccgagagacagtacacacggatggaggactggctgaccgccaagctggcctacgagggcctgagcaagacctacctgtccaagacactggcccagtacacctccaagacatgcagcaactgtgggtttaccatcaccagcgccgactacgacagggtgctggagaagctgaagaagacagcaacaggctggatgaccacaattaacggcaaggagctgaaggtggagggccagattacctactacaacagatacaagagacagaacgtagtcaaggacctgtccgtcgagctggatagactgagcgaagaatctgtgaacaacgacatctcctcctggacaaagggcagaagcggagaagctctgagcctcctgaagaaaagattctcccatagacccgtgcaggagaagttcgtgtgcctgaactgcggcttcgagacacacgcagccgagcaagccgccctgaacatcgccagatcctggctgttcctgcggagccaggagtacaagaaataccagacaaacaagacaaccggcaacaccgataagagagccttcgtcgagacctggcagtccttttaccggaagaagcttaaggaggtgtggaaacctgccgtgcggtctggcggatctggcggaggctccacaagcagggagaggctggtgagcttcgaggacgtgaccgtggacttcagccaggaggagtggaggaggctggacagcgtgcagaggcacctgtaccaggacgtgatgctggagatctacagccacctgctggccgtgggctaccccgtgcccagccccggcgccatcttcaggatcaagaagaggaaggaggccaggaccggcgaggccaagctgccccacccctgctggtgccaggaggtggagagcaccagccccaagaaaaagagaaaagtctaagctgccttctgcggggcttgccttctggccatgcccttcttctctcccttgcacctgtacctcttggtctttgaataaagcctgagtaggaaggctagcaaaaaaaaaaaaaaaaaaaaaaaaaaaaaaaaaaaaaaaaaaaaaaaaaaaaaaaaaaaaaaaaaaaaaaaaaaaaaaaa

SEQ ID NO: 3600 - RNA, 5419 nt, synthetic construct
  source 1..5419: mol_type = other RNA
aggaaataagagagaaaagaagagtaagaagaaatataagagccaccatggcccctaagaagaagcgtaaagtgagccgggtgaacggcagcggcagcggcggcggcatgaaccacgaccaggagttcgacccccctaaggtgtaccctcccgtccccgccgagaagagaaagcccatccgggtcctgagcctgttcgatggcatcgccaccggtctgctggtgctgaaggacctgggcatccaggtggataggtacattgcctccgaggtgtgcgaggactccatcaccgtgggaatggtgcgtcatcagggcaagatcatgtacgtgggcgacgtgcggagcgtgacacagaagcatatccaggagtggggccctttcgacctggtgatcggcggcagcccttgcaatgacctgagcatcgtgaacccagcccggaagggcctgtacgagggaaccggcagactgttcttcgagttttacagactgctgcacgacgcccggcctaaggaaggcgacgaccggcccttcttttggctgttcgagaatgtggtggccatgggagtcagcgacaagcgggatattagccggttcctggagagcaaccccgtgatgatcgatgccaaggaagtgagcgccgcccaccgggccagatacttctggggcaatctgcctggcatgaacagacccctggccagcaccgtgaacgacaagctggagctgcaggagtgcctggagcacggccggatcgccaagttcagcaaggtgagaaccatcaccacccgaagcaacagcatcaaacaaggcaaggaccagcactttcctgtgttcatgaacgagaaggaggacatcctgtggtgtaccgagatggagagagtgttcgggttcccagtccactacacagatgtcagcaacatgtctagactggccagacagagactgctgggaagaagctggtccgtccctgtgatcagacacctgttcgcccctctgaaggagtacttcgcctgcgtgagcagcggcaacagcaacgccaacagccggggccccagcttctctagcggcctggtgccactgtccctgagagggagccacatgggccccatggagatctacaaaaccgtgagcgcctggaagcggcagcctgtgcgcgtgctgagcctgtttcggaatatcgataaagtcctgaaaagcctgggattcctggagagcggctctggctccggcggtggcaccctgaagtacgtggaggatgtgacaaacgtggtcagacgggatgtggagaagtggggccccttcgatctggtgtacggcagcacccaacccctgggcagctcttgtgaccggtgccctggctggtacatgtttcagttccaccggatcctgcagtacgccctgccgagacaggagtcccagcggccattcttttggattttcatggacaacttgctgctgaccgaggatgaccaggaaactaccactcggttcctgcagaccgaagccgtgaccctgcaggacgtgagaggccgggactaccagaacgccatgcgggtgtggtccaacatccctggactgaaaagcaagcacgcacctctgacccctaaagaagaggagtacctgcaggcccaggtgcggagcagaagcaagctggacgcccctaaggtggatctgctggtgaagaattgcctcctgcccctgagagagtacttcaagtatttcagccagaatagtctgcccctgggcggcccaagcagcggcgcccctcctcccagcggcggcagcccagccggctccccaacctctaccgaggagggcacctctgagtccgccacccccgagagcggccctggcacctccaccgagcccagcgagggcagcgcacccggcagccctgccggcagccccacctccacagaggagggaaccagcaccgagcccagcgaaggcagcgccccaggcaccagcaccgagcctagtgagggcggctctggcggcggcagcgcccaggagattaaacggatcaacaagatcagaagaagacttgtgaaagacagcaacaccaagaaggccggcaagacaggccccatgaaaaccctgctggttagagtgatgacacccgatctgagagagcggctggaaaacctgagaaagaagcctgaaaatatcccccagcccatcagcaatacatctagagccaacctgaataagctgctgaccgattacaccgaaatgaagaaggcgatcctgcatgtgtactgggaagagttccagaaggaccctgtgggcctgatgagccgggtggcccagcctgccagcaagaagatcgatcagaacaagctgaaacctgagatggacgagaagggcaacctgaccaccgccggctttgcctgctctcagtgtggccagcccctgttcgtgtacaagctggagcaggtgtctgagaagggcaaggcttacaccaactacttcggacggtgcaatgtggccgagcacgaaaagctgatcctgctggcccagctgaagcccgagaaggatagcgacgaagccgtgacatatagcctgggaaagtttgggcagagggccctggatttctacagcattcatgtgaccaaggagtccacccaccccgtgaagcccctggcccagatcgccggaaacagatacgcctccggacctgtgggaaaggccctgagcgacgcatgtatgggcacaatcgcctccttcctgtctaagtaccaggacatcatcatcgaacaccagaaggtggtgaagggcaaccagaagagactggagagcctgcgggagctggccggcaaggaaaacctggaataccctagcgtgaccctgccacctcagcctcacaccaaggagggcgttgatgcctacaacgaagtgatcgcccgggtgcgaatgtgggtgaacctgaacctgtggcagaagctgaagctaagcagagatgatgccaagcctctgctgagactgaagggattcccttcctttcctctggtcgagagacaggccaacgaagtggactggtgggacatggtgtgtaacgtgaagaagctgatcaacgagaaaaaggaggatggcaaggtgttttggcagaatctggctggctacaagagacaggaagccctgagaccatacctgagcagcgaggaagatcggaagaagggaaagaaattcgctcggtaccagctgggcgacctgctgctgcacctggaaaagaagcacggcgaggactggggaaaggtgtacgacgaggcctgggagcggattgacaagaaagtggaaggcctgagcaagcacatcaagctggaagaggaacggagaagcgaggacgcccagagcaaggccgccctgaccgactggctgcgggctaaggccagcttcgtgatcgagggcctgaaggaggccgacaaggacgagttctgcagatgcgagctgaagctgcagaagtggtacggggacctgcggggaaagcccttcgccatcgaagccgagaacagcatcctggacatcagcggcttcagcaagcagtacaactgtgccttcatctggcagaaggacggcgtgaagaagctgaacctgtacctgatcatcaactacttcaagggcggcaagctgcggttcaagaagatcaaacctgaagccttcgaagccaacagattctacaccgtgatcaacaaaaagagcggcgagatcgtgcccatggaggtgaacttcaacttcgacgaccccaacctgatcatcctgcctctggcctttggcaagagacagggcagagaattcatctggaacgacctgctgtccctggaaaccggcagcctgaagctggccaacggaagagtgatcgagaagacactgtacaacagaagaacccggcaggatgagcctgccctgttcgtggccctgaccttcgagcggcgggaggtcctggactcctccaatatcaaaccaatgaacctgatcggcgtggcaagaggcgaaaacatccccgccgtgatcgccctgaccgaccccgagggctgcccactgagccggtttaaggatagcctgggaaacccaacccacatcctgagaatcggcgagagctataaggagaagcagcggaccatccaggccaagaaggaggtggagcagcggagagccggcggctacagccggaagtacgccagcaaagccaagaatctggcagacgatatggtgagaaacaccgctagagatctgctgtactacgccgtgacccaggatgccatgctgatcttcgccaacctgagccggggcttcggccggcagggcaagcggaccttcatggccgagagacagtacacacggatggaggactggctgaccgccaagctggcctacgagggcctgagcaagacctacctgtccaagacactggcccagtacacctccaagacatgcagcaactgtgggtttaccatcaccagcgccgactacgacagggtgctggagaagctgaagaagacagcaacaggctggatgaccacaattaacggcaaggagctgaaggtggagggccagattacctactacaacagatacaagagacagaacgtagtcaaggacctgtccgtcgagctggatagactgagcgaagaatctgtgaacaacgacatctcctcctggacaaagggcagaagcggagaagctctgagcctcctgaagaaaagattctcccatagacccgtgcaggagaagttcgtgtgcctgaactgcggcttcgagacacacgcagccgagcaagccgccctgaacatcgccagatcctggctgttcctgcggagccaggagtacaagaaataccagacaaacaagacaaccggcaacaccgataagagagccttcgtcgagacctggcagtccttttaccggaagaagcttaaggaggtgtggaaacctgccgtgcggtctggcggatctggcggaggctccacaagcgcctgggaggtggtgaccttccaggacgtggccgtggacttcaccagggaggagtggaggctgctgagccccccccagaaggagctgtacaaggaggtgatgctggagaacgtgaggaacctgctgagcgtgggcctgcccgccccccccgacgacgtggtgagctacctggagcagagggagggccccagcatgctggaccaggaggacctgaggacctgcggccccgagggcgagatcaggaccagccccaagaaaaagagaaaagtctaagctgccttctgcggggcttgccttctggccatgcccttcttctctcccttgcacctgtacctcttggtctttgaataaagcctgagtaggaaggctagcaaaaaaaaaaaaaaaaaaaaaaaaaaaaaaaaaaaaaaaaaaaaaaaaaaaaaaaaaaaaaaaaaaaaaaaaaaaaaaaa

SEQ ID NO: 3601 - RNA, 5419 nt, synthetic construct
  source 1..5419: mol_type = other RNA
aggaaataagagagaaaagaagagtaagaagaaatataagagccaccatggcccctaagaagaagcgtaaagtgagccgggtgaacggcagcggcagcggcggcggcatgaaccacgaccaggagttcgacccccctaaggtgtaccctcccgtccccgccgagaagagaaagcccatccgggtcctgagcctgttcgatggcatcgccaccggtctgctggtgctgaaggacctgggcatccaggtggataggtacattgcctccgaggtgtgcgaggactccatcaccgtgggaatggtgcgtcatcagggcaagatcatgtacgtgggcgacgtgcggagcgtgacacagaagcatatccaggagtggggccctttcgacctggtgatcggcggcagcccttgcaatgacctgagcatcgtgaacccagcccggaagggcctgtacgagggaaccggcagactgttcttcgagttttacagactgctgcacgacgcccggcctaaggaaggcgacgaccggcccttcttttggctgttcgagaatgtggtggccatgggagtcagcgacaagcgggatattagccggttcctggagagcaaccccgtgatgatcgatgccaaggaagtgagcgccgcccaccgggccagatacttctggggcaatctgcctggcatgaacagacccctggccagcaccgtgaacgacaagctggagctgcaggagtgcctggagcacggccggatcgccaagttcagcaaggtgagaaccatcaccacccgaagcaacagcatcaaacaaggcaaggaccagcactttcctgtgttcatgaacgagaaggaggacatcctgtggtgtaccgagatggagagagtgttcgggttcccagtccactacacagatgtcagcaacatgtctagactggccagacagagactgctgggaagaagctggtccgtccctgtgatcagacacctgttcgcccctctgaaggagtacttcgcctgcgtgagcagcggcaacagcaacgccaacagccggggccccagcttctctagcggcctggtgccactgtccctgagagggagccacatgggccccatggagatctacaaaaccgtgagcgcctggaagcggcagcctgtgcgcgtgctgagcctgtttcggaatatcgataaagtcctgaaaagcctgggattcctggagagcggctctggctccggcggtggcaccctgaagtacgtggaggatgtgacaaacgtggtcagacgggatgtggagaagtggggccccttcgatctggtgtacggcagcacccaacccctgggcagctcttgtgaccggtgccctggctggtacatgtttcagttccaccggatcctgcagtacgccctgccgagacaggagtcccagcggccattcttttggattttcatggacaacttgctgctgaccgaggatgaccaggaaactaccactcggttcctgcagaccgaagccgtgaccctgcaggacgtgagaggccgggactaccagaacgccatgcgggtgtggtccaacatccctggactgaaaagcaagcacgcacctctgacccctaaagaagaggagtacctgcaggcccaggtgcggagcagaagcaagctggacgcccctaaggtggatctgctggtgaagaattgcctcctgcccctgagagagtacttcaagtatttcagccagaatagtctgcccctgggcggcccaagcagcggcgcccctcctcccagcggcggcagcccagccggctccccaacctctaccgaggagggcacctctgagtccgccacccccgagagcggccctggcacctccaccgagcccagcgagggcagcgcacccggcagccctgccggcagccccacctccacagaggagggaaccagcaccgagcccagcgaaggcagcgccccaggcaccagcaccgagcctagtgagggcggctctggcggcggcagcgcccaggagattaaacggatcaacaagatcagaagaagacttgtgaaagacagcaacaccaagaaggccggcaagacaggccccatgaaaaccctgctggttagagtgatgacacccgatctgagagagcggctggaaaacctgagaaagaagcctgaaaatatcccccagcccatcagcaatacatctagagccaacctgaataagctgctgaccgattacaccgaaatgaagaaggcgatcctgcatgtgtactgggaagagttccagaaggaccctgtgggcctgatgagccgggtggcccagcctgccagcaagaagatcgatcagaacaagctgaaacctgagatggacgagaagggcaacctgaccaccgccggctttgcctgctctcagtgtggccagcccctgttcgtgtacaagctggagcaggtgtctgagaagggcaaggcttacaccaactacttcggacggtgcaatgtggccgagcacgaaaagctgatcctgctggcccagctgaagcccgagaaggatagcgacgaagccgtgacatatagcctgggaaagtttgggcagagggccctggatttctacagcattcatgtgaccaaggagtccacccaccccgtgaagcccctggcccagatcgccggaaacagatacgcctccggacctgtgggaaaggccctgagcgacgcatgtatgggcacaatcgcctccttcctgtctaagtaccaggacatcatcatcgaacaccagaaggtggtgaagggcaaccagaagagactggagagcctgcgggagctggccggcaaggaaaacctggaataccctagcgtgaccctgccacctcagcctcacaccaaggagggcgttgatgcctacaacgaagtgatcgcccgggtgcgaatgtgggtgaacctgaacctgtggcagaagctgaagctaagcagagatgatgccaagcctctgctgagactgaagggattcccttcctttcctctggtcgagagacaggccaacgaagtggactggtgggacatggtgtgtaacgtgaagaagctgatcaacgagaaaaaggaggatggcaaggtgttttggcagaatctggctggctacaagagacaggaagccctgagaccatacctgagcagcgaggaagatcggaagaagggaaagaaattcgctcggtaccagctgggcgacctgctgctgcacctggaaaagaagcacggcgaggactggggaaaggtgtacgacgaggcctgggagcggattgacaagaaagtggaaggcctgagcaagcacatcaagctggaagaggaacggagaagcgaggacgcccagagcaaggccgccctgaccgactggctgcgggctaaggccagcttcgtgatcgagggcctgaaggaggccgacaaggacgagttctgcagatgcgagctgaagctgcagaagtggtacggggacctgcggggaaagcccttcgccatcgaagccgagaacagcatcctggacatcagcggcttcagcaagcagtacaactgtgccttcatctggcagaaggacggcgtgaagaagctgaacctgtacctgatcatcaactacttcaagggcggcaagctgcggttcaagaagatcaaacctgaagccttcgaagccaacagattctacaccgtgatcaacaaaaagagcggcgagatcgtgcccatggaggtgaacttcaacttcgacgaccccaacctgatcatcctgcctctggcctttggcaagagacagggcagagaattcatctggaacgacctgctgtccctggaaaccggcagcctgaagctggccaacggaagagtgatcgagaagacactgtacaacagaagaacccggcaggatgagcctgccctgttcgtggccctgaccttcgagcggcgggaggtcctggactcctccaatatcaaaccaatgaacctgatcggcgtggcaagaggcgaaaacatccccgccgtgatcgccctgaccgaccccgagggctgcccactgagccggtttaaggatagcctgggaaacccaacccacatcctgagaatcggcgagagctataaggagaagcagcggaccatccaggccaagaaggaggtggagcagcggagagccggcggctacagccggaagtacgccagcaaagccaagaatctggcagacgatatggtgagaaacaccgctagagatctgctgtactacgccgtgacccaggatgccatgctgatcttcgccaacctgagccggggcttcggccggcagggcaagcggaccttcatggccgagagacagtacacacggatggaggactggctgaccgccaagctggcctacgagggcctgagcaagacctacctgtccaagacactggcccagtacacctccaagacatgcagcaactgtgggtttaccatcaccagcgccgactacgacagggtgctggagaagctgaagaagacagcaacaggctggatgaccacaattaacggcaaggagctgaaggtggagggccagattacctactacaacagatacaagagacagaacgtagtcaaggacctgtccgtcgagctggatagactgagcgaagaatctgtgaacaacgacatctcctcctggacaaagggcagaagcggagaagctctgagcctcctgaagaaaagattctcccatagacccgtgcaggagaagttcgtgtgcctgaactgcggcttcgagacacacgcagccgagcaagccgccctgaacatcgccagatcctggctgttcctgcggagccaggagtacaagaaataccagacaaacaagacaaccggcaacaccgataagagagccttcgtcgagacctggcagtccttttaccggaagaagcttaaggaggtgtggaaacctgccgtgcggtctggcggatctggcggaggctccacaagccccaagggcctgctgaccttcagggacgtggccatcgagttcagccaggaggagtggggctgcctgaaccacacccagagggagctgtacagggacgtgatgctggagaactacggcaacctgctgttcctgggcctgatcgtgagcaagcccgacctggtgagcttcctggagcagaagaaggagccctggagcgtgaagaggaagaagagggtgaccatccaccccgcccagaggttcggcaccagccccaagaaaaagagaaaagtctaagctgccttctgcggggcttgccttctggccatgcccttcttctctcccttgcacctgtacctcttggtctttgaataaagcctgagtaggaaggctagcaaaaaaaaaaaaaaaaaaaaaaaaaaaaaaaaaaaaaaaaaaaaaaaaaaaaaaaaaaaaaaaaaaaaaaaaaaaaaaaa

SEQ ID NO: 3602 - RNA, 5419 nt, synthetic construct
  source 1..5419: mol_type = other RNA
aggaaataagagagaaaagaagagtaagaagaaatataagagccaccatggcccctaagaagaagcgtaaagtgagccgggtgaacggcagcggcagcggcggcggcatgaaccacgaccaggagttcgacccccctaaggtgtaccctcccgtccccgccgagaagagaaagcccatccgggtcctgagcctgttcgatggcatcgccaccggtctgctggtgctgaaggacctgggcatccaggtggataggtacattgcctccgaggtgtgcgaggactccatcaccgtgggaatggtgcgtcatcagggcaagatcatgtacgtgggcgacgtgcggagcgtgacacagaagcatatccaggagtggggccctttcgacctggtgatcggcggcagcccttgcaatgacctgagcatcgtgaacccagcccggaagggcctgtacgagggaaccggcagactgttcttcgagttttacagactgctgcacgacgcccggcctaaggaaggcgacgaccggcccttcttttggctgttcgagaatgtggtggccatgggagtcagcgacaagcgggatattagccggttcctggagagcaaccccgtgatgatcgatgccaaggaagtgagcgccgcccaccgggccagatacttctggggcaatctgcctggcatgaacagacccctggccagcaccgtgaacgacaagctggagctgcaggagtgcctggagcacggccggatcgccaagttcagcaaggtgagaaccatcaccacccgaagcaacagcatcaaacaaggcaaggaccagcactttcctgtgttcatgaacgagaaggaggacatcctgtggtgtaccgagatggagagagtgttcgggttcccagtccactacacagatgtcagcaacatgtctagactggccagacagagactgctgggaagaagctggtccgtccctgtgatcagacacctgttcgcccctctgaaggagtacttcgcctgcgtgagcagcggcaacagcaacgccaacagccggggccccagcttctctagcggcctggtgccactgtccctgagagggagccacatgggccccatggagatctacaaaaccgtgagcgcctggaagcggcagcctgtgcgcgtgctgagcctgtttcggaatatcgataaagtcctgaaaagcctgggattcctggagagcggctctggctccggcggtggcaccctgaagtacgtggaggatgtgacaaacgtggtcagacgggatgtggagaagtggggccccttcgatctggtgtacggcagcacccaacccctgggcagctcttgtgaccggtgccctggctggtacatgtttcagttccaccggatcctgcagtacgccctgccgagacaggagtcccagcggccattcttttggattttcatggacaacttgctgctgaccgaggatgaccaggaaactaccactcggttcctgcagaccgaagccgtgaccctgcaggacgtgagaggccgggactaccagaacgccatgcgggtgtggtccaacatccctggactgaaaagcaagcacgcacctctgacccctaaagaagaggagtacctgcaggcccaggtgcggagcagaagcaagctggacgcccctaaggtggatctgctggtgaagaattgcctcctgcccctgagagagtacttcaagtatttcagccagaatagtctgcccctgggcggcccaagcagcggcgcccctcctcccagcggcggcagcccagccggctccccaacctctaccgaggagggcacctctgagtccgccacccccgagagcggccctggcacctccaccgagcccagcgagggcagcgcacccggcagccctgccggcagccccacctccacagaggagggaaccagcaccgagcccagcgaaggcagcgccccaggcaccagcaccgagcctagtgagggcggctctggcggcggcagcgcccaggagattaaacggatcaacaagatcagaagaagacttgtgaaagacagcaacaccaagaaggccggcaagacaggccccatgaaaaccctgctggttagagtgatgacacccgatctgagagagcggctggaaaacctgagaaagaagcctgaaaatatcccccagcccatcagcaatacatctagagccaacctgaataagctgctgaccgattacaccgaaatgaagaaggcgatcctgcatgtgtactgggaagagttccagaaggaccctgtgggcctgatgagccgggtggcccagcctgccagcaagaagatcgatcagaacaagctgaaacctgagatggacgagaagggcaacctgaccaccgccggctttgcctgctctcagtgtggccagcccctgttcgtgtacaagctggagcaggtgtctgagaagggcaaggcttacaccaactacttcggacggtgcaatgtggccgagcacgaaaagctgatcctgctggcccagctgaagcccgagaaggatagcgacgaagccgtgacatatagcctgggaaagtttgggcagagggccctggatttctacagcattcatgtgaccaaggagtccacccaccccgtgaagcccctggcccagatcgccggaaacagatacgcctccggacctgtgggaaaggccctgagcgacgcatgtatgggcacaatcgcctccttcctgtctaagtaccaggacatcatcatcgaacaccagaaggtggtgaagggcaaccagaagagactggagagcctgcgggagctggccggcaaggaaaacctggaataccctagcgtgaccctgccacctcagcctcacaccaaggagggcgttgatgcctacaacgaagtgatcgcccgggtgcgaatgtgggtgaacctgaacctgtggcagaagctgaagctaagcagagatgatgccaagcctctgctgagactgaagggattcccttcctttcctctggtcgagagacaggccaacgaagtggactggtgggacatggtgtgtaacgtgaagaagctgatcaacgagaaaaaggaggatggcaaggtgttttggcagaatctggctggctacaagagacaggaagccctgagaccatacctgagcagcgaggaagatcggaagaagggaaagaaattcgctcggtaccagctgggcgacctgctgctgcacctggaaaagaagcacggcgaggactggggaaaggtgtacgacgaggcctgggagcggattgacaagaaagtggaaggcctgagcaagcacatcaagctggaagaggaacggagaagcgaggacgcccagagcaaggccgccctgaccgactggctgcgggctaaggccagcttcgtgatcgagggcctgaaggaggccgacaaggacgagttctgcagatgcgagctgaagctgcagaagtggtacggggacctgcggggaaagcccttcgccatcgaagccgagaacagcatcctggacatcagcggcttcagcaagcagtacaactgtgccttcatctggcagaaggacggcgtgaagaagctgaacctgtacctgatcatcaactacttcaagggcggcaagctgcggttcaagaagatcaaacctgaagccttcgaagccaacagattctacaccgtgatcaacaaaaagagcggcgagatcgtgcccatggaggtgaacttcaacttcgacgaccccaacctgatcatcctgcctctggcctttggcaagagacagggcagagaattcatctggaacgacctgctgtccctggaaaccggcagcctgaagctggccaacggaagagtgatcgagaagacactgtacaacagaagaacccggcaggatgagcctgccctgttcgtggccctgaccttcgagcggcgggaggtcctggactcctccaatatcaaaccaatgaacctgatcggcgtggcaagaggcgaaaacatccccgccgtgatcgccctgaccgaccccgagggctgcccactgagccggtttaaggatagcctgggaaacccaacccacatcctgagaatcggcgagagctataaggagaagcagcggaccatccaggccaagaaggaggtggagcagcggagagccggcggctacagccggaagtacgccagcaaagccaagaatctggcagacgatatggtgagaaacaccgctagagatctgctgtactacgccgtgacccaggatgccatgctgatcttcgccaacctgagccggggcttcggccggcagggcaagcggaccttcatggccgagagacagtacacacggatggaggactggctgaccgccaagctggcctacgagggcctgagcaagacctacctgtccaagacactggcccagtacacctccaagacatgcagcaactgtgggtttaccatcaccagcgccgactacgacagggtgctggagaagctgaagaagacagcaacaggctggatgaccacaattaacggcaaggagctgaaggtggagggccagattacctactacaacagatacaagagacagaacgtagtcaaggacctgtccgtcgagctggatagactgagcgaagaatctgtgaacaacgacatctcctcctggacaaagggcagaagcggagaagctctgagcctcctgaagaaaagattctcccatagacccgtgcaggagaagttcgtgtgcctgaactgcggcttcgagacacacgcagccgagcaagccgccctgaacatcgccagatcctggctgttcctgcggagccaggagtacaagaaataccagacaaacaagacaaccggcaacaccgataagagagccttcgtcgagacctggcagtccttttaccggaagaagcttaaggaggtgtggaaacctgccgtgcggtctggcggatctggcggaggctccacaagcccccaggagagcgtgaccttcaaggacatcgccgtggacttcacccaggaggagtgggccctgctggacaccagccagaggaagctgtacagggacgtgatgctggagaacatcagccacctggtgagcgtgggctaccacctgtgcaagagcgacgtgatcagccagctggagcagggcgtggagctgtggagggagggcaggggcttcccccagggcctgaaccccgacaggaagagcggcaccagccccaagaaaaagagaaaagtctaagctgccttctgcggggcttgccttctggccatgcccttcttctctcccttgcacctgtacctcttggtctttgaataaagcctgagtaggaaggctagcaaaaaaaaaaaaaaaaaaaaaaaaaaaaaaaaaaaaaaaaaaaaaaaaaaaaaaaaaaaaaaaaaaaaaaaaaaaaaaaa

SEQ ID NO: 3603 - RNA, 5419 nt, synthetic construct
  source 1..5419: mol_type = other RNA
aggaaataagagagaaaagaagagtaagaagaaatataagagccaccatggcccctaagaagaagcgtaaagtgagccgggtgaacggcagcggcagcggcggcggcatgaaccacgaccaggagttcgacccccctaaggtgtaccctcccgtccccgccgagaagagaaagcccatccgggtcctgagcctgttcgatggcatcgccaccggtctgctggtgctgaaggacctgggcatccaggtggataggtacattgcctccgaggtgtgcgaggactccatcaccgtgggaatggtgcgtcatcagggcaagatcatgtacgtgggcgacgtgcggagcgtgacacagaagcatatccaggagtggggccctttcgacctggtgatcggcggcagcccttgcaatgacctgagcatcgtgaacccagcccggaagggcctgtacgagggaaccggcagactgttcttcgagttttacagactgctgcacgacgcccggcctaaggaaggcgacgaccggcccttcttttggctgttcgagaatgtggtggccatgggagtcagcgacaagcgggatattagccggttcctggagagcaaccccgtgatgatcgatgccaaggaagtgagcgccgcccaccgggccagatacttctggggcaatctgcctggcatgaacagacccctggccagcaccgtgaacgacaagctggagctgcaggagtgcctggagcacggccggatcgccaagttcagcaaggtgagaaccatcaccacccgaagcaacagcatcaaacaaggcaaggaccagcactttcctgtgttcatgaacgagaaggaggacatcctgtggtgtaccgagatggagagagtgttcgggttcccagtccactacacagatgtcagcaacatgtctagactggccagacagagactgctgggaagaagctggtccgtccctgtgatcagacacctgttcgcccctctgaaggagtacttcgcctgcgtgagcagcggcaacagcaacgccaacagccggggccccagcttctctagcggcctggtgccactgtccctgagagggagccacatgggccccatggagatctacaaaaccgtgagcgcctggaagcggcagcctgtgcgcgtgctgagcctgtttcggaatatcgataaagtcctgaaaagcctgggattcctggagagcggctctggctccggcggtggcaccctgaagtacgtggaggatgtgacaaacgtggtcagacgggatgtggagaagtggggccccttcgatctggtgtacggcagcacccaacccctgggcagctcttgtgaccggtgccctggctggtacatgtttcagttccaccggatcctgcagtacgccctgccgagacaggagtcccagcggccattcttttggattttcatggacaacttgctgctgaccgaggatgaccaggaaactaccactcggttcctgcagaccgaagccgtgaccctgcaggacgtgagaggccgggactaccagaacgccatgcgggtgtggtccaacatccctggactgaaaagcaagcacgcacctctgacccctaaagaagaggagtacctgcaggcccaggtgcggagcagaagcaagctggacgcccctaaggtggatctgctggtgaagaattgcctcctgcccctgagagagtacttcaagtatttcagccagaatagtctgcccctgggcggcccaagcagcggcgcccctcctcccagcggcggcagcccagccggctccccaacctctaccgaggagggcacctctgagtccgccacccccgagagcggccctggcacctccaccgagcccagcgagggcagcgcacccggcagccctgccggcagccccacctccacagaggagggaaccagcaccgagcccagcgaaggcagcgccccaggcaccagcaccgagcctagtgagggcggctctggcggcggcagcgcccaggagattaaacggatcaacaagatcagaagaagacttgtgaaagacagcaacaccaagaaggccggcaagacaggccccatgaaaaccctgctggttagagtgatgacacccgatctgagagagcggctggaaaacctgagaaagaagcctgaaaatatcccccagcccatcagcaatacatctagagccaacctgaataagctgctgaccgattacaccgaaatgaagaaggcgatcctgcatgtgtactgggaagagttccagaaggaccctgtgggcctgatgagccgggtggcccagcctgccagcaagaagatcgatcagaacaagctgaaacctgagatggacgagaagggcaacctgaccaccgccggctttgcctgctctcagtgtggccagcccctgttcgtgtacaagctggagcaggtgtctgagaagggcaaggcttacaccaactacttcggacggtgcaatgtggccgagcacgaaaagctgatcctgctggcccagctgaagcccgagaaggatagcgacgaagccgtgacatatagcctgggaaagtttgggcagagggccctggatttctacagcattcatgtgaccaaggagtccacccaccccgtgaagcccctggcccagatcgccggaaacagatacgcctccggacctgtgggaaaggccctgagcgacgcatgtatgggcacaatcgcctccttcctgtctaagtaccaggacatcatcatcgaacaccagaaggtggtgaagggcaaccagaagagactggagagcctgcgggagctggccggcaaggaaaacctggaataccctagcgtgaccctgccacctcagcctcacaccaaggagggcgttgatgcctacaacgaagtgatcgcccgggtgcgaatgtgggtgaacctgaacctgtggcagaagctgaagctaagcagagatgatgccaagcctctgctgagactgaagggattcccttcctttcctctggtcgagagacaggccaacgaagtggactggtgggacatggtgtgtaacgtgaagaagctgatcaacgagaaaaaggaggatggcaaggtgttttggcagaatctggctggctacaagagacaggaagccctgagaccatacctgagcagcgaggaagatcggaagaagggaaagaaattcgctcggtaccagctgggcgacctgctgctgcacctggaaaagaagcacggcgaggactggggaaaggtgtacgacgaggcctgggagcggattgacaagaaagtggaaggcctgagcaagcacatcaagctggaagaggaacggagaagcgaggacgcccagagcaaggccgccctgaccgactggctgcgggctaaggccagcttcgtgatcgagggcctgaaggaggccgacaaggacgagttctgcagatgcgagctgaagctgcagaagtggtacggggacctgcggggaaagcccttcgccatcgaagccgagaacagcatcctggacatcagcggcttcagcaagcagtacaactgtgccttcatctggcagaaggacggcgtgaagaagctgaacctgtacctgatcatcaactacttcaagggcggcaagctgcggttcaagaagatcaaacctgaagccttcgaagccaacagattctacaccgtgatcaacaaaaagagcggcgagatcgtgcccatggaggtgaacttcaacttcgacgaccccaacctgatcatcctgcctctggcctttggcaagagacagggcagagaattcatctggaacgacctgctgtccctggaaaccggcagcctgaagctggccaacggaagagtgatcgagaagacactgtacaacagaagaacccggcaggatgagcctgccctgttcgtggccctgaccttcgagcggcgggaggtcctggactcctccaatatcaaaccaatgaacctgatcggcgtggcaagaggcgaaaacatccccgccgtgatcgccctgaccgaccccgagggctgcccactgagccggtttaaggatagcctgggaaacccaacccacatcctgagaatcggcgagagctataaggagaagcagcggaccatccaggccaagaaggaggtggagcagcggagagccggcggctacagccggaagtacgccagcaaagccaagaatctggcagacgatatggtgagaaacaccgctagagatctgctgtactacgccgtgacccaggatgccatgctgatcttcgccaacctgagccggggcttcggccggcagggcaagcggaccttcatggccgagagacagtacacacggatggaggactggctgaccgccaagctggcctacgagggcctgagcaagacctacctgtccaagacactggcccagtacacctccaagacatgcagcaactgtgggtttaccatcaccagcgccgactacgacagggtgctggagaagctgaagaagacagcaacaggctggatgaccacaattaacggcaaggagctgaaggtggagggccagattacctactacaacagatacaagagacagaacgtagtcaaggacctgtccgtcgagctggatagactgagcgaagaatctgtgaacaacgacatctcctcctggacaaagggcagaagcggagaagctctgagcctcctgaagaaaagattctcccatagacccgtgcaggagaagttcgtgtgcctgaactgcggcttcgagacacacgcagccgagcaagccgccctgaacatcgccagatcctggctgttcctgcggagccaggagtacaagaaataccagacaaacaagacaaccggcaacaccgataagagagccttcgtcgagacctggcagtccttttaccggaagaagcttaaggaggtgtggaaacctgccgtgcggtctggcggatctggcggaggctccacaagcagcaagggcagcctgatgttcagggacgtgagcatcgacttcagccaggaggagtgggagtgcctggacagcggccagatgaacctgtacaaggaggtgatgctggagaacttcagcaacctggtgagcgtgggcctgagcagcagcaagcccgccgtgatcagcctgctggagcagggcagggagccctggatggtggacagggagctgaccaggggcctgtgcagcgacctggagagcatgaccagccccaagaaaaagagaaaagtctaagctgccttctgcggggcttgccttctggccatgcccttcttctctcccttgcacctgtacctcttggtctttgaataaagcctgagtaggaaggctagcaaaaaaaaaaaaaaaaaaaaaaaaaaaaaaaaaaaaaaaaaaaaaaaaaaaaaaaaaaaaaaaaaaaaaaaaaaaaaaaa

SEQ ID NO: 3604 - RNA, 5419 nt, synthetic construct
  source 1..5419: mol_type = other RNA
aggaaataagagagaaaagaagagtaagaagaaatataagagccaccatggcccctaagaagaagcgtaaagtgagccgggtgaacggcagcggcagcggcggcggcatgaaccacgaccaggagttcgacccccctaaggtgtaccctcccgtccccgccgagaagagaaagcccatccgggtcctgagcctgttcgatggcatcgccaccggtctgctggtgctgaaggacctgggcatccaggtggataggtacattgcctccgaggtgtgcgaggactccatcaccgtgggaatggtgcgtcatcagggcaagatcatgtacgtgggcgacgtgcggagcgtgacacagaagcatatccaggagtggggccctttcgacctggtgatcggcggcagcccttgcaatgacctgagcatcgtgaacccagcccggaagggcctgtacgagggaaccggcagactgttcttcgagttttacagactgctgcacgacgcccggcctaaggaaggcgacgaccggcccttcttttggctgttcgagaatgtggtggccatgggagtcagcgacaagcgggatattagccggttcctggagagcaaccccgtgatgatcgatgccaaggaagtgagcgccgcccaccgggccagatacttctggggcaatctgcctggcatgaacagacccctggccagcaccgtgaacgacaagctggagctgcaggagtgcctggagcacggccggatcgccaagttcagcaaggtgagaaccatcaccacccgaagcaacagcatcaaacaaggcaaggaccagcactttcctgtgttcatgaacgagaaggaggacatcctgtggtgtaccgagatggagagagtgttcgggttcccagtccactacacagatgtcagcaacatgtctagactggccagacagagactgctgggaagaagctggtccgtccctgtgatcagacacctgttcgcccctctgaaggagtacttcgcctgcgtgagcagcggcaacagcaacgccaacagccggggccccagcttctctagcggcctggtgccactgtccctgagagggagccacatgggccccatggagatctacaaaaccgtgagcgcctggaagcggcagcctgtgcgcgtgctgagcctgtttcggaatatcgataaagtcctgaaaagcctgggattcctggagagcggctctggctccggcggtggcaccctgaagtacgtggaggatgtgacaaacgtggtcagacgggatgtggagaagtggggccccttcgatctggtgtacggcagcacccaacccctgggcagctcttgtgaccggtgccctggctggtacatgtttcagttccaccggatcctgcagtacgccctgccgagacaggagtcccagcggccattcttttggattttcatggacaacttgctgctgaccgaggatgaccaggaaactaccactcggttcctgcagaccgaagccgtgaccctgcaggacgtgagaggccgggactaccagaacgccatgcgggtgtggtccaacatccctggactgaaaagcaagcacgcacctctgacccctaaagaagaggagtacctgcaggcccaggtgcggagcagaagcaagctggacgcccctaaggtggatctgctggtgaagaattgcctcctgcccctgagagagtacttcaagtatttcagccagaatagtctgcccctgggcggcccaagcagcggcgcccctcctcccagcggcggcagcccagccggctccccaacctctaccgaggagggcacctctgagtccgccacccccgagagcggccctggcacctccaccgagcccagcgagggcagcgcacccggcagccctgccggcagccccacctccacagaggagggaaccagcaccgagcccagcgaaggcagcgccccaggcaccagcaccgagcctagtgagggcggctctggcggcggcagcgcccaggagattaaacggatcaacaagatcagaagaagacttgtgaaagacagcaacaccaagaaggccggcaagacaggccccatgaaaaccctgctggttagagtgatgacacccgatctgagagagcggctggaaaacctgagaaagaagcctgaaaatatcccccagcccatcagcaatacatctagagccaacctgaataagctgctgaccgattacaccgaaatgaagaaggcgatcctgcatgtgtactgggaagagttccagaaggaccctgtgggcctgatgagccgggtggcccagcctgccagcaagaagatcgatcagaacaagctgaaacctgagatggacgagaagggcaacctgaccaccgccggctttgcctgctctcagtgtggccagcccctgttcgtgtacaagctggagcaggtgtctgagaagggcaaggcttacaccaactacttcggacggtgcaatgtggccgagcacgaaaagctgatcctgctggcccagctgaagcccgagaaggatagcgacgaagccgtgacatatagcctgggaaagtttgggcagagggccctggatttctacagcattcatgtgaccaaggagtccacccaccccgtgaagcccctggcccagatcgccggaaacagatacgcctccggacctgtgggaaaggccctgagcgacgcatgtatgggcacaatcgcctccttcctgtctaagtaccaggacatcatcatcgaacaccagaaggtggtgaagggcaaccagaagagactggagagcctgcgggagctggccggcaaggaaaacctggaataccctagcgtgaccctgccacctcagcctcacaccaaggagggcgttgatgcctacaacgaagtgatcgcccgggtgcgaatgtgggtgaacctgaacctgtggcagaagctgaagctaagcagagatgatgccaagcctctgctgagactgaagggattcccttcctttcctctggtcgagagacaggccaacgaagtggactggtgggacatggtgtgtaacgtgaagaagctgatcaacgagaaaaaggaggatggcaaggtgttttggcagaatctggctggctacaagagacaggaagccctgagaccatacctgagcagcgaggaagatcggaagaagggaaagaaattcgctcggtaccagctgggcgacctgctgctgcacctggaaaagaagcacggcgaggactggggaaaggtgtacgacgaggcctgggagcggattgacaagaaagtggaaggcctgagcaagcacatcaagctggaagaggaacggagaagcgaggacgcccagagcaaggccgccctgaccgactggctgcgggctaaggccagcttcgtgatcgagggcctgaaggaggccgacaaggacgagttctgcagatgcgagctgaagctgcagaagtggtacggggacctgcggggaaagcccttcgccatcgaagccgagaacagcatcctggacatcagcggcttcagcaagcagtacaactgtgccttcatctggcagaaggacggcgtgaagaagctgaacctgtacctgatcatcaactacttcaagggcggcaagctgcggttcaagaagatcaaacctgaagccttcgaagccaacagattctacaccgtgatcaacaaaaagagcggcgagatcgtgcccatggaggtgaacttcaacttcgacgaccccaacctgatcatcctgcctctggcctttggcaagagacagggcagagaattcatctggaacgacctgctgtccctggaaaccggcagcctgaagctggccaacggaagagtgatcgagaagacactgtacaacagaagaacccggcaggatgagcctgccctgttcgtggccctgaccttcgagcggcgggaggtcctggactcctccaatatcaaaccaatgaacctgatcggcgtggcaagaggcgaaaacatccccgccgtgatcgccctgaccgaccccgagggctgcccactgagccggtttaaggatagcctgggaaacccaacccacatcctgagaatcggcgagagctataaggagaagcagcggaccatccaggccaagaaggaggtggagcagcggagagccggcggctacagccggaagtacgccagcaaagccaagaatctggcagacgatatggtgagaaacaccgctagagatctgctgtactacgccgtgacccaggatgccatgctgatcttcgccaacctgagccggggcttcggccggcagggcaagcggaccttcatggccgagagacagtacacacggatggaggactggctgaccgccaagctggcctacgagggcctgagcaagacctacctgtccaagacactggcccagtacacctccaagacatgcagcaactgtgggtttaccatcaccagcgccgactacgacagggtgctggagaagctgaagaagacagcaacaggctggatgaccacaattaacggcaaggagctgaaggtggagggccagattacctactacaacagatacaagagacagaacgtagtcaaggacctgtccgtcgagctggatagactgagcgaagaatctgtgaacaacgacatctcctcctggacaaagggcagaagcggagaagctctgagcctcctgaagaaaagattctcccatagacccgtgcaggagaagttcgtgtgcctgaactgcggcttcgagacacacgcagccgagcaagccgccctgaacatcgccagatcctggctgttcctgcggagccaggagtacaagaaataccagacaaacaagacaaccggcaacaccgataagagagccttcgtcgagacctggcagtccttttaccggaagaagcttaaggaggtgtggaaacctgccgtgcggtctggcggatctggcggaggctccacaagccagaccgacctggtgaccttcgacagcgtggccgtggagttcacccaggaggagtggaccctgctggaccccacccagaggaacctgtacagggacgtgatgctggagaactacaagaacctgagcagcgtgggctaccagctgttcaagcccagcctgatcagctggctggaggaggaggaggagctgagcaccctgcccagggtgctgcaggagtggaagatgtgcctgaagaccaagggcaccagccccaagaaaaagagaaaagtctaagctgccttctgcggggcttgccttctggccatgcccttcttctctcccttgcacctgtacctcttggtctttgaataaagcctgagtaggaaggctagcaaaaaaaaaaaaaaaaaaaaaaaaaaaaaaaaaaaaaaaaaaaaaaaaaaaaaaaaaaaaaaaaaaaaaaaaaaaaaaaa

SEQ ID NO: 3605 - RNA, 5419 nt, synthetic construct
  source 1..5419: mol_type = other RNA
aggaaataagagagaaaagaagagtaagaagaaatataagagccaccatggcccctaagaagaagcgtaaagtgagccgggtgaacggcagcggcagcggcggcggcatgaaccacgaccaggagttcgacccccctaaggtgtaccctcccgtccccgccgagaagagaaagcccatccgggtcctgagcctgttcgatggcatcgccaccggtctgctggtgctgaaggacctgggcatccaggtggataggtacattgcctccgaggtgtgcgaggactccatcaccgtgggaatggtgcgtcatcagggcaagatcatgtacgtgggcgacgtgcggagcgtgacacagaagcatatccaggagtggggccctttcgacctggtgatcggcggcagcccttgcaatgacctgagcatcgtgaacccagcccggaagggcctgtacgagggaaccggcagactgttcttcgagttttacagactgctgcacgacgcccggcctaaggaaggcgacgaccggcccttcttttggctgttcgagaatgtggtggccatgggagtcagcgacaagcgggatattagccggttcctggagagcaaccccgtgatgatcgatgccaaggaagtgagcgccgcccaccgggccagatacttctggggcaatctgcctggcatgaacagacccctggccagcaccgtgaacgacaagctggagctgcaggagtgcctggagcacggccggatcgccaagttcagcaaggtgagaaccatcaccacccgaagcaacagcatcaaacaaggcaaggaccagcactttcctgtgttcatgaacgagaaggaggacatcctgtggtgtaccgagatggagagagtgttcgggttcccagtccactacacagatgtcagcaacatgtctagactggccagacagagactgctgggaagaagctggtccgtccctgtgatcagacacctgttcgcccctctgaaggagtacttcgcctgcgtgagcagcggcaacagcaacgccaacagccggggccccagcttctctagcggcctggtgccactgtccctgagagggagccacatgggccccatggagatctacaaaaccgtgagcgcctggaagcggcagcctgtgcgcgtgctgagcctgtttcggaatatcgataaagtcctgaaaagcctgggattcctggagagcggctctggctccggcggtggcaccctgaagtacgtggaggatgtgacaaacgtggtcagacgggatgtggagaagtggggccccttcgatctggtgtacggcagcacccaacccctgggcagctcttgtgaccggtgccctggctggtacatgtttcagttccaccggatcctgcagtacgccctgccgagacaggagtcccagcggccattcttttggattttcatggacaacttgctgctgaccgaggatgaccaggaaactaccactcggttcctgcagaccgaagccgtgaccctgcaggacgtgagaggccgggactaccagaacgccatgcgggtgtggtccaacatccctggactgaaaagcaagcacgcacctctgacccctaaagaagaggagtacctgcaggcccaggtgcggagcagaagcaagctggacgcccctaaggtggatctgctggtgaagaattgcctcctgcccctgagagagtacttcaagtatttcagccagaatagtctgcccctgggcggcccaagcagcggcgcccctcctcccagcggcggcagcccagccggctccccaacctctaccgaggagggcacctctgagtccgccacccccgagagcggccctggcacctccaccgagcccagcgagggcagcgcacccggcagccctgccggcagccccacctccacagaggagggaaccagcaccgagcccagcgaaggcagcgccccaggcaccagcaccgagcctagtgagggcggctctggcggcggcagcgcccaggagattaaacggatcaacaagatcagaagaagacttgtgaaagacagcaacaccaagaaggccggcaagacaggccccatgaaaaccctgctggttagagtgatgacacccgatctgagagagcggctggaaaacctgagaaagaagcctgaaaatatcccccagcccatcagcaatacatctagagccaacctgaataagctgctgaccgattacaccgaaatgaagaaggcgatcctgcatgtgtactgggaagagttccagaaggaccctgtgggcctgatgagccgggtggcccagcctgccagcaagaagatcgatcagaacaagctgaaacctgagatggacgagaagggcaacctgaccaccgccggctttgcctgctctcagtgtggccagcccctgttcgtgtacaagctggagcaggtgtctgagaagggcaaggcttacaccaactacttcggacggtgcaatgtggccgagcacgaaaagctgatcctgctggcccagctgaagcccgagaaggatagcgacgaagccgtgacatatagcctgggaaagtttgggcagagggccctggatttctacagcattcatgtgaccaaggagtccacccaccccgtgaagcccctggcccagatcgccggaaacagatacgcctccggacctgtgggaaaggccctgagcgacgcatgtatgggcacaatcgcctccttcctgtctaagtaccaggacatcatcatcgaacaccagaaggtggtgaagggcaaccagaagagactggagagcctgcgggagctggccggcaaggaaaacctggaataccctagcgtgaccctgccacctcagcctcacaccaaggagggcgttgatgcctacaacgaagtgatcgcccgggtgcgaatgtgggtgaacctgaacctgtggcagaagctgaagctaagcagagatgatgccaagcctctgctgagactgaagggattcccttcctttcctctggtcgagagacaggccaacgaagtggactggtgggacatggtgtgtaacgtgaagaagctgatcaacgagaaaaaggaggatggcaaggtgttttggcagaatctggctggctacaagagacaggaagccctgagaccatacctgagcagcgaggaagatcggaagaagggaaagaaattcgctcggtaccagctgggcgacctgctgctgcacctggaaaagaagcacggcgaggactggggaaaggtgtacgacgaggcctgggagcggattgacaagaaagtggaaggcctgagcaagcacatcaagctggaagaggaacggagaagcgaggacgcccagagcaaggccgccctgaccgactggctgcgggctaaggccagcttcgtgatcgagggcctgaaggaggccgacaaggacgagttctgcagatgcgagctgaagctgcagaagtggtacggggacctgcggggaaagcccttcgccatcgaagccgagaacagcatcctggacatcagcggcttcagcaagcagtacaactgtgccttcatctggcagaaggacggcgtgaagaagctgaacctgtacctgatcatcaactacttcaagggcggcaagctgcggttcaagaagatcaaacctgaagccttcgaagccaacagattctacaccgtgatcaacaaaaagagcggcgagatcgtgcccatggaggtgaacttcaacttcgacgaccccaacctgatcatcctgcctctggcctttggcaagagacagggcagagaattcatctggaacgacctgctgtccctggaaaccggcagcctgaagctggccaacggaagagtgatcgagaagacactgtacaacagaagaacccggcaggatgagcctgccctgttcgtggccctgaccttcgagcggcgggaggtcctggactcctccaatatcaaaccaatgaacctgatcggcgtggcaagaggcgaaaacatccccgccgtgatcgccctgaccgaccccgagggctgcccactgagccggtttaaggatagcctgggaaacccaacccacatcctgagaatcggcgagagctataaggagaagcagcggaccatccaggccaagaaggaggtggagcagcggagagccggcggctacagccggaagtacgccagcaaagccaagaatctggcagacgatatggtgagaaacaccgctagagatctgctgtactacgccgtgacccaggatgccatgctgatcttcgccaacctgagccggggcttcggccggcagggcaagcggaccttcatggccgagagacagtacacacggatggaggactggctgaccgccaagctggcctacgagggcctgagcaagacctacctgtccaagacactggcccagtacacctccaagacatgcagcaactgtgggtttaccatcaccagcgccgactacgacagggtgctggagaagctgaagaagacagcaacaggctggatgaccacaattaacggcaaggagctgaaggtggagggccagattacctactacaacagatacaagagacagaacgtagtcaaggacctgtccgtcgagctggatagactgagcgaagaatctgtgaacaacgacatctcctcctggacaaagggcagaagcggagaagctctgagcctcctgaagaaaagattctcccatagacccgtgcaggagaagttcgtgtgcctgaactgcggcttcgagacacacgcagccgagcaagccgccctgaacatcgccagatcctggctgttcctgcggagccaggagtacaagaaataccagacaaacaagacaaccggcaacaccgataagagagccttcgtcgagacctggcagtccttttaccggaagaagcttaaggaggtgtggaaacctgccgtgcggtctggcggatctggcggaggctccacaagcatggtgaccttcgaggacgtggccgtgcacttcaccaagaccgagtggaccggcctgagccccgcccagagggccctgtacaggagcgtgatgctggagaacttcggcaacctgaccgccctgggctaccccgtgcccaagcccgccctgatcagcctgctggagggcggcgacatggcctggggcctggaggcccaggacgacgcccccgccgagaggaccaagaacatctgcaaggtgatcaccagccccaagaaaaagagaaaagtctaagctgccttctgcggggcttgccttctggccatgcccttcttctctcccttgcacctgtacctcttggtctttgaataaagcctgagtaggaaggctagcaaaaaaaaaaaaaaaaaaaaaaaaaaaaaaaaaaaaaaaaaaaaaaaaaaaaaaaaaaaaaaaaaaaaaaaaaaaaaaaa

SEQ ID NO: 3606 - RNA, 5419 nt, synthetic construct
  source 1..5419: mol_type = other RNA
aggaaataagagagaaaagaagagtaagaagaaatataagagccaccatggcccctaagaagaagcgtaaagtgagccgggtgaacggcagcggcagcggcggcggcatgaaccacgaccaggagttcgacccccctaaggtgtaccctcccgtccccgccgagaagagaaagcccatccgggtcctgagcctgttcgatggcatcgccaccggtctgctggtgctgaaggacctgggcatccaggtggataggtacattgcctccgaggtgtgcgaggactccatcaccgtgggaatggtgcgtcatcagggcaagatcatgtacgtgggcgacgtgcggagcgtgacacagaagcatatccaggagtggggccctttcgacctggtgatcggcggcagcccttgcaatgacctgagcatcgtgaacccagcccggaagggcctgtacgagggaaccggcagactgttcttcgagttttacagactgctgcacgacgcccggcctaaggaaggcgacgaccggcccttcttttggctgttcgagaatgtggtggccatgggagtcagcgacaagcgggatattagccggttcctggagagcaaccccgtgatgatcgatgccaaggaagtgagcgccgcccaccgggccagatacttctggggcaatctgcctggcatgaacagacccctggccagcaccgtgaacgacaagctggagctgcaggagtgcctggagcacggccggatcgccaagttcagcaaggtgagaaccatcaccacccgaagcaacagcatcaaacaaggcaaggaccagcactttcctgtgttcatgaacgagaaggaggacatcctgtggtgtaccgagatggagagagtgttcgggttcccagtccactacacagatgtcagcaacatgtctagactggccagacagagactgctgggaagaagctggtccgtccctgtgatcagacacctgttcgcccctctgaaggagtacttcgcctgcgtgagcagcggcaacagcaacgccaacagccggggccccagcttctctagcggcctggtgccactgtccctgagagggagccacatgggccccatggagatctacaaaaccgtgagcgcctggaagcggcagcctgtgcgcgtgctgagcctgtttcggaatatcgataaagtcctgaaaagcctgggattcctggagagcggctctggctccggcggtggcaccctgaagtacgtggaggatgtgacaaacgtggtcagacgggatgtggagaagtggggccccttcgatctggtgtacggcagcacccaacccctgggcagctcttgtgaccggtgccctggctggtacatgtttcagttccaccggatcctgcagtacgccctgccgagacaggagtcccagcggccattcttttggattttcatggacaacttgctgctgaccgaggatgaccaggaaactaccactcggttcctgcagaccgaagccgtgaccctgcaggacgtgagaggccgggactaccagaacgccatgcgggtgtggtccaacatccctggactgaaaagcaagcacgcacctctgacccctaaagaagaggagtacctgcaggcccaggtgcggagcagaagcaagctggacgcccctaaggtggatctgctggtgaagaattgcctcctgcccctgagagagtacttcaagtatttcagccagaatagtctgcccctgggcggcccaagcagcggcgcccctcctcccagcggcggcagcccagccggctccccaacctctaccgaggagggcacctctgagtccgccacccccgagagcggccctggcacctccaccgagcccagcgagggcagcgcacccggcagccctgccggcagccccacctccacagaggagggaaccagcaccgagcccagcgaaggcagcgccccaggcaccagcaccgagcctagtgagggcggctctggcggcggcagcgcccaggagattaaacggatcaacaagatcagaagaagacttgtgaaagacagcaacaccaagaaggccggcaagacaggccccatgaaaaccctgctggttagagtgatgacacccgatctgagagagcggctggaaaacctgagaaagaagcctgaaaatatcccccagcccatcagcaatacatctagagccaacctgaataagctgctgaccgattacaccgaaatgaagaaggcgatcctgcatgtgtactgggaagagttccagaaggaccctgtgggcctgatgagccgggtggcccagcctgccagcaagaagatcgatcagaacaagctgaaacctgagatggacgagaagggcaacctgaccaccgccggctttgcctgctctcagtgtggccagcccctgttcgtgtacaagctggagcaggtgtctgagaagggcaaggcttacaccaactacttcggacggtgcaatgtggccgagcacgaaaagctgatcctgctggcccagctgaagcccgagaaggatagcgacgaagccgtgacatatagcctgggaaagtttgggcagagggccctggatttctacagcattcatgtgaccaaggagtccacccaccccgtgaagcccctggcccagatcgccggaaacagatacgcctccggacctgtgggaaaggccctgagcgacgcatgtatgggcacaatcgcctccttcctgtctaagtaccaggacatcatcatcgaacaccagaaggtggtgaagggcaaccagaagagactggagagcctgcgggagctggccggcaaggaaaacctggaataccctagcgtgaccctgccacctcagcctcacaccaaggagggcgttgatgcctacaacgaagtgatcgcccgggtgcgaatgtgggtgaacctgaacctgtggcagaagctgaagctaagcagagatgatgccaagcctctgctgagactgaagggattcccttcctttcctctggtcgagagacaggccaacgaagtggactggtgggacatggtgtgtaacgtgaagaagctgatcaacgagaaaaaggaggatggcaaggtgttttggcagaatctggctggctacaagagacaggaagccctgagaccatacctgagcagcgaggaagatcggaagaagggaaagaaattcgctcggtaccagctgggcgacctgctgctgcacctggaaaagaagcacggcgaggactggggaaaggtgtacgacgaggcctgggagcggattgacaagaaagtggaaggcctgagcaagcacatcaagctggaagaggaacggagaagcgaggacgcccagagcaaggccgccctgaccgactggctgcgggctaaggccagcttcgtgatcgagggcctgaaggaggccgacaaggacgagttctgcagatgcgagctgaagctgcagaagtggtacggggacctgcggggaaagcccttcgccatcgaagccgagaacagcatcctggacatcagcggcttcagcaagcagtacaactgtgccttcatctggcagaaggacggcgtgaagaagctgaacctgtacctgatcatcaactacttcaagggcggcaagctgcggttcaagaagatcaaacctgaagccttcgaagccaacagattctacaccgtgatcaacaaaaagagcggcgagatcgtgcccatggaggtgaacttcaacttcgacgaccccaacctgatcatcctgcctctggcctttggcaagagacagggcagagaattcatctggaacgacctgctgtccctggaaaccggcagcctgaagctggccaacggaagagtgatcgagaagacactgtacaacagaagaacccggcaggatgagcctgccctgttcgtggccctgaccttcgagcggcgggaggtcctggactcctccaatatcaaaccaatgaacctgatcggcgtggcaagaggcgaaaacatccccgccgtgatcgccctgaccgaccccgagggctgcccactgagccggtttaaggatagcctgggaaacccaacccacatcctgagaatcggcgagagctataaggagaagcagcggaccatccaggccaagaaggaggtggagcagcggagagccggcggctacagccggaagtacgccagcaaagccaagaatctggcagacgatatggtgagaaacaccgctagagatctgctgtactacgccgtgacccaggatgccatgctgatcttcgccaacctgagccggggcttcggccggcagggcaagcggaccttcatggccgagagacagtacacacggatggaggactggctgaccgccaagctggcctacgagggcctgagcaagacctacctgtccaagacactggcccagtacacctccaagacatgcagcaactgtgggtttaccatcaccagcgccgactacgacagggtgctggagaagctgaagaagacagcaacaggctggatgaccacaattaacggcaaggagctgaaggtggagggccagattacctactacaacagatacaagagacagaacgtagtcaaggacctgtccgtcgagctggatagactgagcgaagaatctgtgaacaacgacatctcctcctggacaaagggcagaagcggagaagctctgagcctcctgaagaaaagattctcccatagacccgtgcaggagaagttcgtgtgcctgaactgcggcttcgagacacacgcagccgagcaagccgccctgaacatcgccagatcctggctgttcctgcggagccaggagtacaagaaataccagacaaacaagacaaccggcaacaccgataagagagccttcgtcgagacctggcagtccttttaccggaagaagcttaaggaggtgtggaaacctgccgtgcggtctggcggatctggcggaggctccacaagcagccaggtgagcgtgaccttcgaggacgtggccgtgctgttcaccagggacgagtggaggaagctggcccccagccagaggaacctgtaccaggacgtgatgctggagaactacagcaacctggtgagcctgggcctgcccttcagcaagcccgaggtgatcagcctgctgcagcagggcgaggacccctggaaggtggagaaggagagccccggcggcagcagcctgggcgagtggagcagcaccagccccaagaaaaagagaaaagtctaagctgccttctgcggggcttgccttctggccatgcccttcttctctcccttgcacctgtacctcttggtctttgaataaagcctgagtaggaaggctagcaaaaaaaaaaaaaaaaaaaaaaaaaaaaaaaaaaaaaaaaaaaaaaaaaaaaaaaaaaaaaaaaaaaaaaaaaaaaaaaa

SEQ ID NO: 3607 - RNA, 5419 nt, synthetic construct
  source 1..5419: mol_type = other RNA
aggaaataagagagaaaagaagagtaagaagaaatataagagccaccatggcccctaagaagaagcgtaaagtgagccgggtgaacggcagcggcagcggcggcggcatgaaccacgaccaggagttcgacccccctaaggtgtaccctcccgtccccgccgagaagagaaagcccatccgggtcctgagcctgttcgatggcatcgccaccggtctgctggtgctgaaggacctgggcatccaggtggataggtacattgcctccgaggtgtgcgaggactccatcaccgtgggaatggtgcgtcatcagggcaagatcatgtacgtgggcgacgtgcggagcgtgacacagaagcatatccaggagtggggccctttcgacctggtgatcggcggcagcccttgcaatgacctgagcatcgtgaacccagcccggaagggcctgtacgagggaaccggcagactgttcttcgagttttacagactgctgcacgacgcccggcctaaggaaggcgacgaccggcccttcttttggctgttcgagaatgtggtggccatgggagtcagcgacaagcgggatattagccggttcctggagagcaaccccgtgatgatcgatgccaaggaagtgagcgccgcccaccgggccagatacttctggggcaatctgcctggcatgaacagacccctggccagcaccgtgaacgacaagctggagctgcaggagtgcctggagcacggccggatcgccaagttcagcaaggtgagaaccatcaccacccgaagcaacagcatcaaacaaggcaaggaccagcactttcctgtgttcatgaacgagaaggaggacatcctgtggtgtaccgagatggagagagtgttcgggttcccagtccactacacagatgtcagcaacatgtctagactggccagacagagactgctgggaagaagctggtccgtccctgtgatcagacacctgttcgcccctctgaaggagtacttcgcctgcgtgagcagcggcaacagcaacgccaacagccggggccccagcttctctagcggcctggtgccactgtccctgagagggagccacatgggccccatggagatctacaaaaccgtgagcgcctggaagcggcagcctgtgcgcgtgctgagcctgtttcggaatatcgataaagtcctgaaaagcctgggattcctggagagcggctctggctccggcggtggcaccctgaagtacgtggaggatgtgacaaacgtggtcagacgggatgtggagaagtggggccccttcgatctggtgtacggcagcacccaacccctgggcagctcttgtgaccggtgccctggctggtacatgtttcagttccaccggatcctgcagtacgccctgccgagacaggagtcccagcggccattcttttggattttcatggacaacttgctgctgaccgaggatgaccaggaaactaccactcggttcctgcagaccgaagccgtgaccctgcaggacgtgagaggccgggactaccagaacgccatgcgggtgtggtccaacatccctggactgaaaagcaagcacgcacctctgacccctaaagaagaggagtacctgcaggcccaggtgcggagcagaagcaagctggacgcccctaaggtggatctgctggtgaagaattgcctcctgcccctgagagagtacttcaagtatttcagccagaatagtctgcccctgggcggcccaagcagcggcgcccctcctcccagcggcggcagcccagccggctccccaacctctaccgaggagggcacctctgagtccgccacccccgagagcggccctggcacctccaccgagcccagcgagggcagcgcacccggcagccctgccggcagccccacctccacagaggagggaaccagcaccgagcccagcgaaggcagcgccccaggcaccagcaccgagcctagtgagggcggctctggcggcggcagcgcccaggagattaaacggatcaacaagatcagaagaagacttgtgaaagacagcaacaccaagaaggccggcaagacaggccccatgaaaaccctgctggttagagtgatgacacccgatctgagagagcggctggaaaacctgagaaagaagcctgaaaatatcccccagcccatcagcaatacatctagagccaacctgaataagctgctgaccgattacaccgaaatgaagaaggcgatcctgcatgtgtactgggaagagttccagaaggaccctgtgggcctgatgagccgggtggcccagcctgccagcaagaagatcgatcagaacaagctgaaacctgagatggacgagaagggcaacctgaccaccgccggctttgcctgctctcagtgtggccagcccctgttcgtgtacaagctggagcaggtgtctgagaagggcaaggcttacaccaactacttcggacggtgcaatgtggccgagcacgaaaagctgatcctgctggcccagctgaagcccgagaaggatagcgacgaagccgtgacatatagcctgggaaagtttgggcagagggccctggatttctacagcattcatgtgaccaaggagtccacccaccccgtgaagcccctggcccagatcgccggaaacagatacgcctccggacctgtgggaaaggccctgagcgacgcatgtatgggcacaatcgcctccttcctgtctaagtaccaggacatcatcatcgaacaccagaaggtggtgaagggcaaccagaagagactggagagcctgcgggagctggccggcaaggaaaacctggaataccctagcgtgaccctgccacctcagcctcacaccaaggagggcgttgatgcctacaacgaagtgatcgcccgggtgcgaatgtgggtgaacctgaacctgtggcagaagctgaagctaagcagagatgatgccaagcctctgctgagactgaagggattcccttcctttcctctggtcgagagacaggccaacgaagtggactggtgggacatggtgtgtaacgtgaagaagctgatcaacgagaaaaaggaggatggcaaggtgttttggcagaatctggctggctacaagagacaggaagccctgagaccatacctgagcagcgaggaagatcggaagaagggaaagaaattcgctcggtaccagctgggcgacctgctgctgcacctggaaaagaagcacggcgaggactggggaaaggtgtacgacgaggcctgggagcggattgacaagaaagtggaaggcctgagcaagcacatcaagctggaagaggaacggagaagcgaggacgcccagagcaaggccgccctgaccgactggctgcgggctaaggccagcttcgtgatcgagggcctgaaggaggccgacaaggacgagttctgcagatgcgagctgaagctgcagaagtggtacggggacctgcggggaaagcccttcgccatcgaagccgagaacagcatcctggacatcagcggcttcagcaagcagtacaactgtgccttcatctggcagaaggacggcgtgaagaagctgaacctgtacctgatcatcaactacttcaagggcggcaagctgcggttcaagaagatcaaacctgaagccttcgaagccaacagattctacaccgtgatcaacaaaaagagcggcgagatcgtgcccatggaggtgaacttcaacttcgacgaccccaacctgatcatcctgcctctggcctttggcaagagacagggcagagaattcatctggaacgacctgctgtccctggaaaccggcagcctgaagctggccaacggaagagtgatcgagaagacactgtacaacagaagaacccggcaggatgagcctgccctgttcgtggccctgaccttcgagcggcgggaggtcctggactcctccaatatcaaaccaatgaacctgatcggcgtggcaagaggcgaaaacatccccgccgtgatcgccctgaccgaccccgagggctgcccactgagccggtttaaggatagcctgggaaacccaacccacatcctgagaatcggcgagagctataaggagaagcagcggaccatccaggccaagaaggaggtggagcagcggagagccggcggctacagccggaagtacgccagcaaagccaagaatctggcagacgatatggtgagaaacaccgctagagatctgctgtactacgccgtgacccaggatgccatgctgatcttcgccaacctgagccggggcttcggccggcagggcaagcggaccttcatggccgagagacagtacacacggatggaggactggctgaccgccaagctggcctacgagggcctgagcaagacctacctgtccaagacactggcccagtacacctccaagacatgcagcaactgtgggtttaccatcaccagcgccgactacgacagggtgctggagaagctgaagaagacagcaacaggctggatgaccacaattaacggcaaggagctgaaggtggagggccagattacctactacaacagatacaagagacagaacgtagtcaaggacctgtccgtcgagctggatagactgagcgaagaatctgtgaacaacgacatctcctcctggacaaagggcagaagcggagaagctctgagcctcctgaagaaaagattctcccatagacccgtgcaggagaagttcgtgtgcctgaactgcggcttcgagacacacgcagccgagcaagccgccctgaacatcgccagatcctggctgttcctgcggagccaggagtacaagaaataccagacaaacaagacaaccggcaacaccgataagagagccttcgtcgagacctggcagtccttttaccggaagaagcttaaggaggtgtggaaacctgccgtgcggtctggcggatctggcggaggctccacaagcaggcaggagagggtgaccttcggcgacgtggccgtggacttcaccctggacgagtgggtgtgcctggacagcgcccagaaggccctgtacagggacgtgatgctggagaactacggccacctggtgtgcctgggcctggccggcgccaagcccgccgtgatccagaggctggagaggggcgaggccgcctggtgccccggcgtgcccggcagcaggctgcccgactgggagaccaggctggagaccagccccaagaaaaagagaaaagtctaagctgccttctgcggggcttgccttctggccatgcccttcttctctcccttgcacctgtacctcttggtctttgaataaagcctgagtaggaaggctagcaaaaaaaaaaaaaaaaaaaaaaaaaaaaaaaaaaaaaaaaaaaaaaaaaaaaaaaaaaaaaaaaaaaaaaaaaaaaaaaa

SEQ ID NO: 3608 - RNA, 5419 nt, synthetic construct
  source 1..5419: mol_type = other RNA
aggaaataagagagaaaagaagagtaagaagaaatataagagccaccatggcccctaagaagaagcgtaaagtgagccgggtgaacggcagcggcagcggcggcggcatgaaccacgaccaggagttcgacccccctaaggtgtaccctcccgtccccgccgagaagagaaagcccatccgggtcctgagcctgttcgatggcatcgccaccggtctgctggtgctgaaggacctgggcatccaggtggataggtacattgcctccgaggtgtgcgaggactccatcaccgtgggaatggtgcgtcatcagggcaagatcatgtacgtgggcgacgtgcggagcgtgacacagaagcatatccaggagtggggccctttcgacctggtgatcggcggcagcccttgcaatgacctgagcatcgtgaacccagcccggaagggcctgtacgagggaaccggcagactgttcttcgagttttacagactgctgcacgacgcccggcctaaggaaggcgacgaccggcccttcttttggctgttcgagaatgtggtggccatgggagtcagcgacaagcgggatattagccggttcctggagagcaaccccgtgatgatcgatgccaaggaagtgagcgccgcccaccgggccagatacttctggggcaatctgcctggcatgaacagacccctggccagcaccgtgaacgacaagctggagctgcaggagtgcctggagcacggccggatcgccaagttcagcaaggtgagaaccatcaccacccgaagcaacagcatcaaacaaggcaaggaccagcactttcctgtgttcatgaacgagaaggaggacatcctgtggtgtaccgagatggagagagtgttcgggttcccagtccactacacagatgtcagcaacatgtctagactggccagacagagactgctgggaagaagctggtccgtccctgtgatcagacacctgttcgcccctctgaaggagtacttcgcctgcgtgagcagcggcaacagcaacgccaacagccggggccccagcttctctagcggcctggtgccactgtccctgagagggagccacatgggccccatggagatctacaaaaccgtgagcgcctggaagcggcagcctgtgcgcgtgctgagcctgtttcggaatatcgataaagtcctgaaaagcctgggattcctggagagcggctctggctccggcggtggcaccctgaagtacgtggaggatgtgacaaacgtggtcagacgggatgtggagaagtggggccccttcgatctggtgtacggcagcacccaacccctgggcagctcttgtgaccggtgccctggctggtacatgtttcagttccaccggatcctgcagtacgccctgccgagacaggagtcccagcggccattcttttggattttcatggacaacttgctgctgaccgaggatgaccaggaaactaccactcggttcctgcagaccgaagccgtgaccctgcaggacgtgagaggccgggactaccagaacgccatgcgggtgtggtccaacatccctggactgaaaagcaagcacgcacctctgacccctaaagaagaggagtacctgcaggcccaggtgcggagcagaagcaagctggacgcccctaaggtggatctgctggtgaagaattgcctcctgcccctgagagagtacttcaagtatttcagccagaatagtctgcccctgggcggcccaagcagcggcgcccctcctcccagcggcggcagcccagccggctccccaacctctaccgaggagggcacctctgagtccgccacccccgagagcggccctggcacctccaccgagcccagcgagggcagcgcacccggcagccctgccggcagccccacctccacagaggagggaaccagcaccgagcccagcgaaggcagcgccccaggcaccagcaccgagcctagtgagggcggctctggcggcggcagcgcccaggagattaaacggatcaacaagatcagaagaagacttgtgaaagacagcaacaccaagaaggccggcaagacaggccccatgaaaaccctgctggttagagtgatgacacccgatctgagagagcggctggaaaacctgagaaagaagcctgaaaatatcccccagcccatcagcaatacatctagagccaacctgaataagctgctgaccgattacaccgaaatgaagaaggcgatcctgcatgtgtactgggaagagttccagaaggaccctgtgggcctgatgagccgggtggcccagcctgccagcaagaagatcgatcagaacaagctgaaacctgagatggacgagaagggcaacctgaccaccgccggctttgcctgctctcagtgtggccagcccctgttcgtgtacaagctggagcaggtgtctgagaagggcaaggcttacaccaactacttcggacggtgcaatgtggccgagcacgaaaagctgatcctgctggcccagctgaagcccgagaaggatagcgacgaagccgtgacatatagcctgggaaagtttgggcagagggccctggatttctacagcattcatgtgaccaaggagtccacccaccccgtgaagcccctggcccagatcgccggaaacagatacgcctccggacctgtgggaaaggccctgagcgacgcatgtatgggcacaatcgcctccttcctgtctaagtaccaggacatcatcatcgaacaccagaaggtggtgaagggcaaccagaagagactggagagcctgcgggagctggccggcaaggaaaacctggaataccctagcgtgaccctgccacctcagcctcacaccaaggagggcgttgatgcctacaacgaagtgatcgcccgggtgcgaatgtgggtgaacctgaacctgtggcagaagctgaagctaagcagagatgatgccaagcctctgctgagactgaagggattcccttcctttcctctggtcgagagacaggccaacgaagtggactggtgggacatggtgtgtaacgtgaagaagctgatcaacgagaaaaaggaggatggcaaggtgttttggcagaatctggctggctacaagagacaggaagccctgagaccatacctgagcagcgaggaagatcggaagaagggaaagaaattcgctcggtaccagctgggcgacctgctgctgcacctggaaaagaagcacggcgaggactggggaaaggtgtacgacgaggcctgggagcggattgacaagaaagtggaaggcctgagcaagcacatcaagctggaagaggaacggagaagcgaggacgcccagagcaaggccgccctgaccgactggctgcgggctaaggccagcttcgtgatcgagggcctgaaggaggccgacaaggacgagttctgcagatgcgagctgaagctgcagaagtggtacggggacctgcggggaaagcccttcgccatcgaagccgagaacagcatcctggacatcagcggcttcagcaagcagtacaactgtgccttcatctggcagaaggacggcgtgaagaagctgaacctgtacctgatcatcaactacttcaagggcggcaagctgcggttcaagaagatcaaacctgaagccttcgaagccaacagattctacaccgtgatcaacaaaaagagcggcgagatcgtgcccatggaggtgaacttcaacttcgacgaccccaacctgatcatcctgcctctggcctttggcaagagacagggcagagaattcatctggaacgacctgctgtccctggaaaccggcagcctgaagctggccaacggaagagtgatcgagaagacactgtacaacagaagaacccggcaggatgagcctgccctgttcgtggccctgaccttcgagcggcgggaggtcctggactcctccaatatcaaaccaatgaacctgatcggcgtggcaagaggcgaaaacatccccgccgtgatcgccctgaccgaccccgagggctgcccactgagccggtttaaggatagcctgggaaacccaacccacatcctgagaatcggcgagagctataaggagaagcagcggaccatccaggccaagaaggaggtggagcagcggagagccggcggctacagccggaagtacgccagcaaagccaagaatctggcagacgatatggtgagaaacaccgctagagatctgctgtactacgccgtgacccaggatgccatgctgatcttcgccaacctgagccggggcttcggccggcagggcaagcggaccttcatggccgagagacagtacacacggatggaggactggctgaccgccaagctggcctacgagggcctgagcaagacctacctgtccaagacactggcccagtacacctccaagacatgcagcaactgtgggtttaccatcaccagcgccgactacgacagggtgctggagaagctgaagaagacagcaacaggctggatgaccacaattaacggcaaggagctgaaggtggagggccagattacctactacaacagatacaagagacagaacgtagtcaaggacctgtccgtcgagctggatagactgagcgaagaatctgtgaacaacgacatctcctcctggacaaagggcagaagcggagaagctctgagcctcctgaagaaaagattctcccatagacccgtgcaggagaagttcgtgtgcctgaactgcggcttcgagacacacgcagccgagcaagccgccctgaacatcgccagatcctggctgttcctgcggagccaggagtacaagaaataccagacaaacaagacaaccggcaacaccgataagagagccttcgtcgagacctggcagtccttttaccggaagaagcttaaggaggtgtggaaacctgccgtgcggtctggcggatctggcggaggctccacaagcagcgccgccagcgtgaccttcagggacgtggccgtggacttcagcagggaggagtggagcaggctggacgccgcccagagggccctgtacagggacgtgatgtgggagacctacgagaacctggtgagcaccggcatccccgtgagcaggctggacgtgatcagcctgctggccaagcaggaggcccagtggacccccgaggaggtgcccggctggaccagccccgacagcttcagcgaggagaccagccccaagaaaaagagaaaagtctaagctgccttctgcggggcttgccttctggccatgcccttcttctctcccttgcacctgtacctcttggtctttgaataaagcctgagtaggaaggctagcaaaaaaaaaaaaaaaaaaaaaaaaaaaaaaaaaaaaaaaaaaaaaaaaaaaaaaaaaaaaaaaaaaaaaaaaaaaaaaaa

SEQ ID NO: 3609 - RNA, 5419 nt, synthetic construct
  source 1..5419: mol_type = other RNA
aggaaataagagagaaaagaagagtaagaagaaatataagagccaccatggcccctaagaagaagcgtaaagtgagccgggtgaacggcagcggcagcggcggcggcatgaaccacgaccaggagttcgacccccctaaggtgtaccctcccgtccccgccgagaagagaaagcccatccgggtcctgagcctgttcgatggcatcgccaccggtctgctggtgctgaaggacctgggcatccaggtggataggtacattgcctccgaggtgtgcgaggactccatcaccgtgggaatggtgcgtcatcagggcaagatcatgtacgtgggcgacgtgcggagcgtgacacagaagcatatccaggagtggggccctttcgacctggtgatcggcggcagcccttgcaatgacctgagcatcgtgaacccagcccggaagggcctgtacgagggaaccggcagactgttcttcgagttttacagactgctgcacgacgcccggcctaaggaaggcgacgaccggcccttcttttggctgttcgagaatgtggtggccatgggagtcagcgacaagcgggatattagccggttcctggagagcaaccccgtgatgatcgatgccaaggaagtgagcgccgcccaccgggccagatacttctggggcaatctgcctggcatgaacagacccctggccagcaccgtgaacgacaagctggagctgcaggagtgcctggagcacggccggatcgccaagttcagcaaggtgagaaccatcaccacccgaagcaacagcatcaaacaaggcaaggaccagcactttcctgtgttcatgaacgagaaggaggacatcctgtggtgtaccgagatggagagagtgttcgggttcccagtccactacacagatgtcagcaacatgtctagactggccagacagagactgctgggaagaagctggtccgtccctgtgatcagacacctgttcgcccctctgaaggagtacttcgcctgcgtgagcagcggcaacagcaacgccaacagccggggccccagcttctctagcggcctggtgccactgtccctgagagggagccacatgggccccatggagatctacaaaaccgtgagcgcctggaagcggcagcctgtgcgcgtgctgagcctgtttcggaatatcgataaagtcctgaaaagcctgggattcctggagagcggctctggctccggcggtggcaccctgaagtacgtggaggatgtgacaaacgtggtcagacgggatgtggagaagtggggccccttcgatctggtgtacggcagcacccaacccctgggcagctcttgtgaccggtgccctggctggtacatgtttcagttccaccggatcctgcagtacgccctgccgagacaggagtcccagcggccattcttttggattttcatggacaacttgctgctgaccgaggatgaccaggaaactaccactcggttcctgcagaccgaagccgtgaccctgcaggacgtgagaggccgggactaccagaacgccatgcgggtgtggtccaacatccctggactgaaaagcaagcacgcacctctgacccctaaagaagaggagtacctgcaggcccaggtgcggagcagaagcaagctggacgcccctaaggtggatctgctggtgaagaattgcctcctgcccctgagagagtacttcaagtatttcagccagaatagtctgcccctgggcggcccaagcagcggcgcccctcctcccagcggcggcagcccagccggctccccaacctctaccgaggagggcacctctgagtccgccacccccgagagcggccctggcacctccaccgagcccagcgagggcagcgcacccggcagccctgccggcagccccacctccacagaggagggaaccagcaccgagcccagcgaaggcagcgccccaggcaccagcaccgagcctagtgagggcggctctggcggcggcagcgcccaggagattaaacggatcaacaagatcagaagaagacttgtgaaagacagcaacaccaagaaggccggcaagacaggccccatgaaaaccctgctggttagagtgatgacacccgatctgagagagcggctggaaaacctgagaaagaagcctgaaaatatcccccagcccatcagcaatacatctagagccaacctgaataagctgctgaccgattacaccgaaatgaagaaggcgatcctgcatgtgtactgggaagagttccagaaggaccctgtgggcctgatgagccgggtggcccagcctgccagcaagaagatcgatcagaacaagctgaaacctgagatggacgagaagggcaacctgaccaccgccggctttgcctgctctcagtgtggccagcccctgttcgtgtacaagctggagcaggtgtctgagaagggcaaggcttacaccaactacttcggacggtgcaatgtggccgagcacgaaaagctgatcctgctggcccagctgaagcccgagaaggatagcgacgaagccgtgacatatagcctgggaaagtttgggcagagggccctggatttctacagcattcatgtgaccaaggagtccacccaccccgtgaagcccctggcccagatcgccggaaacagatacgcctccggacctgtgggaaaggccctgagcgacgcatgtatgggcacaatcgcctccttcctgtctaagtaccaggacatcatcatcgaacaccagaaggtggtgaagggcaaccagaagagactggagagcctgcgggagctggccggcaaggaaaacctggaataccctagcgtgaccctgccacctcagcctcacaccaaggagggcgttgatgcctacaacgaagtgatcgcccgggtgcgaatgtgggtgaacctgaacctgtggcagaagctgaagctaagcagagatgatgccaagcctctgctgagactgaagggattcccttcctttcctctggtcgagagacaggccaacgaagtggactggtgggacatggtgtgtaacgtgaagaagctgatcaacgagaaaaaggaggatggcaaggtgttttggcagaatctggctggctacaagagacaggaagccctgagaccatacctgagcagcgaggaagatcggaagaagggaaagaaattcgctcggtaccagctgggcgacctgctgctgcacctggaaaagaagcacggcgaggactggggaaaggtgtacgacgaggcctgggagcggattgacaagaaagtggaaggcctgagcaagcacatcaagctggaagaggaacggagaagcgaggacgcccagagcaaggccgccctgaccgactggctgcgggctaaggccagcttcgtgatcgagggcctgaaggaggccgacaaggacgagttctgcagatgcgagctgaagctgcagaagtggtacggggacctgcggggaaagcccttcgccatcgaagccgagaacagcatcctggacatcagcggcttcagcaagcagtacaactgtgccttcatctggcagaaggacggcgtgaagaagctgaacctgtacctgatcatcaactacttcaagggcggcaagctgcggttcaagaagatcaaacctgaagccttcgaagccaacagattctacaccgtgatcaacaaaaagagcggcgagatcgtgcccatggaggtgaacttcaacttcgacgaccccaacctgatcatcctgcctctggcctttggcaagagacagggcagagaattcatctggaacgacctgctgtccctggaaaccggcagcctgaagctggccaacggaagagtgatcgagaagacactgtacaacagaagaacccggcaggatgagcctgccctgttcgtggccctgaccttcgagcggcgggaggtcctggactcctccaatatcaaaccaatgaacctgatcggcgtggcaagaggcgaaaacatccccgccgtgatcgccctgaccgaccccgagggctgcccactgagccggtttaaggatagcctgggaaacccaacccacatcctgagaatcggcgagagctataaggagaagcagcggaccatccaggccaagaaggaggtggagcagcggagagccggcggctacagccggaagtacgccagcaaagccaagaatctggcagacgatatggtgagaaacaccgctagagatctgctgtactacgccgtgacccaggatgccatgctgatcttcgccaacctgagccggggcttcggccggcagggcaagcggaccttcatggccgagagacagtacacacggatggaggactggctgaccgccaagctggcctacgagggcctgagcaagacctacctgtccaagacactggcccagtacacctccaagacatgcagcaactgtgggtttaccatcaccagcgccgactacgacagggtgctggagaagctgaagaagacagcaacaggctggatgaccacaattaacggcaaggagctgaaggtggagggccagattacctactacaacagatacaagagacagaacgtagtcaaggacctgtccgtcgagctggatagactgagcgaagaatctgtgaacaacgacatctcctcctggacaaagggcagaagcggagaagctctgagcctcctgaagaaaagattctcccatagacccgtgcaggagaagttcgtgtgcctgaactgcggcttcgagacacacgcagccgagcaagccgccctgaacatcgccagatcctggctgttcctgcggagccaggagtacaagaaataccagacaaacaagacaaccggcaacaccgataagagagccttcgtcgagacctggcagtccttttaccggaagaagcttaaggaggtgtggaaacctgccgtgcggtctggcggatctggcggaggctccacaagcccccaggtgctggtgagcttcgaggacgtggccgtgttcctgagcagggaggagtggggctgcctgggccccgcccagaggggcctgtacagggacgtgatgctggagacctacaggaacctgatcagcctgggcttccaggacagcaagcccgacgtgatcagcaagctggaggagggcgaggagccctgggccccctacagccccaggatcgaggagggctggatccagagccacggcagcaccagccccaagaaaaagagaaaagtctaagctgccttctgcggggcttgccttctggccatgcccttcttctctcccttgcacctgtacctcttggtctttgaataaagcctgagtaggaaggctagcaaaaaaaaaaaaaaaaaaaaaaaaaaaaaaaaaaaaaaaaaaaaaaaaaaaaaaaaaaaaaaaaaaaaaaaaaaaaaaaa

SEQ ID NO: 3610 - RNA, 5419 nt, synthetic construct
  source 1..5419: mol_type = other RNA
aggaaataagagagaaaagaagagtaagaagaaatataagagccaccatggcccctaagaagaagcgtaaagtgagccgggtgaacggcagcggcagcggcggcggcatgaaccacgaccaggagttcgacccccctaaggtgtaccctcccgtccccgccgagaagagaaagcccatccgggtcctgagcctgttcgatggcatcgccaccggtctgctggtgctgaaggacctgggcatccaggtggataggtacattgcctccgaggtgtgcgaggactccatcaccgtgggaatggtgcgtcatcagggcaagatcatgtacgtgggcgacgtgcggagcgtgacacagaagcatatccaggagtggggccctttcgacctggtgatcggcggcagcccttgcaatgacctgagcatcgtgaacccagcccggaagggcctgtacgagggaaccggcagactgttcttcgagttttacagactgctgcacgacgcccggcctaaggaaggcgacgaccggcccttcttttggctgttcgagaatgtggtggccatgggagtcagcgacaagcgggatattagccggttcctggagagcaaccccgtgatgatcgatgccaaggaagtgagcgccgcccaccgggccagatacttctggggcaatctgcctggcatgaacagacccctggccagcaccgtgaacgacaagctggagctgcaggagtgcctggagcacggccggatcgccaagttcagcaaggtgagaaccatcaccacccgaagcaacagcatcaaacaaggcaaggaccagcactttcctgtgttcatgaacgagaaggaggacatcctgtggtgtaccgagatggagagagtgttcgggttcccagtccactacacagatgtcagcaacatgtctagactggccagacagagactgctgggaagaagctggtccgtccctgtgatcagacacctgttcgcccctctgaaggagtacttcgcctgcgtgagcagcggcaacagcaacgccaacagccggggccccagcttctctagcggcctggtgccactgtccctgagagggagccacatgggccccatggagatctacaaaaccgtgagcgcctggaagcggcagcctgtgcgcgtgctgagcctgtttcggaatatcgataaagtcctgaaaagcctgggattcctggagagcggctctggctccggcggtggcaccctgaagtacgtggaggatgtgacaaacgtggtcagacgggatgtggagaagtggggccccttcgatctggtgtacggcagcacccaacccctgggcagctcttgtgaccggtgccctggctggtacatgtttcagttccaccggatcctgcagtacgccctgccgagacaggagtcccagcggccattcttttggattttcatggacaacttgctgctgaccgaggatgaccaggaaactaccactcggttcctgcagaccgaagccgtgaccctgcaggacgtgagaggccgggactaccagaacgccatgcgggtgtggtccaacatccctggactgaaaagcaagcacgcacctctgacccctaaagaagaggagtacctgcaggcccaggtgcggagcagaagcaagctggacgcccctaaggtggatctgctggtgaagaattgcctcctgcccctgagagagtacttcaagtatttcagccagaatagtctgcccctgggcggcccaagcagcggcgcccctcctcccagcggcggcagcccagccggctccccaacctctaccgaggagggcacctctgagtccgccacccccgagagcggccctggcacctccaccgagcccagcgagggcagcgcacccggcagccctgccggcagccccacctccacagaggagggaaccagcaccgagcccagcgaaggcagcgccccaggcaccagcaccgagcctagtgagggcggctctggcggcggcagcgcccaggagattaaacggatcaacaagatcagaagaagacttgtgaaagacagcaacaccaagaaggccggcaagacaggccccatgaaaaccctgctggttagagtgatgacacccgatctgagagagcggctggaaaacctgagaaagaagcctgaaaatatcccccagcccatcagcaatacatctagagccaacctgaataagctgctgaccgattacaccgaaatgaagaaggcgatcctgcatgtgtactgggaagagttccagaaggaccctgtgggcctgatgagccgggtggcccagcctgccagcaagaagatcgatcagaacaagctgaaacctgagatggacgagaagggcaacctgaccaccgccggctttgcctgctctcagtgtggccagcccctgttcgtgtacaagctggagcaggtgtctgagaagggcaaggcttacaccaactacttcggacggtgcaatgtggccgagcacgaaaagctgatcctgctggcccagctgaagcccgagaaggatagcgacgaagccgtgacatatagcctgggaaagtttgggcagagggccctggatttctacagcattcatgtgaccaaggagtccacccaccccgtgaagcccctggcccagatcgccggaaacagatacgcctccggacctgtgggaaaggccctgagcgacgcatgtatgggcacaatcgcctccttcctgtctaagtaccaggacatcatcatcgaacaccagaaggtggtgaagggcaaccagaagagactggagagcctgcgggagctggccggcaaggaaaacctggaataccctagcgtgaccctgccacctcagcctcacaccaaggagggcgttgatgcctacaacgaagtgatcgcccgggtgcgaatgtgggtgaacctgaacctgtggcagaagctgaagctaagcagagatgatgccaagcctctgctgagactgaagggattcccttcctttcctctggtcgagagacaggccaacgaagtggactggtgggacatggtgtgtaacgtgaagaagctgatcaacgagaaaaaggaggatggcaaggtgttttggcagaatctggctggctacaagagacaggaagccctgagaccatacctgagcagcgaggaagatcggaagaagggaaagaaattcgctcggtaccagctgggcgacctgctgctgcacctggaaaagaagcacggcgaggactggggaaaggtgtacgacgaggcctgggagcggattgacaagaaagtggaaggcctgagcaagcacatcaagctggaagaggaacggagaagcgaggacgcccagagcaaggccgccctgaccgactggctgcgggctaaggccagcttcgtgatcgagggcctgaaggaggccgacaaggacgagttctgcagatgcgagctgaagctgcagaagtggtacggggacctgcggggaaagcccttcgccatcgaagccgagaacagcatcctggacatcagcggcttcagcaagcagtacaactgtgccttcatctggcagaaggacggcgtgaagaagctgaacctgtacctgatcatcaactacttcaagggcggcaagctgcggttcaagaagatcaaacctgaagccttcgaagccaacagattctacaccgtgatcaacaaaaagagcggcgagatcgtgcccatggaggtgaacttcaacttcgacgaccccaacctgatcatcctgcctctggcctttggcaagagacagggcagagaattcatctggaacgacctgctgtccctggaaaccggcagcctgaagctggccaacggaagagtgatcgagaagacactgtacaacagaagaacccggcaggatgagcctgccctgttcgtggccctgaccttcgagcggcgggaggtcctggactcctccaatatcaaaccaatgaacctgatcggcgtggcaagaggcgaaaacatccccgccgtgatcgccctgaccgaccccgagggctgcccactgagccggtttaaggatagcctgggaaacccaacccacatcctgagaatcggcgagagctataaggagaagcagcggaccatccaggccaagaaggaggtggagcagcggagagccggcggctacagccggaagtacgccagcaaagccaagaatctggcagacgatatggtgagaaacaccgctagagatctgctgtactacgccgtgacccaggatgccatgctgatcttcgccaacctgagccggggcttcggccggcagggcaagcggaccttcatggccgagagacagtacacacggatggaggactggctgaccgccaagctggcctacgagggcctgagcaagacctacctgtccaagacactggcccagtacacctccaagacatgcagcaactgtgggtttaccatcaccagcgccgactacgacagggtgctggagaagctgaagaagacagcaacaggctggatgaccacaattaacggcaaggagctgaaggtggagggccagattacctactacaacagatacaagagacagaacgtagtcaaggacctgtccgtcgagctggatagactgagcgaagaatctgtgaacaacgacatctcctcctggacaaagggcagaagcggagaagctctgagcctcctgaagaaaagattctcccatagacccgtgcaggagaagttcgtgtgcctgaactgcggcttcgagacacacgcagccgagcaagccgccctgaacatcgccagatcctggctgttcctgcggagccaggagtacaagaaataccagacaaacaagacaaccggcaacaccgataagagagccttcgtcgagacctggcagtccttttaccggaagaagcttaaggaggtgtggaaacctgccgtgcggtctggcggatctggcggaggctccacaagcatgaacggcatgacctacgacgacgtgcacgtgaacttcaccggcgaggagtgggccctgctgagccccagccagaagaggctgtacaaggacgtgatgctggagacctacaggaacctgaccgccatcggctacagctgggaggacaggaacatcgaggagcacttccagaggagcaggaggcacggcaggcacgagaggagccacaccggcgagaaccccagcgtgtacacccagtgcaacaccagccccaagaaaaagagaaaagtctaagctgccttctgcggggcttgccttctggccatgcccttcttctctcccttgcacctgtacctcttggtctttgaataaagcctgagtaggaaggctagcaaaaaaaaaaaaaaaaaaaaaaaaaaaaaaaaaaaaaaaaaaaaaaaaaaaaaaaaaaaaaaaaaaaaaaaaaaaaaaaa

SEQ ID NO: 3611 - RNA, 5419 nt, synthetic construct
  source 1..5419: mol_type = other RNA
aggaaataagagagaaaagaagagtaagaagaaatataagagccaccatggcccctaagaagaagcgtaaagtgagccgggtgaacggcagcggcagcggcggcggcatgaaccacgaccaggagttcgacccccctaaggtgtaccctcccgtccccgccgagaagagaaagcccatccgggtcctgagcctgttcgatggcatcgccaccggtctgctggtgctgaaggacctgggcatccaggtggataggtacattgcctccgaggtgtgcgaggactccatcaccgtgggaatggtgcgtcatcagggcaagatcatgtacgtgggcgacgtgcggagcgtgacacagaagcatatccaggagtggggccctttcgacctggtgatcggcggcagcccttgcaatgacctgagcatcgtgaacccagcccggaagggcctgtacgagggaaccggcagactgttcttcgagttttacagactgctgcacgacgcccggcctaaggaaggcgacgaccggcccttcttttggctgttcgagaatgtggtggccatgggagtcagcgacaagcgggatattagccggttcctggagagcaaccccgtgatgatcgatgccaaggaagtgagcgccgcccaccgggccagatacttctggggcaatctgcctggcatgaacagacccctggccagcaccgtgaacgacaagctggagctgcaggagtgcctggagcacggccggatcgccaagttcagcaaggtgagaaccatcaccacccgaagcaacagcatcaaacaaggcaaggaccagcactttcctgtgttcatgaacgagaaggaggacatcctgtggtgtaccgagatggagagagtgttcgggttcccagtccactacacagatgtcagcaacatgtctagactggccagacagagactgctgggaagaagctggtccgtccctgtgatcagacacctgttcgcccctctgaaggagtacttcgcctgcgtgagcagcggcaacagcaacgccaacagccggggccccagcttctctagcggcctggtgccactgtccctgagagggagccacatgggccccatggagatctacaaaaccgtgagcgcctggaagcggcagcctgtgcgcgtgctgagcctgtttcggaatatcgataaagtcctgaaaagcctgggattcctggagagcggctctggctccggcggtggcaccctgaagtacgtggaggatgtgacaaacgtggtcagacgggatgtggagaagtggggccccttcgatctggtgtacggcagcacccaacccctgggcagctcttgtgaccggtgccctggctggtacatgtttcagttccaccggatcctgcagtacgccctgccgagacaggagtcccagcggccattcttttggattttcatggacaacttgctgctgaccgaggatgaccaggaaactaccactcggttcctgcagaccgaagccgtgaccctgcaggacgtgagaggccgggactaccagaacgccatgcgggtgtggtccaacatccctggactgaaaagcaagcacgcacctctgacccctaaagaagaggagtacctgcaggcccaggtgcggagcagaagcaagctggacgcccctaaggtggatctgctggtgaagaattgcctcctgcccctgagagagtacttcaagtatttcagccagaatagtctgcccctgggcggcccaagcagcggcgcccctcctcccagcggcggcagcccagccggctccccaacctctaccgaggagggcacctctgagtccgccacccccgagagcggccctggcacctccaccgagcccagcgagggcagcgcacccggcagccctgccggcagccccacctccacagaggagggaaccagcaccgagcccagcgaaggcagcgccccaggcaccagcaccgagcctagtgagggcggctctggcggcggcagcgcccaggagattaaacggatcaacaagatcagaagaagacttgtgaaagacagcaacaccaagaaggccggcaagacaggccccatgaaaaccctgctggttagagtgatgacacccgatctgagagagcggctggaaaacctgagaaagaagcctgaaaatatcccccagcccatcagcaatacatctagagccaacctgaataagctgctgaccgattacaccgaaatgaagaaggcgatcctgcatgtgtactgggaagagttccagaaggaccctgtgggcctgatgagccgggtggcccagcctgccagcaagaagatcgatcagaacaagctgaaacctgagatggacgagaagggcaacctgaccaccgccggctttgcctgctctcagtgtggccagcccctgttcgtgtacaagctggagcaggtgtctgagaagggcaaggcttacaccaactacttcggacggtgcaatgtggccgagcacgaaaagctgatcctgctggcccagctgaagcccgagaaggatagcgacgaagccgtgacatatagcctgggaaagtttgggcagagggccctggatttctacagcattcatgtgaccaaggagtccacccaccccgtgaagcccctggcccagatcgccggaaacagatacgcctccggacctgtgggaaaggccctgagcgacgcatgtatgggcacaatcgcctccttcctgtctaagtaccaggacatcatcatcgaacaccagaaggtggtgaagggcaaccagaagagactggagagcctgcgggagctggccggcaaggaaaacctggaataccctagcgtgaccctgccacctcagcctcacaccaaggagggcgttgatgcctacaacgaagtgatcgcccgggtgcgaatgtgggtgaacctgaacctgtggcagaagctgaagctaagcagagatgatgccaagcctctgctgagactgaagggattcccttcctttcctctggtcgagagacaggccaacgaagtggactggtgggacatggtgtgtaacgtgaagaagctgatcaacgagaaaaaggaggatggcaaggtgttttggcagaatctggctggctacaagagacaggaagccctgagaccatacctgagcagcgaggaagatcggaagaagggaaagaaattcgctcggtaccagctgggcgacctgctgctgcacctggaaaagaagcacggcgaggactggggaaaggtgtacgacgaggcctgggagcggattgacaagaaagtggaaggcctgagcaagcacatcaagctggaagaggaacggagaagcgaggacgcccagagcaaggccgccctgaccgactggctgcgggctaaggccagcttcgtgatcgagggcctgaaggaggccgacaaggacgagttctgcagatgcgagctgaagctgcagaagtggtacggggacctgcggggaaagcccttcgccatcgaagccgagaacagcatcctggacatcagcggcttcagcaagcagtacaactgtgccttcatctggcagaaggacggcgtgaagaagctgaacctgtacctgatcatcaactacttcaagggcggcaagctgcggttcaagaagatcaaacctgaagccttcgaagccaacagattctacaccgtgatcaacaaaaagagcggcgagatcgtgcccatggaggtgaacttcaacttcgacgaccccaacctgatcatcctgcctctggcctttggcaagagacagggcagagaattcatctggaacgacctgctgtccctggaaaccggcagcctgaagctggccaacggaagagtgatcgagaagacactgtacaacagaagaacccggcaggatgagcctgccctgttcgtggccctgaccttcgagcggcgggaggtcctggactcctccaatatcaaaccaatgaacctgatcggcgtggcaagaggcgaaaacatccccgccgtgatcgccctgaccgaccccgagggctgcccactgagccggtttaaggatagcctgggaaacccaacccacatcctgagaatcggcgagagctataaggagaagcagcggaccatccaggccaagaaggaggtggagcagcggagagccggcggctacagccggaagtacgccagcaaagccaagaatctggcagacgatatggtgagaaacaccgctagagatctgctgtactacgccgtgacccaggatgccatgctgatcttcgccaacctgagccggggcttcggccggcagggcaagcggaccttcatggccgagagacagtacacacggatggaggactggctgaccgccaagctggcctacgagggcctgagcaagacctacctgtccaagacactggcccagtacacctccaagacatgcagcaactgtgggtttaccatcaccagcgccgactacgacagggtgctggagaagctgaagaagacagcaacaggctggatgaccacaattaacggcaaggagctgaaggtggagggccagattacctactacaacagatacaagagacagaacgtagtcaaggacctgtccgtcgagctggatagactgagcgaagaatctgtgaacaacgacatctcctcctggacaaagggcagaagcggagaagctctgagcctcctgaagaaaagattctcccatagacccgtgcaggagaagttcgtgtgcctgaactgcggcttcgagacacacgcagccgagcaagccgccctgaacatcgccagatcctggctgttcctgcggagccaggagtacaagaaataccagacaaacaagacaaccggcaacaccgataagagagccttcgtcgagacctggcagtccttttaccggaagaagcttaaggaggtgtggaaacctgccgtgcggtctggcggatctggcggaggctccacaagcgcccaggagagcgtgaccttcgaggacgtggccgtgaacttcaccgacagggagtggcagtgcctgacctacgcccagaggcacctgtacaaggacgtgatgctggagaactacggcaacatggtgagcgtgggcttcctgttccccaagccccccctgatcagccacctggagaggggcgtggagccctgcgtgcaggacccccaggacagggagagcctgagctgcagctgcctggtgagcaccagccccaagaaaaagagaaaagtctaagctgccttctgcggggcttgccttctggccatgcccttcttctctcccttgcacctgtacctcttggtctttgaataaagcctgagtaggaaggctagcaaaaaaaaaaaaaaaaaaaaaaaaaaaaaaaaaaaaaaaaaaaaaaaaaaaaaaaaaaaaaaaaaaaaaaaaaaaaaaaa

SEQ ID NO: 3612 - RNA, 5419 nt, synthetic construct
  source 1..5419: mol_type = other RNA
aggaaataagagagaaaagaagagtaagaagaaatataagagccaccatggcccctaagaagaagcgtaaagtgagccgggtgaacggcagcggcagcggcggcggcatgaaccacgaccaggagttcgacccccctaaggtgtaccctcccgtccccgccgagaagagaaagcccatccgggtcctgagcctgttcgatggcatcgccaccggtctgctggtgctgaaggacctgggcatccaggtggataggtacattgcctccgaggtgtgcgaggactccatcaccgtgggaatggtgcgtcatcagggcaagatcatgtacgtgggcgacgtgcggagcgtgacacagaagcatatccaggagtggggccctttcgacctggtgatcggcggcagcccttgcaatgacctgagcatcgtgaacccagcccggaagggcctgtacgagggaaccggcagactgttcttcgagttttacagactgctgcacgacgcccggcctaaggaaggcgacgaccggcccttcttttggctgttcgagaatgtggtggccatgggagtcagcgacaagcgggatattagccggttcctggagagcaaccccgtgatgatcgatgccaaggaagtgagcgccgcccaccgggccagatacttctggggcaatctgcctggcatgaacagacccctggccagcaccgtgaacgacaagctggagctgcaggagtgcctggagcacggccggatcgccaagttcagcaaggtgagaaccatcaccacccgaagcaacagcatcaaacaaggcaaggaccagcactttcctgtgttcatgaacgagaaggaggacatcctgtggtgtaccgagatggagagagtgttcgggttcccagtccactacacagatgtcagcaacatgtctagactggccagacagagactgctgggaagaagctggtccgtccctgtgatcagacacctgttcgcccctctgaaggagtacttcgcctgcgtgagcagcggcaacagcaacgccaacagccggggccccagcttctctagcggcctggtgccactgtccctgagagggagccacatgggccccatggagatctacaaaaccgtgagcgcctggaagcggcagcctgtgcgcgtgctgagcctgtttcggaatatcgataaagtcctgaaaagcctgggattcctggagagcggctctggctccggcggtggcaccctgaagtacgtggaggatgtgacaaacgtggtcagacgggatgtggagaagtggggccccttcgatctggtgtacggcagcacccaacccctgggcagctcttgtgaccggtgccctggctggtacatgtttcagttccaccggatcctgcagtacgccctgccgagacaggagtcccagcggccattcttttggattttcatggacaacttgctgctgaccgaggatgaccaggaaactaccactcggttcctgcagaccgaagccgtgaccctgcaggacgtgagaggccgggactaccagaacgccatgcgggtgtggtccaacatccctggactgaaaagcaagcacgcacctctgacccctaaagaagaggagtacctgcaggcccaggtgcggagcagaagcaagctggacgcccctaaggtggatctgctggtgaagaattgcctcctgcccctgagagagtacttcaagtatttcagccagaatagtctgcccctgggcggcccaagcagcggcgcccctcctcccagcggcggcagcccagccggctccccaacctctaccgaggagggcacctctgagtccgccacccccgagagcggccctggcacctccaccgagcccagcgagggcagcgcacccggcagccctgccggcagccccacctccacagaggagggaaccagcaccgagcccagcgaaggcagcgccccaggcaccagcaccgagcctagtgagggcggctctggcggcggcagcgcccaggagattaaacggatcaacaagatcagaagaagacttgtgaaagacagcaacaccaagaaggccggcaagacaggccccatgaaaaccctgctggttagagtgatgacacccgatctgagagagcggctggaaaacctgagaaagaagcctgaaaatatcccccagcccatcagcaatacatctagagccaacctgaataagctgctgaccgattacaccgaaatgaagaaggcgatcctgcatgtgtactgggaagagttccagaaggaccctgtgggcctgatgagccgggtggcccagcctgccagcaagaagatcgatcagaacaagctgaaacctgagatggacgagaagggcaacctgaccaccgccggctttgcctgctctcagtgtggccagcccctgttcgtgtacaagctggagcaggtgtctgagaagggcaaggcttacaccaactacttcggacggtgcaatgtggccgagcacgaaaagctgatcctgctggcccagctgaagcccgagaaggatagcgacgaagccgtgacatatagcctgggaaagtttgggcagagggccctggatttctacagcattcatgtgaccaaggagtccacccaccccgtgaagcccctggcccagatcgccggaaacagatacgcctccggacctgtgggaaaggccctgagcgacgcatgtatgggcacaatcgcctccttcctgtctaagtaccaggacatcatcatcgaacaccagaaggtggtgaagggcaaccagaagagactggagagcctgcgggagctggccggcaaggaaaacctggaataccctagcgtgaccctgccacctcagcctcacaccaaggagggcgttgatgcctacaacgaagtgatcgcccgggtgcgaatgtgggtgaacctgaacctgtggcagaagctgaagctaagcagagatgatgccaagcctctgctgagactgaagggattcccttcctttcctctggtcgagagacaggccaacgaagtggactggtgggacatggtgtgtaacgtgaagaagctgatcaacgagaaaaaggaggatggcaaggtgttttggcagaatctggctggctacaagagacaggaagccctgagaccatacctgagcagcgaggaagatcggaagaagggaaagaaattcgctcggtaccagctgggcgacctgctgctgcacctggaaaagaagcacggcgaggactggggaaaggtgtacgacgaggcctgggagcggattgacaagaaagtggaaggcctgagcaagcacatcaagctggaagaggaacggagaagcgaggacgcccagagcaaggccgccctgaccgactggctgcgggctaaggccagcttcgtgatcgagggcctgaaggaggccgacaaggacgagttctgcagatgcgagctgaagctgcagaagtggtacggggacctgcggggaaagcccttcgccatcgaagccgagaacagcatcctggacatcagcggcttcagcaagcagtacaactgtgccttcatctggcagaaggacggcgtgaagaagctgaacctgtacctgatcatcaactacttcaagggcggcaagctgcggttcaagaagatcaaacctgaagccttcgaagccaacagattctacaccgtgatcaacaaaaagagcggcgagatcgtgcccatggaggtgaacttcaacttcgacgaccccaacctgatcatcctgcctctggcctttggcaagagacagggcagagaattcatctggaacgacctgctgtccctggaaaccggcagcctgaagctggccaacggaagagtgatcgagaagacactgtacaacagaagaacccggcaggatgagcctgccctgttcgtggccctgaccttcgagcggcgggaggtcctggactcctccaatatcaaaccaatgaacctgatcggcgtggcaagaggcgaaaacatccccgccgtgatcgccctgaccgaccccgagggctgcccactgagccggtttaaggatagcctgggaaacccaacccacatcctgagaatcggcgagagctataaggagaagcagcggaccatccaggccaagaaggaggtggagcagcggagagccggcggctacagccggaagtacgccagcaaagccaagaatctggcagacgatatggtgagaaacaccgctagagatctgctgtactacgccgtgacccaggatgccatgctgatcttcgccaacctgagccggggcttcggccggcagggcaagcggaccttcatggccgagagacagtacacacggatggaggactggctgaccgccaagctggcctacgagggcctgagcaagacctacctgtccaagacactggcccagtacacctccaagacatgcagcaactgtgggtttaccatcaccagcgccgactacgacagggtgctggagaagctgaagaagacagcaacaggctggatgaccacaattaacggcaaggagctgaaggtggagggccagattacctactacaacagatacaagagacagaacgtagtcaaggacctgtccgtcgagctggatagactgagcgaagaatctgtgaacaacgacatctcctcctggacaaagggcagaagcggagaagctctgagcctcctgaagaaaagattctcccatagacccgtgcaggagaagttcgtgtgcctgaactgcggcttcgagacacacgcagccgagcaagccgccctgaacatcgccagatcctggctgttcctgcggagccaggagtacaagaaataccagacaaacaagacaaccggcaacaccgataagagagccttcgtcgagacctggcagtccttttaccggaagaagcttaaggaggtgtggaaacctgccgtgcggtctggcggatctggcggaggctccacaagcagccagagcctggtgaccttcggcgacgtggccatcaacttcagccaggaggagtgggagtggctgaacagcgcccagaggaacctgtacaggagcgtgatgctggagaactacaggaacctggtgagcctgggcctgtgcgtgagcaagcccgacatgatcagcagcctggagcagaggaaggagccctggatggtgaagaggaagctgaccaggggcaggtgccccgacctgaaggccgtgaccagccccaagaaaaagagaaaagtctaagctgccttctgcggggcttgccttctggccatgcccttcttctctcccttgcacctgtacctcttggtctttgaataaagcctgagtaggaaggctagcaaaaaaaaaaaaaaaaaaaaaaaaaaaaaaaaaaaaaaaaaaaaaaaaaaaaaaaaaaaaaaaaaaaaaaaaaaaaaaaa

SEQ ID NO: 3613 - RNA, 5419 nt, synthetic construct
  source 1..5419: mol_type = other RNA
aggaaataagagagaaaagaagagtaagaagaaatataagagccaccatggcccctaagaagaagcgtaaagtgagccgggtgaacggcagcggcagcggcggcggcatgaaccacgaccaggagttcgacccccctaaggtgtaccctcccgtccccgccgagaagagaaagcccatccgggtcctgagcctgttcgatggcatcgccaccggtctgctggtgctgaaggacctgggcatccaggtggataggtacattgcctccgaggtgtgcgaggactccatcaccgtgggaatggtgcgtcatcagggcaagatcatgtacgtgggcgacgtgcggagcgtgacacagaagcatatccaggagtggggccctttcgacctggtgatcggcggcagcccttgcaatgacctgagcatcgtgaacccagcccggaagggcctgtacgagggaaccggcagactgttcttcgagttttacagactgctgcacgacgcccggcctaaggaaggcgacgaccggcccttcttttggctgttcgagaatgtggtggccatgggagtcagcgacaagcgggatattagccggttcctggagagcaaccccgtgatgatcgatgccaaggaagtgagcgccgcccaccgggccagatacttctggggcaatctgcctggcatgaacagacccctggccagcaccgtgaacgacaagctggagctgcaggagtgcctggagcacggccggatcgccaagttcagcaaggtgagaaccatcaccacccgaagcaacagcatcaaacaaggcaaggaccagcactttcctgtgttcatgaacgagaaggaggacatcctgtggtgtaccgagatggagagagtgttcgggttcccagtccactacacagatgtcagcaacatgtctagactggccagacagagactgctgggaagaagctggtccgtccctgtgatcagacacctgttcgcccctctgaaggagtacttcgcctgcgtgagcagcggcaacagcaacgccaacagccggggccccagcttctctagcggcctggtgccactgtccctgagagggagccacatgggccccatggagatctacaaaaccgtgagcgcctggaagcggcagcctgtgcgcgtgctgagcctgtttcggaatatcgataaagtcctgaaaagcctgggattcctggagagcggctctggctccggcggtggcaccctgaagtacgtggaggatgtgacaaacgtggtcagacgggatgtggagaagtggggccccttcgatctggtgtacggcagcacccaacccctgggcagctcttgtgaccggtgccctggctggtacatgtttcagttccaccggatcctgcagtacgccctgccgagacaggagtcccagcggccattcttttggattttcatggacaacttgctgctgaccgaggatgaccaggaaactaccactcggttcctgcagaccgaagccgtgaccctgcaggacgtgagaggccgggactaccagaacgccatgcgggtgtggtccaacatccctggactgaaaagcaagcacgcacctctgacccctaaagaagaggagtacctgcaggcccaggtgcggagcagaagcaagctggacgcccctaaggtggatctgctggtgaagaattgcctcctgcccctgagagagtacttcaagtatttcagccagaatagtctgcccctgggcggcccaagcagcggcgcccctcctcccagcggcggcagcccagccggctccccaacctctaccgaggagggcacctctgagtccgccacccccgagagcggccctggcacctccaccgagcccagcgagggcagcgcacccggcagccctgccggcagccccacctccacagaggagggaaccagcaccgagcccagcgaaggcagcgccccaggcaccagcaccgagcctagtgagggcggctctggcggcggcagcgcccaggagattaaacggatcaacaagatcagaagaagacttgtgaaagacagcaacaccaagaaggccggcaagacaggccccatgaaaaccctgctggttagagtgatgacacccgatctgagagagcggctggaaaacctgagaaagaagcctgaaaatatcccccagcccatcagcaatacatctagagccaacctgaataagctgctgaccgattacaccgaaatgaagaaggcgatcctgcatgtgtactgggaagagttccagaaggaccctgtgggcctgatgagccgggtggcccagcctgccagcaagaagatcgatcagaacaagctgaaacctgagatggacgagaagggcaacctgaccaccgccggctttgcctgctctcagtgtggccagcccctgttcgtgtacaagctggagcaggtgtctgagaagggcaaggcttacaccaactacttcggacggtgcaatgtggccgagcacgaaaagctgatcctgctggcccagctgaagcccgagaaggatagcgacgaagccgtgacatatagcctgggaaagtttgggcagagggccctggatttctacagcattcatgtgaccaaggagtccacccaccccgtgaagcccctggcccagatcgccggaaacagatacgcctccggacctgtgggaaaggccctgagcgacgcatgtatgggcacaatcgcctccttcctgtctaagtaccaggacatcatcatcgaacaccagaaggtggtgaagggcaaccagaagagactggagagcctgcgggagctggccggcaaggaaaacctggaataccctagcgtgaccctgccacctcagcctcacaccaaggagggcgttgatgcctacaacgaagtgatcgcccgggtgcgaatgtgggtgaacctgaacctgtggcagaagctgaagctaagcagagatgatgccaagcctctgctgagactgaagggattcccttcctttcctctggtcgagagacaggccaacgaagtggactggtgggacatggtgtgtaacgtgaagaagctgatcaacgagaaaaaggaggatggcaaggtgttttggcagaatctggctggctacaagagacaggaagccctgagaccatacctgagcagcgaggaagatcggaagaagggaaagaaattcgctcggtaccagctgggcgacctgctgctgcacctggaaaagaagcacggcgaggactggggaaaggtgtacgacgaggcctgggagcggattgacaagaaagtggaaggcctgagcaagcacatcaagctggaagaggaacggagaagcgaggacgcccagagcaaggccgccctgaccgactggctgcgggctaaggccagcttcgtgatcgagggcctgaaggaggccgacaaggacgagttctgcagatgcgagctgaagctgcagaagtggtacggggacctgcggggaaagcccttcgccatcgaagccgagaacagcatcctggacatcagcggcttcagcaagcagtacaactgtgccttcatctggcagaaggacggcgtgaagaagctgaacctgtacctgatcatcaactacttcaagggcggcaagctgcggttcaagaagatcaaacctgaagccttcgaagccaacagattctacaccgtgatcaacaaaaagagcggcgagatcgtgcccatggaggtgaacttcaacttcgacgaccccaacctgatcatcctgcctctggcctttggcaagagacagggcagagaattcatctggaacgacctgctgtccctggaaaccggcagcctgaagctggccaacggaagagtgatcgagaagacactgtacaacagaagaacccggcaggatgagcctgccctgttcgtggccctgaccttcgagcggcgggaggtcctggactcctccaatatcaaaccaatgaacctgatcggcgtggcaagaggcgaaaacatccccgccgtgatcgccctgaccgaccccgagggctgcccactgagccggtttaaggatagcctgggaaacccaacccacatcctgagaatcggcgagagctataaggagaagcagcggaccatccaggccaagaaggaggtggagcagcggagagccggcggctacagccggaagtacgccagcaaagccaagaatctggcagacgatatggtgagaaacaccgctagagatctgctgtactacgccgtgacccaggatgccatgctgatcttcgccaacctgagccggggcttcggccggcagggcaagcggaccttcatggccgagagacagtacacacggatggaggactggctgaccgccaagctggcctacgagggcctgagcaagacctacctgtccaagacactggcccagtacacctccaagacatgcagcaactgtgggtttaccatcaccagcgccgactacgacagggtgctggagaagctgaagaagacagcaacaggctggatgaccacaattaacggcaaggagctgaaggtggagggccagattacctactacaacagatacaagagacagaacgtagtcaaggacctgtccgtcgagctggatagactgagcgaagaatctgtgaacaacgacatctcctcctggacaaagggcagaagcggagaagctctgagcctcctgaagaaaagattctcccatagacccgtgcaggagaagttcgtgtgcctgaactgcggcttcgagacacacgcagccgagcaagccgccctgaacatcgccagatcctggctgttcctgcggagccaggagtacaagaaataccagacaaacaagacaaccggcaacaccgataagagagccttcgtcgagacctggcagtccttttaccggaagaagcttaaggaggtgtggaaacctgccgtgcggtctggcggatctggcggaggctccacaagcttccagggcagcgtgaccttcagggacgtggccatcgacttcagccaggaggagtgggagtggctgcagcccgcccagagggacctgtacaggcacgtgatgctggagaactacggccacctggtgagcctgggcctgaacatcagcaagccccacgtggtgagcctgctggagcagggcagggacccctggcccgacaacggcgccgtgggcggcggcctgttcagcgagagcaagggcgagaccagccccaagaaaaagagaaaagtctaagctgccttctgcggggcttgccttctggccatgcccttcttctctcccttgcacctgtacctcttggtctttgaataaagcctgagtaggaaggctagcaaaaaaaaaaaaaaaaaaaaaaaaaaaaaaaaaaaaaaaaaaaaaaaaaaaaaaaaaaaaaaaaaaaaaaaaaaaaaaaa

SEQ ID NO: 3614 - RNA, 5419 nt, synthetic construct
  source 1..5419: mol_type = other RNA
aggaaataagagagaaaagaagagtaagaagaaatataagagccaccatggcccctaagaagaagcgtaaagtgagccgggtgaacggcagcggcagcggcggcggcatgaaccacgaccaggagttcgacccccctaaggtgtaccctcccgtccccgccgagaagagaaagcccatccgggtcctgagcctgttcgatggcatcgccaccggtctgctggtgctgaaggacctgggcatccaggtggataggtacattgcctccgaggtgtgcgaggactccatcaccgtgggaatggtgcgtcatcagggcaagatcatgtacgtgggcgacgtgcggagcgtgacacagaagcatatccaggagtggggccctttcgacctggtgatcggcggcagcccttgcaatgacctgagcatcgtgaacccagcccggaagggcctgtacgagggaaccggcagactgttcttcgagttttacagactgctgcacgacgcccggcctaaggaaggcgacgaccggcccttcttttggctgttcgagaatgtggtggccatgggagtcagcgacaagcgggatattagccggttcctggagagcaaccccgtgatgatcgatgccaaggaagtgagcgccgcccaccgggccagatacttctggggcaatctgcctggcatgaacagacccctggccagcaccgtgaacgacaagctggagctgcaggagtgcctggagcacggccggatcgccaagttcagcaaggtgagaaccatcaccacccgaagcaacagcatcaaacaaggcaaggaccagcactttcctgtgttcatgaacgagaaggaggacatcctgtggtgtaccgagatggagagagtgttcgggttcccagtccactacacagatgtcagcaacatgtctagactggccagacagagactgctgggaagaagctggtccgtccctgtgatcagacacctgttcgcccctctgaaggagtacttcgcctgcgtgagcagcggcaacagcaacgccaacagccggggccccagcttctctagcggcctggtgccactgtccctgagagggagccacatgggccccatggagatctacaaaaccgtgagcgcctggaagcggcagcctgtgcgcgtgctgagcctgtttcggaatatcgataaagtcctgaaaagcctgggattcctggagagcggctctggctccggcggtggcaccctgaagtacgtggaggatgtgacaaacgtggtcagacgggatgtggagaagtggggccccttcgatctggtgtacggcagcacccaacccctgggcagctcttgtgaccggtgccctggctggtacatgtttcagttccaccggatcctgcagtacgccctgccgagacaggagtcccagcggccattcttttggattttcatggacaacttgctgctgaccgaggatgaccaggaaactaccactcggttcctgcagaccgaagccgtgaccctgcaggacgtgagaggccgggactaccagaacgccatgcgggtgtggtccaacatccctggactgaaaagcaagcacgcacctctgacccctaaagaagaggagtacctgcaggcccaggtgcggagcagaagcaagctggacgcccctaaggtggatctgctggtgaagaattgcctcctgcccctgagagagtacttcaagtatttcagccagaatagtctgcccctgggcggcccaagcagcggcgcccctcctcccagcggcggcagcccagccggctccccaacctctaccgaggagggcacctctgagtccgccacccccgagagcggccctggcacctccaccgagcccagcgagggcagcgcacccggcagccctgccggcagccccacctccacagaggagggaaccagcaccgagcccagcgaaggcagcgccccaggcaccagcaccgagcctagtgagggcggctctggcggcggcagcgcccaggagattaaacggatcaacaagatcagaagaagacttgtgaaagacagcaacaccaagaaggccggcaagacaggccccatgaaaaccctgctggttagagtgatgacacccgatctgagagagcggctggaaaacctgagaaagaagcctgaaaatatcccccagcccatcagcaatacatctagagccaacctgaataagctgctgaccgattacaccgaaatgaagaaggcgatcctgcatgtgtactgggaagagttccagaaggaccctgtgggcctgatgagccgggtggcccagcctgccagcaagaagatcgatcagaacaagctgaaacctgagatggacgagaagggcaacctgaccaccgccggctttgcctgctctcagtgtggccagcccctgttcgtgtacaagctggagcaggtgtctgagaagggcaaggcttacaccaactacttcggacggtgcaatgtggccgagcacgaaaagctgatcctgctggcccagctgaagcccgagaaggatagcgacgaagccgtgacatatagcctgggaaagtttgggcagagggccctggatttctacagcattcatgtgaccaaggagtccacccaccccgtgaagcccctggcccagatcgccggaaacagatacgcctccggacctgtgggaaaggccctgagcgacgcatgtatgggcacaatcgcctccttcctgtctaagtaccaggacatcatcatcgaacaccagaaggtggtgaagggcaaccagaagagactggagagcctgcgggagctggccggcaaggaaaacctggaataccctagcgtgaccctgccacctcagcctcacaccaaggagggcgttgatgcctacaacgaagtgatcgcccgggtgcgaatgtgggtgaacctgaacctgtggcagaagctgaagctaagcagagatgatgccaagcctctgctgagactgaagggattcccttcctttcctctggtcgagagacaggccaacgaagtggactggtgggacatggtgtgtaacgtgaagaagctgatcaacgagaaaaaggaggatggcaaggtgttttggcagaatctggctggctacaagagacaggaagccctgagaccatacctgagcagcgaggaagatcggaagaagggaaagaaattcgctcggtaccagctgggcgacctgctgctgcacctggaaaagaagcacggcgaggactggggaaaggtgtacgacgaggcctgggagcggattgacaagaaagtggaaggcctgagcaagcacatcaagctggaagaggaacggagaagcgaggacgcccagagcaaggccgccctgaccgactggctgcgggctaaggccagcttcgtgatcgagggcctgaaggaggccgacaaggacgagttctgcagatgcgagctgaagctgcagaagtggtacggggacctgcggggaaagcccttcgccatcgaagccgagaacagcatcctggacatcagcggcttcagcaagcagtacaactgtgccttcatctggcagaaggacggcgtgaagaagctgaacctgtacctgatcatcaactacttcaagggcggcaagctgcggttcaagaagatcaaacctgaagccttcgaagccaacagattctacaccgtgatcaacaaaaagagcggcgagatcgtgcccatggaggtgaacttcaacttcgacgaccccaacctgatcatcctgcctctggcctttggcaagagacagggcagagaattcatctggaacgacctgctgtccctggaaaccggcagcctgaagctggccaacggaagagtgatcgagaagacactgtacaacagaagaacccggcaggatgagcctgccctgttcgtggccctgaccttcgagcggcgggaggtcctggactcctccaatatcaaaccaatgaacctgatcggcgtggcaagaggcgaaaacatccccgccgtgatcgccctgaccgaccccgagggctgcccactgagccggtttaaggatagcctgggaaacccaacccacatcctgagaatcggcgagagctataaggagaagcagcggaccatccaggccaagaaggaggtggagcagcggagagccggcggctacagccggaagtacgccagcaaagccaagaatctggcagacgatatggtgagaaacaccgctagagatctgctgtactacgccgtgacccaggatgccatgctgatcttcgccaacctgagccggggcttcggccggcagggcaagcggaccttcatggccgagagacagtacacacggatggaggactggctgaccgccaagctggcctacgagggcctgagcaagacctacctgtccaagacactggcccagtacacctccaagacatgcagcaactgtgggtttaccatcaccagcgccgactacgacagggtgctggagaagctgaagaagacagcaacaggctggatgaccacaattaacggcaaggagctgaaggtggagggccagattacctactacaacagatacaagagacagaacgtagtcaaggacctgtccgtcgagctggatagactgagcgaagaatctgtgaacaacgacatctcctcctggacaaagggcagaagcggagaagctctgagcctcctgaagaaaagattctcccatagacccgtgcaggagaagttcgtgtgcctgaactgcggcttcgagacacacgcagccgagcaagccgccctgaacatcgccagatcctggctgttcctgcggagccaggagtacaagaaataccagacaaacaagacaaccggcaacaccgataagagagccttcgtcgagacctggcagtccttttaccggaagaagcttaaggaggtgtggaaacctgccgtgcggtctggcggatctggcggaggctccacaagcatggacagcgtgaccatcgaggacgtggccgtggacttcaccctggaggagtgggccctgctggaccccagccagaggaagctgtacagggacgtgatgcaggagaccctgaggaacctggccgccgtgggcgccaagagggagtaccacgacatcgaggaccagtacaagaaccagggcaggaagctgaggaccttcatggtggagaggttctgcaagagcaaggacatcagcctgtgcggcaccagccccaagaaaaagagaaaagtctaagctgccttctgcggggcttgccttctggccatgcccttcttctctcccttgcacctgtacctcttggtctttgaataaagcctgagtaggaaggctagcaaaaaaaaaaaaaaaaaaaaaaaaaaaaaaaaaaaaaaaaaaaaaaaaaaaaaaaaaaaaaaaaaaaaaaaaaaaaaaaa

SEQ ID NO: 3615 - RNA, 5419 nt, synthetic construct
  source 1..5419: mol_type = other RNA
aggaaataagagagaaaagaagagtaagaagaaatataagagccaccatggcccctaagaagaagcgtaaagtgagccgggtgaacggcagcggcagcggcggcggcatgaaccacgaccaggagttcgacccccctaaggtgtaccctcccgtccccgccgagaagagaaagcccatccgggtcctgagcctgttcgatggcatcgccaccggtctgctggtgctgaaggacctgggcatccaggtggataggtacattgcctccgaggtgtgcgaggactccatcaccgtgggaatggtgcgtcatcagggcaagatcatgtacgtgggcgacgtgcggagcgtgacacagaagcatatccaggagtggggccctttcgacctggtgatcggcggcagcccttgcaatgacctgagcatcgtgaacccagcccggaagggcctgtacgagggaaccggcagactgttcttcgagttttacagactgctgcacgacgcccggcctaaggaaggcgacgaccggcccttcttttggctgttcgagaatgtggtggccatgggagtcagcgacaagcgggatattagccggttcctggagagcaaccccgtgatgatcgatgccaaggaagtgagcgccgcccaccgggccagatacttctggggcaatctgcctggcatgaacagacccctggccagcaccgtgaacgacaagctggagctgcaggagtgcctggagcacggccggatcgccaagttcagcaaggtgagaaccatcaccacccgaagcaacagcatcaaacaaggcaaggaccagcactttcctgtgttcatgaacgagaaggaggacatcctgtggtgtaccgagatggagagagtgttcgggttcccagtccactacacagatgtcagcaacatgtctagactggccagacagagactgctgggaagaagctggtccgtccctgtgatcagacacctgttcgcccctctgaaggagtacttcgcctgcgtgagcagcggcaacagcaacgccaacagccggggccccagcttctctagcggcctggtgccactgtccctgagagggagccacatgggccccatggagatctacaaaaccgtgagcgcctggaagcggcagcctgtgcgcgtgctgagcctgtttcggaatatcgataaagtcctgaaaagcctgggattcctggagagcggctctggctccggcggtggcaccctgaagtacgtggaggatgtgacaaacgtggtcagacgggatgtggagaagtggggccccttcgatctggtgtacggcagcacccaacccctgggcagctcttgtgaccggtgccctggctggtacatgtttcagttccaccggatcctgcagtacgccctgccgagacaggagtcccagcggccattcttttggattttcatggacaacttgctgctgaccgaggatgaccaggaaactaccactcggttcctgcagaccgaagccgtgaccctgcaggacgtgagaggccgggactaccagaacgccatgcgggtgtggtccaacatccctggactgaaaagcaagcacgcacctctgacccctaaagaagaggagtacctgcaggcccaggtgcggagcagaagcaagctggacgcccctaaggtggatctgctggtgaagaattgcctcctgcccctgagagagtacttcaagtatttcagccagaatagtctgcccctgggcggcccaagcagcggcgcccctcctcccagcggcggcagcccagccggctccccaacctctaccgaggagggcacctctgagtccgccacccccgagagcggccctggcacctccaccgagcccagcgagggcagcgcacccggcagccctgccggcagccccacctccacagaggagggaaccagcaccgagcccagcgaaggcagcgccccaggcaccagcaccgagcctagtgagggcggctctggcggcggcagcgcccaggagattaaacggatcaacaagatcagaagaagacttgtgaaagacagcaacaccaagaaggccggcaagacaggccccatgaaaaccctgctggttagagtgatgacacccgatctgagagagcggctggaaaacctgagaaagaagcctgaaaatatcccccagcccatcagcaatacatctagagccaacctgaataagctgctgaccgattacaccgaaatgaagaaggcgatcctgcatgtgtactgggaagagttccagaaggaccctgtgggcctgatgagccgggtggcccagcctgccagcaagaagatcgatcagaacaagctgaaacctgagatggacgagaagggcaacctgaccaccgccggctttgcctgctctcagtgtggccagcccctgttcgtgtacaagctggagcaggtgtctgagaagggcaaggcttacaccaactacttcggacggtgcaatgtggccgagcacgaaaagctgatcctgctggcccagctgaagcccgagaaggatagcgacgaagccgtgacatatagcctgggaaagtttgggcagagggccctggatttctacagcattcatgtgaccaaggagtccacccaccccgtgaagcccctggcccagatcgccggaaacagatacgcctccggacctgtgggaaaggccctgagcgacgcatgtatgggcacaatcgcctccttcctgtctaagtaccaggacatcatcatcgaacaccagaaggtggtgaagggcaaccagaagagactggagagcctgcgggagctggccggcaaggaaaacctggaataccctagcgtgaccctgccacctcagcctcacaccaaggagggcgttgatgcctacaacgaagtgatcgcccgggtgcgaatgtgggtgaacctgaacctgtggcagaagctgaagctaagcagagatgatgccaagcctctgctgagactgaagggattcccttcctttcctctggtcgagagacaggccaacgaagtggactggtgggacatggtgtgtaacgtgaagaagctgatcaacgagaaaaaggaggatggcaaggtgttttggcagaatctggctggctacaagagacaggaagccctgagaccatacctgagcagcgaggaagatcggaagaagggaaagaaattcgctcggtaccagctgggcgacctgctgctgcacctggaaaagaagcacggcgaggactggggaaaggtgtacgacgaggcctgggagcggattgacaagaaagtggaaggcctgagcaagcacatcaagctggaagaggaacggagaagcgaggacgcccagagcaaggccgccctgaccgactggctgcgggctaaggccagcttcgtgatcgagggcctgaaggaggccgacaaggacgagttctgcagatgcgagctgaagctgcagaagtggtacggggacctgcggggaaagcccttcgccatcgaagccgagaacagcatcctggacatcagcggcttcagcaagcagtacaactgtgccttcatctggcagaaggacggcgtgaagaagctgaacctgtacctgatcatcaactacttcaagggcggcaagctgcggttcaagaagatcaaacctgaagccttcgaagccaacagattctacaccgtgatcaacaaaaagagcggcgagatcgtgcccatggaggtgaacttcaacttcgacgaccccaacctgatcatcctgcctctggcctttggcaagagacagggcagagaattcatctggaacgacctgctgtccctggaaaccggcagcctgaagctggccaacggaagagtgatcgagaagacactgtacaacagaagaacccggcaggatgagcctgccctgttcgtggccctgaccttcgagcggcgggaggtcctggactcctccaatatcaaaccaatgaacctgatcggcgtggcaagaggcgaaaacatccccgccgtgatcgccctgaccgaccccgagggctgcccactgagccggtttaaggatagcctgggaaacccaacccacatcctgagaatcggcgagagctataaggagaagcagcggaccatccaggccaagaaggaggtggagcagcggagagccggcggctacagccggaagtacgccagcaaagccaagaatctggcagacgatatggtgagaaacaccgctagagatctgctgtactacgccgtgacccaggatgccatgctgatcttcgccaacctgagccggggcttcggccggcagggcaagcggaccttcatggccgagagacagtacacacggatggaggactggctgaccgccaagctggcctacgagggcctgagcaagacctacctgtccaagacactggcccagtacacctccaagacatgcagcaactgtgggtttaccatcaccagcgccgactacgacagggtgctggagaagctgaagaagacagcaacaggctggatgaccacaattaacggcaaggagctgaaggtggagggccagattacctactacaacagatacaagagacagaacgtagtcaaggacctgtccgtcgagctggatagactgagcgaagaatctgtgaacaacgacatctcctcctggacaaagggcagaagcggagaagctctgagcctcctgaagaaaagattctcccatagacccgtgcaggagaagttcgtgtgcctgaactgcggcttcgagacacacgcagccgagcaagccgccctgaacatcgccagatcctggctgttcctgcggagccaggagtacaagaaataccagacaaacaagacaaccggcaacaccgataagagagccttcgtcgagacctggcagtccttttaccggaagaagcttaaggaggtgtggaaacctgccgtgcggtctggcggatctggcggaggctccacaagcatgggccccctgaccttcaccgacgtggccatcgagttcagcctggaggagtggcagtgcctggacaccgcccagcagaacctgtacaggaacgtgatgctggagaactacaggaacctggtgttcctgggcatcgccgtgagcaagcccgacctgatcacctgcctggagaaggagaaggagccctgcaagatgaagaggcacgagatggtggacgagccccccgacggcgtgagcctgctgaccagccccaagaaaaagagaaaagtctaagctgccttctgcggggcttgccttctggccatgcccttcttctctcccttgcacctgtacctcttggtctttgaataaagcctgagtaggaaggctagcaaaaaaaaaaaaaaaaaaaaaaaaaaaaaaaaaaaaaaaaaaaaaaaaaaaaaaaaaaaaaaaaaaaaaaaaaaaaaaaa

SEQ ID NO: 3616 - RNA, 5419 nt, synthetic construct
  source 1..5419: mol_type = other RNA
aggaaataagagagaaaagaagagtaagaagaaatataagagccaccatggcccctaagaagaagcgtaaagtgagccgggtgaacggcagcggcagcggcggcggcatgaaccacgaccaggagttcgacccccctaaggtgtaccctcccgtccccgccgagaagagaaagcccatccgggtcctgagcctgttcgatggcatcgccaccggtctgctggtgctgaaggacctgggcatccaggtggataggtacattgcctccgaggtgtgcgaggactccatcaccgtgggaatggtgcgtcatcagggcaagatcatgtacgtgggcgacgtgcggagcgtgacacagaagcatatccaggagtggggccctttcgacctggtgatcggcggcagcccttgcaatgacctgagcatcgtgaacccagcccggaagggcctgtacgagggaaccggcagactgttcttcgagttttacagactgctgcacgacgcccggcctaaggaaggcgacgaccggcccttcttttggctgttcgagaatgtggtggccatgggagtcagcgacaagcgggatattagccggttcctggagagcaaccccgtgatgatcgatgccaaggaagtgagcgccgcccaccgggccagatacttctggggcaatctgcctggcatgaacagacccctggccagcaccgtgaacgacaagctggagctgcaggagtgcctggagcacggccggatcgccaagttcagcaaggtgagaaccatcaccacccgaagcaacagcatcaaacaaggcaaggaccagcactttcctgtgttcatgaacgagaaggaggacatcctgtggtgtaccgagatggagagagtgttcgggttcccagtccactacacagatgtcagcaacatgtctagactggccagacagagactgctgggaagaagctggtccgtccctgtgatcagacacctgttcgcccctctgaaggagtacttcgcctgcgtgagcagcggcaacagcaacgccaacagccggggccccagcttctctagcggcctggtgccactgtccctgagagggagccacatgggccccatggagatctacaaaaccgtgagcgcctggaagcggcagcctgtgcgcgtgctgagcctgtttcggaatatcgataaagtcctgaaaagcctgggattcctggagagcggctctggctccggcggtggcaccctgaagtacgtggaggatgtgacaaacgtggtcagacgggatgtggagaagtggggccccttcgatctggtgtacggcagcacccaacccctgggcagctcttgtgaccggtgccctggctggtacatgtttcagttccaccggatcctgcagtacgccctgccgagacaggagtcccagcggccattcttttggattttcatggacaacttgctgctgaccgaggatgaccaggaaactaccactcggttcctgcagaccgaagccgtgaccctgcaggacgtgagaggccgggactaccagaacgccatgcgggtgtggtccaacatccctggactgaaaagcaagcacgcacctctgacccctaaagaagaggagtacctgcaggcccaggtgcggagcagaagcaagctggacgcccctaaggtggatctgctggtgaagaattgcctcctgcccctgagagagtacttcaagtatttcagccagaatagtctgcccctgggcggcccaagcagcggcgcccctcctcccagcggcggcagcccagccggctccccaacctctaccgaggagggcacctctgagtccgccacccccgagagcggccctggcacctccaccgagcccagcgagggcagcgcacccggcagccctgccggcagccccacctccacagaggagggaaccagcaccgagcccagcgaaggcagcgccccaggcaccagcaccgagcctagtgagggcggctctggcggcggcagcgcccaggagattaaacggatcaacaagatcagaagaagacttgtgaaagacagcaacaccaagaaggccggcaagacaggccccatgaaaaccctgctggttagagtgatgacacccgatctgagagagcggctggaaaacctgagaaagaagcctgaaaatatcccccagcccatcagcaatacatctagagccaacctgaataagctgctgaccgattacaccgaaatgaagaaggcgatcctgcatgtgtactgggaagagttccagaaggaccctgtgggcctgatgagccgggtggcccagcctgccagcaagaagatcgatcagaacaagctgaaacctgagatggacgagaagggcaacctgaccaccgccggctttgcctgctctcagtgtggccagcccctgttcgtgtacaagctggagcaggtgtctgagaagggcaaggcttacaccaactacttcggacggtgcaatgtggccgagcacgaaaagctgatcctgctggcccagctgaagcccgagaaggatagcgacgaagccgtgacatatagcctgggaaagtttgggcagagggccctggatttctacagcattcatgtgaccaaggagtccacccaccccgtgaagcccctggcccagatcgccggaaacagatacgcctccggacctgtgggaaaggccctgagcgacgcatgtatgggcacaatcgcctccttcctgtctaagtaccaggacatcatcatcgaacaccagaaggtggtgaagggcaaccagaagagactggagagcctgcgggagctggccggcaaggaaaacctggaataccctagcgtgaccctgccacctcagcctcacaccaaggagggcgttgatgcctacaacgaagtgatcgcccgggtgcgaatgtgggtgaacctgaacctgtggcagaagctgaagctaagcagagatgatgccaagcctctgctgagactgaagggattcccttcctttcctctggtcgagagacaggccaacgaagtggactggtgggacatggtgtgtaacgtgaagaagctgatcaacgagaaaaaggaggatggcaaggtgttttggcagaatctggctggctacaagagacaggaagccctgagaccatacctgagcagcgaggaagatcggaagaagggaaagaaattcgctcggtaccagctgggcgacctgctgctgcacctggaaaagaagcacggcgaggactggggaaaggtgtacgacgaggcctgggagcggattgacaagaaagtggaaggcctgagcaagcacatcaagctggaagaggaacggagaagcgaggacgcccagagcaaggccgccctgaccgactggctgcgggctaaggccagcttcgtgatcgagggcctgaaggaggccgacaaggacgagttctgcagatgcgagctgaagctgcagaagtggtacggggacctgcggggaaagcccttcgccatcgaagccgagaacagcatcctggacatcagcggcttcagcaagcagtacaactgtgccttcatctggcagaaggacggcgtgaagaagctgaacctgtacctgatcatcaactacttcaagggcggcaagctgcggttcaagaagatcaaacctgaagccttcgaagccaacagattctacaccgtgatcaacaaaaagagcggcgagatcgtgcccatggaggtgaacttcaacttcgacgaccccaacctgatcatcctgcctctggcctttggcaagagacagggcagagaattcatctggaacgacctgctgtccctggaaaccggcagcctgaagctggccaacggaagagtgatcgagaagacactgtacaacagaagaacccggcaggatgagcctgccctgttcgtggccctgaccttcgagcggcgggaggtcctggactcctccaatatcaaaccaatgaacctgatcggcgtggcaagaggcgaaaacatccccgccgtgatcgccctgaccgaccccgagggctgcccactgagccggtttaaggatagcctgggaaacccaacccacatcctgagaatcggcgagagctataaggagaagcagcggaccatccaggccaagaaggaggtggagcagcggagagccggcggctacagccggaagtacgccagcaaagccaagaatctggcagacgatatggtgagaaacaccgctagagatctgctgtactacgccgtgacccaggatgccatgctgatcttcgccaacctgagccggggcttcggccggcagggcaagcggaccttcatggccgagagacagtacacacggatggaggactggctgaccgccaagctggcctacgagggcctgagcaagacctacctgtccaagacactggcccagtacacctccaagacatgcagcaactgtgggtttaccatcaccagcgccgactacgacagggtgctggagaagctgaagaagacagcaacaggctggatgaccacaattaacggcaaggagctgaaggtggagggccagattacctactacaacagatacaagagacagaacgtagtcaaggacctgtccgtcgagctggatagactgagcgaagaatctgtgaacaacgacatctcctcctggacaaagggcagaagcggagaagctctgagcctcctgaagaaaagattctcccatagacccgtgcaggagaagttcgtgtgcctgaactgcggcttcgagacacacgcagccgagcaagccgccctgaacatcgccagatcctggctgttcctgcggagccaggagtacaagaaataccagacaaacaagacaaccggcaacaccgataagagagccttcgtcgagacctggcagtccttttaccggaagaagcttaaggaggtgtggaaacctgccgtgcggtctggcggatctggcggaggctccacaagcttccagggcagcctgagcttcagggacgtggccgtgggcttcaccaggaaggagtggcagcagctggaccccacccagaggaccctgtacagggacgtgatgctggagaactacagccacctggtgagcgtgggctgccaggtgaccaagcccgccgtgatcagcaggctggagcagggccaggagccctggatgaaggaggaggagatcctgaggtggagcttccccgaggtgctgcaggtgaccagccccaagaaaaagagaaaagtctaagctgccttctgcggggcttgccttctggccatgcccttcttctctcccttgcacctgtacctcttggtctttgaataaagcctgagtaggaaggctagcaaaaaaaaaaaaaaaaaaaaaaaaaaaaaaaaaaaaaaaaaaaaaaaaaaaaaaaaaaaaaaaaaaaaaaaaaaaaaaaa

SEQ ID NO: 3617 - RNA, 5419 nt, synthetic construct
  source 1..5419: mol_type = other RNA
aggaaataagagagaaaagaagagtaagaagaaatataagagccaccatggcccctaagaagaagcgtaaagtgagccgggtgaacggcagcggcagcggcggcggcatgaaccacgaccaggagttcgacccccctaaggtgtaccctcccgtccccgccgagaagagaaagcccatccgggtcctgagcctgttcgatggcatcgccaccggtctgctggtgctgaaggacctgggcatccaggtggataggtacattgcctccgaggtgtgcgaggactccatcaccgtgggaatggtgcgtcatcagggcaagatcatgtacgtgggcgacgtgcggagcgtgacacagaagcatatccaggagtggggccctttcgacctggtgatcggcggcagcccttgcaatgacctgagcatcgtgaacccagcccggaagggcctgtacgagggaaccggcagactgttcttcgagttttacagactgctgcacgacgcccggcctaaggaaggcgacgaccggcccttcttttggctgttcgagaatgtggtggccatgggagtcagcgacaagcgggatattagccggttcctggagagcaaccccgtgatgatcgatgccaaggaagtgagcgccgcccaccgggccagatacttctggggcaatctgcctggcatgaacagacccctggccagcaccgtgaacgacaagctggagctgcaggagtgcctggagcacggccggatcgccaagttcagcaaggtgagaaccatcaccacccgaagcaacagcatcaaacaaggcaaggaccagcactttcctgtgttcatgaacgagaaggaggacatcctgtggtgtaccgagatggagagagtgttcgggttcccagtccactacacagatgtcagcaacatgtctagactggccagacagagactgctgggaagaagctggtccgtccctgtgatcagacacctgttcgcccctctgaaggagtacttcgcctgcgtgagcagcggcaacagcaacgccaacagccggggccccagcttctctagcggcctggtgccactgtccctgagagggagccacatgggccccatggagatctacaaaaccgtgagcgcctggaagcggcagcctgtgcgcgtgctgagcctgtttcggaatatcgataaagtcctgaaaagcctgggattcctggagagcggctctggctccggcggtggcaccctgaagtacgtggaggatgtgacaaacgtggtcagacgggatgtggagaagtggggccccttcgatctggtgtacggcagcacccaacccctgggcagctcttgtgaccggtgccctggctggtacatgtttcagttccaccggatcctgcagtacgccctgccgagacaggagtcccagcggccattcttttggattttcatggacaacttgctgctgaccgaggatgaccaggaaactaccactcggttcctgcagaccgaagccgtgaccctgcaggacgtgagaggccgggactaccagaacgccatgcgggtgtggtccaacatccctggactgaaaagcaagcacgcacctctgacccctaaagaagaggagtacctgcaggcccaggtgcggagcagaagcaagctggacgcccctaaggtggatctgctggtgaagaattgcctcctgcccctgagagagtacttcaagtatttcagccagaatagtctgcccctgggcggcccaagcagcggcgcccctcctcccagcggcggcagcccagccggctccccaacctctaccgaggagggcacctctgagtccgccacccccgagagcggccctggcacctccaccgagcccagcgagggcagcgcacccggcagccctgccggcagccccacctccacagaggagggaaccagcaccgagcccagcgaaggcagcgccccaggcaccagcaccgagcctagtgagggcggctctggcggcggcagcgcccaggagattaaacggatcaacaagatcagaagaagacttgtgaaagacagcaacaccaagaaggccggcaagacaggccccatgaaaaccctgctggttagagtgatgacacccgatctgagagagcggctggaaaacctgagaaagaagcctgaaaatatcccccagcccatcagcaatacatctagagccaacctgaataagctgctgaccgattacaccgaaatgaagaaggcgatcctgcatgtgtactgggaagagttccagaaggaccctgtgggcctgatgagccgggtggcccagcctgccagcaagaagatcgatcagaacaagctgaaacctgagatggacgagaagggcaacctgaccaccgccggctttgcctgctctcagtgtggccagcccctgttcgtgtacaagctggagcaggtgtctgagaagggcaaggcttacaccaactacttcggacggtgcaatgtggccgagcacgaaaagctgatcctgctggcccagctgaagcccgagaaggatagcgacgaagccgtgacatatagcctgggaaagtttgggcagagggccctggatttctacagcattcatgtgaccaaggagtccacccaccccgtgaagcccctggcccagatcgccggaaacagatacgcctccggacctgtgggaaaggccctgagcgacgcatgtatgggcacaatcgcctccttcctgtctaagtaccaggacatcatcatcgaacaccagaaggtggtgaagggcaaccagaagagactggagagcctgcgggagctggccggcaaggaaaacctggaataccctagcgtgaccctgccacctcagcctcacaccaaggagggcgttgatgcctacaacgaagtgatcgcccgggtgcgaatgtgggtgaacctgaacctgtggcagaagctgaagctaagcagagatgatgccaagcctctgctgagactgaagggattcccttcctttcctctggtcgagagacaggccaacgaagtggactggtgggacatggtgtgtaacgtgaagaagctgatcaacgagaaaaaggaggatggcaaggtgttttggcagaatctggctggctacaagagacaggaagccctgagaccatacctgagcagcgaggaagatcggaagaagggaaagaaattcgctcggtaccagctgggcgacctgctgctgcacctggaaaagaagcacggcgaggactggggaaaggtgtacgacgaggcctgggagcggattgacaagaaagtggaaggcctgagcaagcacatcaagctggaagaggaacggagaagcgaggacgcccagagcaaggccgccctgaccgactggctgcgggctaaggccagcttcgtgatcgagggcctgaaggaggccgacaaggacgagttctgcagatgcgagctgaagctgcagaagtggtacggggacctgcggggaaagcccttcgccatcgaagccgagaacagcatcctggacatcagcggcttcagcaagcagtacaactgtgccttcatctggcagaaggacggcgtgaagaagctgaacctgtacctgatcatcaactacttcaagggcggcaagctgcggttcaagaagatcaaacctgaagccttcgaagccaacagattctacaccgtgatcaacaaaaagagcggcgagatcgtgcccatggaggtgaacttcaacttcgacgaccccaacctgatcatcctgcctctggcctttggcaagagacagggcagagaattcatctggaacgacctgctgtccctggaaaccggcagcctgaagctggccaacggaagagtgatcgagaagacactgtacaacagaagaacccggcaggatgagcctgccctgttcgtggccctgaccttcgagcggcgggaggtcctggactcctccaatatcaaaccaatgaacctgatcggcgtggcaagaggcgaaaacatccccgccgtgatcgccctgaccgaccccgagggctgcccactgagccggtttaaggatagcctgggaaacccaacccacatcctgagaatcggcgagagctataaggagaagcagcggaccatccaggccaagaaggaggtggagcagcggagagccggcggctacagccggaagtacgccagcaaagccaagaatctggcagacgatatggtgagaaacaccgctagagatctgctgtactacgccgtgacccaggatgccatgctgatcttcgccaacctgagccggggcttcggccggcagggcaagcggaccttcatggccgagagacagtacacacggatggaggactggctgaccgccaagctggcctacgagggcctgagcaagacctacctgtccaagacactggcccagtacacctccaagacatgcagcaactgtgggtttaccatcaccagcgccgactacgacagggtgctggagaagctgaagaagacagcaacaggctggatgaccacaattaacggcaaggagctgaaggtggagggccagattacctactacaacagatacaagagacagaacgtagtcaaggacctgtccgtcgagctggatagactgagcgaagaatctgtgaacaacgacatctcctcctggacaaagggcagaagcggagaagctctgagcctcctgaagaaaagattctcccatagacccgtgcaggagaagttcgtgtgcctgaactgcggcttcgagacacacgcagccgagcaagccgccctgaacatcgccagatcctggctgttcctgcggagccaggagtacaagaaataccagacaaacaagacaaccggcaacaccgataagagagccttcgtcgagacctggcagtccttttaccggaagaagcttaaggaggtgtggaaacctgccgtgcggtctggcggatctggcggaggctccacaagcgagatgagggtgatgttcgaggagatcaccgtgagcttcagccaggaggagtgggagtacctggacgagggccagaaggagctgtaccaggaggtgatgaaggagaaccacgagaccctgatcttcctggagaccaacctgcagttcgtgaaccccgacatgctgagcaagatcaggagggacagcaggatgagcaggaagaggaaggccaccaggagctacgccgccgacgacgaggccaagaccagccccaagaaaaagagaaaagtctaagctgccttctgcggggcttgccttctggccatgcccttcttctctcccttgcacctgtacctcttggtctttgaataaagcctgagtaggaaggctagcaaaaaaaaaaaaaaaaaaaaaaaaaaaaaaaaaaaaaaaaaaaaaaaaaaaaaaaaaaaaaaaaaaaaaaaaaaaaaaaa

SEQ ID NO: 3618 - RNA, 5419 nt, synthetic construct
  source 1..5419: mol_type = other RNA
aggaaataagagagaaaagaagagtaagaagaaatataagagccaccatggcccctaagaagaagcgtaaagtgagccgggtgaacggcagcggcagcggcggcggcatgaaccacgaccaggagttcgacccccctaaggtgtaccctcccgtccccgccgagaagagaaagcccatccgggtcctgagcctgttcgatggcatcgccaccggtctgctggtgctgaaggacctgggcatccaggtggataggtacattgcctccgaggtgtgcgaggactccatcaccgtgggaatggtgcgtcatcagggcaagatcatgtacgtgggcgacgtgcggagcgtgacacagaagcatatccaggagtggggccctttcgacctggtgatcggcggcagcccttgcaatgacctgagcatcgtgaacccagcccggaagggcctgtacgagggaaccggcagactgttcttcgagttttacagactgctgcacgacgcccggcctaaggaaggcgacgaccggcccttcttttggctgttcgagaatgtggtggccatgggagtcagcgacaagcgggatattagccggttcctggagagcaaccccgtgatgatcgatgccaaggaagtgagcgccgcccaccgggccagatacttctggggcaatctgcctggcatgaacagacccctggccagcaccgtgaacgacaagctggagctgcaggagtgcctggagcacggccggatcgccaagttcagcaaggtgagaaccatcaccacccgaagcaacagcatcaaacaaggcaaggaccagcactttcctgtgttcatgaacgagaaggaggacatcctgtggtgtaccgagatggagagagtgttcgggttcccagtccactacacagatgtcagcaacatgtctagactggccagacagagactgctgggaagaagctggtccgtccctgtgatcagacacctgttcgcccctctgaaggagtacttcgcctgcgtgagcagcggcaacagcaacgccaacagccggggccccagcttctctagcggcctggtgccactgtccctgagagggagccacatgggccccatggagatctacaaaaccgtgagcgcctggaagcggcagcctgtgcgcgtgctgagcctgtttcggaatatcgataaagtcctgaaaagcctgggattcctggagagcggctctggctccggcggtggcaccctgaagtacgtggaggatgtgacaaacgtggtcagacgggatgtggagaagtggggccccttcgatctggtgtacggcagcacccaacccctgggcagctcttgtgaccggtgccctggctggtacatgtttcagttccaccggatcctgcagtacgccctgccgagacaggagtcccagcggccattcttttggattttcatggacaacttgctgctgaccgaggatgaccaggaaactaccactcggttcctgcagaccgaagccgtgaccctgcaggacgtgagaggccgggactaccagaacgccatgcgggtgtggtccaacatccctggactgaaaagcaagcacgcacctctgacccctaaagaagaggagtacctgcaggcccaggtgcggagcagaagcaagctggacgcccctaaggtggatctgctggtgaagaattgcctcctgcccctgagagagtacttcaagtatttcagccagaatagtctgcccctgggcggcccaagcagcggcgcccctcctcccagcggcggcagcccagccggctccccaacctctaccgaggagggcacctctgagtccgccacccccgagagcggccctggcacctccaccgagcccagcgagggcagcgcacccggcagccctgccggcagccccacctccacagaggagggaaccagcaccgagcccagcgaaggcagcgccccaggcaccagcaccgagcctagtgagggcggctctggcggcggcagcgcccaggagattaaacggatcaacaagatcagaagaagacttgtgaaagacagcaacaccaagaaggccggcaagacaggccccatgaaaaccctgctggttagagtgatgacacccgatctgagagagcggctggaaaacctgagaaagaagcctgaaaatatcccccagcccatcagcaatacatctagagccaacctgaataagctgctgaccgattacaccgaaatgaagaaggcgatcctgcatgtgtactgggaagagttccagaaggaccctgtgggcctgatgagccgggtggcccagcctgccagcaagaagatcgatcagaacaagctgaaacctgagatggacgagaagggcaacctgaccaccgccggctttgcctgctctcagtgtggccagcccctgttcgtgtacaagctggagcaggtgtctgagaagggcaaggcttacaccaactacttcggacggtgcaatgtggccgagcacgaaaagctgatcctgctggcccagctgaagcccgagaaggatagcgacgaagccgtgacatatagcctgggaaagtttgggcagagggccctggatttctacagcattcatgtgaccaaggagtccacccaccccgtgaagcccctggcccagatcgccggaaacagatacgcctccggacctgtgggaaaggccctgagcgacgcatgtatgggcacaatcgcctccttcctgtctaagtaccaggacatcatcatcgaacaccagaaggtggtgaagggcaaccagaagagactggagagcctgcgggagctggccggcaaggaaaacctggaataccctagcgtgaccctgccacctcagcctcacaccaaggagggcgttgatgcctacaacgaagtgatcgcccgggtgcgaatgtgggtgaacctgaacctgtggcagaagctgaagctaagcagagatgatgccaagcctctgctgagactgaagggattcccttcctttcctctggtcgagagacaggccaacgaagtggactggtgggacatggtgtgtaacgtgaagaagctgatcaacgagaaaaaggaggatggcaaggtgttttggcagaatctggctggctacaagagacaggaagccctgagaccatacctgagcagcgaggaagatcggaagaagggaaagaaattcgctcggtaccagctgggcgacctgctgctgcacctggaaaagaagcacggcgaggactggggaaaggtgtacgacgaggcctgggagcggattgacaagaaagtggaaggcctgagcaagcacatcaagctggaagaggaacggagaagcgaggacgcccagagcaaggccgccctgaccgactggctgcgggctaaggccagcttcgtgatcgagggcctgaaggaggccgacaaggacgagttctgcagatgcgagctgaagctgcagaagtggtacggggacctgcggggaaagcccttcgccatcgaagccgagaacagcatcctggacatcagcggcttcagcaagcagtacaactgtgccttcatctggcagaaggacggcgtgaagaagctgaacctgtacctgatcatcaactacttcaagggcggcaagctgcggttcaagaagatcaaacctgaagccttcgaagccaacagattctacaccgtgatcaacaaaaagagcggcgagatcgtgcccatggaggtgaacttcaacttcgacgaccccaacctgatcatcctgcctctggcctttggcaagagacagggcagagaattcatctggaacgacctgctgtccctggaaaccggcagcctgaagctggccaacggaagagtgatcgagaagacactgtacaacagaagaacccggcaggatgagcctgccctgttcgtggccctgaccttcgagcggcgggaggtcctggactcctccaatatcaaaccaatgaacctgatcggcgtggcaagaggcgaaaacatccccgccgtgatcgccctgaccgaccccgagggctgcccactgagccggtttaaggatagcctgggaaacccaacccacatcctgagaatcggcgagagctataaggagaagcagcggaccatccaggccaagaaggaggtggagcagcggagagccggcggctacagccggaagtacgccagcaaagccaagaatctggcagacgatatggtgagaaacaccgctagagatctgctgtactacgccgtgacccaggatgccatgctgatcttcgccaacctgagccggggcttcggccggcagggcaagcggaccttcatggccgagagacagtacacacggatggaggactggctgaccgccaagctggcctacgagggcctgagcaagacctacctgtccaagacactggcccagtacacctccaagacatgcagcaactgtgggtttaccatcaccagcgccgactacgacagggtgctggagaagctgaagaagacagcaacaggctggatgaccacaattaacggcaaggagctgaaggtggagggccagattacctactacaacagatacaagagacagaacgtagtcaaggacctgtccgtcgagctggatagactgagcgaagaatctgtgaacaacgacatctcctcctggacaaagggcagaagcggagaagctctgagcctcctgaagaaaagattctcccatagacccgtgcaggagaagttcgtgtgcctgaactgcggcttcgagacacacgcagccgagcaagccgccctgaacatcgccagatcctggctgttcctgcggagccaggagtacaagaaataccagacaaacaagacaaccggcaacaccgataagagagccttcgtcgagacctggcagtccttttaccggaagaagcttaaggaggtgtggaaacctgccgtgcggtctggcggatctggcggaggctccacaagcccccaggaggccgtgaccttcaaggacgtggtggtggacttcacccaggaggagtggaagtgcctggacagcagccagaaggagttctacagggacgtgatgctggagaactacagcaacctggtgagcctgggcctggccttccccaagccctacgtgatcgaccagctggagaggagggaggccccctggatccccgagggcgacatccccaggatcagccaccccgagaggaagaagaagaccagccccaagaaaaagagaaaagtctaagctgccttctgcggggcttgccttctggccatgcccttcttctctcccttgcacctgtacctcttggtctttgaataaagcctgagtaggaaggctagcaaaaaaaaaaaaaaaaaaaaaaaaaaaaaaaaaaaaaaaaaaaaaaaaaaaaaaaaaaaaaaaaaaaaaaaaaaaaaaaa

SEQ ID NO: 3619 - RNA, 5419 nt, synthetic construct
  source 1..5419: mol_type = other RNA
aggaaataagagagaaaagaagagtaagaagaaatataagagccaccatggcccctaagaagaagcgtaaagtgagccgggtgaacggcagcggcagcggcggcggcatgaaccacgaccaggagttcgacccccctaaggtgtaccctcccgtccccgccgagaagagaaagcccatccgggtcctgagcctgttcgatggcatcgccaccggtctgctggtgctgaaggacctgggcatccaggtggataggtacattgcctccgaggtgtgcgaggactccatcaccgtgggaatggtgcgtcatcagggcaagatcatgtacgtgggcgacgtgcggagcgtgacacagaagcatatccaggagtggggccctttcgacctggtgatcggcggcagcccttgcaatgacctgagcatcgtgaacccagcccggaagggcctgtacgagggaaccggcagactgttcttcgagttttacagactgctgcacgacgcccggcctaaggaaggcgacgaccggcccttcttttggctgttcgagaatgtggtggccatgggagtcagcgacaagcgggatattagccggttcctggagagcaaccccgtgatgatcgatgccaaggaagtgagcgccgcccaccgggccagatacttctggggcaatctgcctggcatgaacagacccctggccagcaccgtgaacgacaagctggagctgcaggagtgcctggagcacggccggatcgccaagttcagcaaggtgagaaccatcaccacccgaagcaacagcatcaaacaaggcaaggaccagcactttcctgtgttcatgaacgagaaggaggacatcctgtggtgtaccgagatggagagagtgttcgggttcccagtccactacacagatgtcagcaacatgtctagactggccagacagagactgctgggaagaagctggtccgtccctgtgatcagacacctgttcgcccctctgaaggagtacttcgcctgcgtgagcagcggcaacagcaacgccaacagccggggccccagcttctctagcggcctggtgccactgtccctgagagggagccacatgggccccatggagatctacaaaaccgtgagcgcctggaagcggcagcctgtgcgcgtgctgagcctgtttcggaatatcgataaagtcctgaaaagcctgggattcctggagagcggctctggctccggcggtggcaccctgaagtacgtggaggatgtgacaaacgtggtcagacgggatgtggagaagtggggccccttcgatctggtgtacggcagcacccaacccctgggcagctcttgtgaccggtgccctggctggtacatgtttcagttccaccggatcctgcagtacgccctgccgagacaggagtcccagcggccattcttttggattttcatggacaacttgctgctgaccgaggatgaccaggaaactaccactcggttcctgcagaccgaagccgtgaccctgcaggacgtgagaggccgggactaccagaacgccatgcgggtgtggtccaacatccctggactgaaaagcaagcacgcacctctgacccctaaagaagaggagtacctgcaggcccaggtgcggagcagaagcaagctggacgcccctaaggtggatctgctggtgaagaattgcctcctgcccctgagagagtacttcaagtatttcagccagaatagtctgcccctgggcggcccaagcagcggcgcccctcctcccagcggcggcagcccagccggctccccaacctctaccgaggagggcacctctgagtccgccacccccgagagcggccctggcacctccaccgagcccagcgagggcagcgcacccggcagccctgccggcagccccacctccacagaggagggaaccagcaccgagcccagcgaaggcagcgccccaggcaccagcaccgagcctagtgagggcggctctggcggcggcagcgcccaggagattaaacggatcaacaagatcagaagaagacttgtgaaagacagcaacaccaagaaggccggcaagacaggccccatgaaaaccctgctggttagagtgatgacacccgatctgagagagcggctggaaaacctgagaaagaagcctgaaaatatcccccagcccatcagcaatacatctagagccaacctgaataagctgctgaccgattacaccgaaatgaagaaggcgatcctgcatgtgtactgggaagagttccagaaggaccctgtgggcctgatgagccgggtggcccagcctgccagcaagaagatcgatcagaacaagctgaaacctgagatggacgagaagggcaacctgaccaccgccggctttgcctgctctcagtgtggccagcccctgttcgtgtacaagctggagcaggtgtctgagaagggcaaggcttacaccaactacttcggacggtgcaatgtggccgagcacgaaaagctgatcctgctggcccagctgaagcccgagaaggatagcgacgaagccgtgacatatagcctgggaaagtttgggcagagggccctggatttctacagcattcatgtgaccaaggagtccacccaccccgtgaagcccctggcccagatcgccggaaacagatacgcctccggacctgtgggaaaggccctgagcgacgcatgtatgggcacaatcgcctccttcctgtctaagtaccaggacatcatcatcgaacaccagaaggtggtgaagggcaaccagaagagactggagagcctgcgggagctggccggcaaggaaaacctggaataccctagcgtgaccctgccacctcagcctcacaccaaggagggcgttgatgcctacaacgaagtgatcgcccgggtgcgaatgtgggtgaacctgaacctgtggcagaagctgaagctaagcagagatgatgccaagcctctgctgagactgaagggattcccttcctttcctctggtcgagagacaggccaacgaagtggactggtgggacatggtgtgtaacgtgaagaagctgatcaacgagaaaaaggaggatggcaaggtgttttggcagaatctggctggctacaagagacaggaagccctgagaccatacctgagcagcgaggaagatcggaagaagggaaagaaattcgctcggtaccagctgggcgacctgctgctgcacctggaaaagaagcacggcgaggactggggaaaggtgtacgacgaggcctgggagcggattgacaagaaagtggaaggcctgagcaagcacatcaagctggaagaggaacggagaagcgaggacgcccagagcaaggccgccctgaccgactggctgcgggctaaggccagcttcgtgatcgagggcctgaaggaggccgacaaggacgagttctgcagatgcgagctgaagctgcagaagtggtacggggacctgcggggaaagcccttcgccatcgaagccgagaacagcatcctggacatcagcggcttcagcaagcagtacaactgtgccttcatctggcagaaggacggcgtgaagaagctgaacctgtacctgatcatcaactacttcaagggcggcaagctgcggttcaagaagatcaaacctgaagccttcgaagccaacagattctacaccgtgatcaacaaaaagagcggcgagatcgtgcccatggaggtgaacttcaacttcgacgaccccaacctgatcatcctgcctctggcctttggcaagagacagggcagagaattcatctggaacgacctgctgtccctggaaaccggcagcctgaagctggccaacggaagagtgatcgagaagacactgtacaacagaagaacccggcaggatgagcctgccctgttcgtggccctgaccttcgagcggcgggaggtcctggactcctccaatatcaaaccaatgaacctgatcggcgtggcaagaggcgaaaacatccccgccgtgatcgccctgaccgaccccgagggctgcccactgagccggtttaaggatagcctgggaaacccaacccacatcctgagaatcggcgagagctataaggagaagcagcggaccatccaggccaagaaggaggtggagcagcggagagccggcggctacagccggaagtacgccagcaaagccaagaatctggcagacgatatggtgagaaacaccgctagagatctgctgtactacgccgtgacccaggatgccatgctgatcttcgccaacctgagccggggcttcggccggcagggcaagcggaccttcatggccgagagacagtacacacggatggaggactggctgaccgccaagctggcctacgagggcctgagcaagacctacctgtccaagacactggcccagtacacctccaagacatgcagcaactgtgggtttaccatcaccagcgccgactacgacagggtgctggagaagctgaagaagacagcaacaggctggatgaccacaattaacggcaaggagctgaaggtggagggccagattacctactacaacagatacaagagacagaacgtagtcaaggacctgtccgtcgagctggatagactgagcgaagaatctgtgaacaacgacatctcctcctggacaaagggcagaagcggagaagctctgagcctcctgaagaaaagattctcccatagacccgtgcaggagaagttcgtgtgcctgaactgcggcttcgagacacacgcagccgagcaagccgccctgaacatcgccagatcctggctgttcctgcggagccaggagtacaagaaataccagacaaacaagacaaccggcaacaccgataagagagccttcgtcgagacctggcagtccttttaccggaagaagcttaaggaggtgtggaaacctgccgtgcggtctggcggatctggcggaggctccacaagcccccagggccccgtgaccttccaggacgtggccgtggtgttcacccaggaggagtggaggtacctggaccccagccagaaggagctgtacagggacgtgatgctggagaactacaggaacctgctgtacctgggcctggtggtgagcaagcccaacgtgatctacaggttcgagcagggcgaggccagctggaggcccgaccagagggacagcggcagcacctgcagcgacgaggagaccggcaccagccccaagaaaaagagaaaagtctaagctgccttctgcggggcttgccttctggccatgcccttcttctctcccttgcacctgtacctcttggtctttgaataaagcctgagtaggaaggctagcaaaaaaaaaaaaaaaaaaaaaaaaaaaaaaaaaaaaaaaaaaaaaaaaaaaaaaaaaaaaaaaaaaaaaaaaaaaaaaaa

SEQ ID NO: 3620 - RNA, 5419 nt, synthetic construct
  source 1..5419: mol_type = other RNA
aggaaataagagagaaaagaagagtaagaagaaatataagagccaccatggcccctaagaagaagcgtaaagtgagccgggtgaacggcagcggcagcggcggcggcatgaaccacgaccaggagttcgacccccctaaggtgtaccctcccgtccccgccgagaagagaaagcccatccgggtcctgagcctgttcgatggcatcgccaccggtctgctggtgctgaaggacctgggcatccaggtggataggtacattgcctccgaggtgtgcgaggactccatcaccgtgggaatggtgcgtcatcagggcaagatcatgtacgtgggcgacgtgcggagcgtgacacagaagcatatccaggagtggggccctttcgacctggtgatcggcggcagcccttgcaatgacctgagcatcgtgaacccagcccggaagggcctgtacgagggaaccggcagactgttcttcgagttttacagactgctgcacgacgcccggcctaaggaaggcgacgaccggcccttcttttggctgttcgagaatgtggtggccatgggagtcagcgacaagcgggatattagccggttcctggagagcaaccccgtgatgatcgatgccaaggaagtgagcgccgcccaccgggccagatacttctggggcaatctgcctggcatgaacagacccctggccagcaccgtgaacgacaagctggagctgcaggagtgcctggagcacggccggatcgccaagttcagcaaggtgagaaccatcaccacccgaagcaacagcatcaaacaaggcaaggaccagcactttcctgtgttcatgaacgagaaggaggacatcctgtggtgtaccgagatggagagagtgttcgggttcccagtccactacacagatgtcagcaacatgtctagactggccagacagagactgctgggaagaagctggtccgtccctgtgatcagacacctgttcgcccctctgaaggagtacttcgcctgcgtgagcagcggcaacagcaacgccaacagccggggccccagcttctctagcggcctggtgccactgtccctgagagggagccacatgggccccatggagatctacaaaaccgtgagcgcctggaagcggcagcctgtgcgcgtgctgagcctgtttcggaatatcgataaagtcctgaaaagcctgggattcctggagagcggctctggctccggcggtggcaccctgaagtacgtggaggatgtgacaaacgtggtcagacgggatgtggagaagtggggccccttcgatctggtgtacggcagcacccaacccctgggcagctcttgtgaccggtgccctggctggtacatgtttcagttccaccggatcctgcagtacgccctgccgagacaggagtcccagcggccattcttttggattttcatggacaacttgctgctgaccgaggatgaccaggaaactaccactcggttcctgcagaccgaagccgtgaccctgcaggacgtgagaggccgggactaccagaacgccatgcgggtgtggtccaacatccctggactgaaaagcaagcacgcacctctgacccctaaagaagaggagtacctgcaggcccaggtgcggagcagaagcaagctggacgcccctaaggtggatctgctggtgaagaattgcctcctgcccctgagagagtacttcaagtatttcagccagaatagtctgcccctgggcggcccaagcagcggcgcccctcctcccagcggcggcagcccagccggctccccaacctctaccgaggagggcacctctgagtccgccacccccgagagcggccctggcacctccaccgagcccagcgagggcagcgcacccggcagccctgccggcagccccacctccacagaggagggaaccagcaccgagcccagcgaaggcagcgccccaggcaccagcaccgagcctagtgagggcggctctggcggcggcagcgcccaggagattaaacggatcaacaagatcagaagaagacttgtgaaagacagcaacaccaagaaggccggcaagacaggccccatgaaaaccctgctggttagagtgatgacacccgatctgagagagcggctggaaaacctgagaaagaagcctgaaaatatcccccagcccatcagcaatacatctagagccaacctgaataagctgctgaccgattacaccgaaatgaagaaggcgatcctgcatgtgtactgggaagagttccagaaggaccctgtgggcctgatgagccgggtggcccagcctgccagcaagaagatcgatcagaacaagctgaaacctgagatggacgagaagggcaacctgaccaccgccggctttgcctgctctcagtgtggccagcccctgttcgtgtacaagctggagcaggtgtctgagaagggcaaggcttacaccaactacttcggacggtgcaatgtggccgagcacgaaaagctgatcctgctggcccagctgaagcccgagaaggatagcgacgaagccgtgacatatagcctgggaaagtttgggcagagggccctggatttctacagcattcatgtgaccaaggagtccacccaccccgtgaagcccctggcccagatcgccggaaacagatacgcctccggacctgtgggaaaggccctgagcgacgcatgtatgggcacaatcgcctccttcctgtctaagtaccaggacatcatcatcgaacaccagaaggtggtgaagggcaaccagaagagactggagagcctgcgggagctggccggcaaggaaaacctggaataccctagcgtgaccctgccacctcagcctcacaccaaggagggcgttgatgcctacaacgaagtgatcgcccgggtgcgaatgtgggtgaacctgaacctgtggcagaagctgaagctaagcagagatgatgccaagcctctgctgagactgaagggattcccttcctttcctctggtcgagagacaggccaacgaagtggactggtgggacatggtgtgtaacgtgaagaagctgatcaacgagaaaaaggaggatggcaaggtgttttggcagaatctggctggctacaagagacaggaagccctgagaccatacctgagcagcgaggaagatcggaagaagggaaagaaattcgctcggtaccagctgggcgacctgctgctgcacctggaaaagaagcacggcgaggactggggaaaggtgtacgacgaggcctgggagcggattgacaagaaagtggaaggcctgagcaagcacatcaagctggaagaggaacggagaagcgaggacgcccagagcaaggccgccctgaccgactggctgcgggctaaggccagcttcgtgatcgagggcctgaaggaggccgacaaggacgagttctgcagatgcgagctgaagctgcagaagtggtacggggacctgcggggaaagcccttcgccatcgaagccgagaacagcatcctggacatcagcggcttcagcaagcagtacaactgtgccttcatctggcagaaggacggcgtgaagaagctgaacctgtacctgatcatcaactacttcaagggcggcaagctgcggttcaagaagatcaaacctgaagccttcgaagccaacagattctacaccgtgatcaacaaaaagagcggcgagatcgtgcccatggaggtgaacttcaacttcgacgaccccaacctgatcatcctgcctctggcctttggcaagagacagggcagagaattcatctggaacgacctgctgtccctggaaaccggcagcctgaagctggccaacggaagagtgatcgagaagacactgtacaacagaagaacccggcaggatgagcctgccctgttcgtggccctgaccttcgagcggcgggaggtcctggactcctccaatatcaaaccaatgaacctgatcggcgtggcaagaggcgaaaacatccccgccgtgatcgccctgaccgaccccgagggctgcccactgagccggtttaaggatagcctgggaaacccaacccacatcctgagaatcggcgagagctataaggagaagcagcggaccatccaggccaagaaggaggtggagcagcggagagccggcggctacagccggaagtacgccagcaaagccaagaatctggcagacgatatggtgagaaacaccgctagagatctgctgtactacgccgtgacccaggatgccatgctgatcttcgccaacctgagccggggcttcggccggcagggcaagcggaccttcatggccgagagacagtacacacggatggaggactggctgaccgccaagctggcctacgagggcctgagcaagacctacctgtccaagacactggcccagtacacctccaagacatgcagcaactgtgggtttaccatcaccagcgccgactacgacagggtgctggagaagctgaagaagacagcaacaggctggatgaccacaattaacggcaaggagctgaaggtggagggccagattacctactacaacagatacaagagacagaacgtagtcaaggacctgtccgtcgagctggatagactgagcgaagaatctgtgaacaacgacatctcctcctggacaaagggcagaagcggagaagctctgagcctcctgaagaaaagattctcccatagacccgtgcaggagaagttcgtgtgcctgaactgcggcttcgagacacacgcagccgagcaagccgccctgaacatcgccagatcctggctgttcctgcggagccaggagtacaagaaataccagacaaacaagacaaccggcaacaccgataagagagccttcgtcgagacctggcagtccttttaccggaagaagcttaaggaggtgtggaaacctgccgtgcggtctggcggatctggcggaggctccacaagcctgcaggtgagcgtgagcttcgaggacgtgaccgtggacttcagcagggaggagtggcagcacctggacagcgcccagaggaggctgtaccaggacgtgatgctggagaactacagccacctgctgagcctgggctacgaggtgcccaagcccgaggtgatcttcaagctggagcagggcgaggagccctgggccctgaaggagaagaccctgcaccacagctgcagcgacgacaccaccctgaccagccccaagaaaaagagaaaagtctaagctgccttctgcggggcttgccttctggccatgcccttcttctctcccttgcacctgtacctcttggtctttgaataaagcctgagtaggaaggctagcaaaaaaaaaaaaaaaaaaaaaaaaaaaaaaaaaaaaaaaaaaaaaaaaaaaaaaaaaaaaaaaaaaaaaaaaaaaaaaaa

SEQ ID NO: 3621 - RNA, 5419 nt, synthetic construct
  source 1..5419: mol_type = other RNA
aggaaataagagagaaaagaagagtaagaagaaatataagagccaccatggcccctaagaagaagcgtaaagtgagccgggtgaacggcagcggcagcggcggcggcatgaaccacgaccaggagttcgacccccctaaggtgtaccctcccgtccccgccgagaagagaaagcccatccgggtcctgagcctgttcgatggcatcgccaccggtctgctggtgctgaaggacctgggcatccaggtggataggtacattgcctccgaggtgtgcgaggactccatcaccgtgggaatggtgcgtcatcagggcaagatcatgtacgtgggcgacgtgcggagcgtgacacagaagcatatccaggagtggggccctttcgacctggtgatcggcggcagcccttgcaatgacctgagcatcgtgaacccagcccggaagggcctgtacgagggaaccggcagactgttcttcgagttttacagactgctgcacgacgcccggcctaaggaaggcgacgaccggcccttcttttggctgttcgagaatgtggtggccatgggagtcagcgacaagcgggatattagccggttcctggagagcaaccccgtgatgatcgatgccaaggaagtgagcgccgcccaccgggccagatacttctggggcaatctgcctggcatgaacagacccctggccagcaccgtgaacgacaagctggagctgcaggagtgcctggagcacggccggatcgccaagttcagcaaggtgagaaccatcaccacccgaagcaacagcatcaaacaaggcaaggaccagcactttcctgtgttcatgaacgagaaggaggacatcctgtggtgtaccgagatggagagagtgttcgggttcccagtccactacacagatgtcagcaacatgtctagactggccagacagagactgctgggaagaagctggtccgtccctgtgatcagacacctgttcgcccctctgaaggagtacttcgcctgcgtgagcagcggcaacagcaacgccaacagccggggccccagcttctctagcggcctggtgccactgtccctgagagggagccacatgggccccatggagatctacaaaaccgtgagcgcctggaagcggcagcctgtgcgcgtgctgagcctgtttcggaatatcgataaagtcctgaaaagcctgggattcctggagagcggctctggctccggcggtggcaccctgaagtacgtggaggatgtgacaaacgtggtcagacgggatgtggagaagtggggccccttcgatctggtgtacggcagcacccaacccctgggcagctcttgtgaccggtgccctggctggtacatgtttcagttccaccggatcctgcagtacgccctgccgagacaggagtcccagcggccattcttttggattttcatggacaacttgctgctgaccgaggatgaccaggaaactaccactcggttcctgcagaccgaagccgtgaccctgcaggacgtgagaggccgggactaccagaacgccatgcgggtgtggtccaacatccctggactgaaaagcaagcacgcacctctgacccctaaagaagaggagtacctgcaggcccaggtgcggagcagaagcaagctggacgcccctaaggtggatctgctggtgaagaattgcctcctgcccctgagagagtacttcaagtatttcagccagaatagtctgcccctgggcggcccaagcagcggcgcccctcctcccagcggcggcagcccagccggctccccaacctctaccgaggagggcacctctgagtccgccacccccgagagcggccctggcacctccaccgagcccagcgagggcagcgcacccggcagccctgccggcagccccacctccacagaggagggaaccagcaccgagcccagcgaaggcagcgccccaggcaccagcaccgagcctagtgagggcggctctggcggcggcagcgcccaggagattaaacggatcaacaagatcagaagaagacttgtgaaagacagcaacaccaagaaggccggcaagacaggccccatgaaaaccctgctggttagagtgatgacacccgatctgagagagcggctggaaaacctgagaaagaagcctgaaaatatcccccagcccatcagcaatacatctagagccaacctgaataagctgctgaccgattacaccgaaatgaagaaggcgatcctgcatgtgtactgggaagagttccagaaggaccctgtgggcctgatgagccgggtggcccagcctgccagcaagaagatcgatcagaacaagctgaaacctgagatggacgagaagggcaacctgaccaccgccggctttgcctgctctcagtgtggccagcccctgttcgtgtacaagctggagcaggtgtctgagaagggcaaggcttacaccaactacttcggacggtgcaatgtggccgagcacgaaaagctgatcctgctggcccagctgaagcccgagaaggatagcgacgaagccgtgacatatagcctgggaaagtttgggcagagggccctggatttctacagcattcatgtgaccaaggagtccacccaccccgtgaagcccctggcccagatcgccggaaacagatacgcctccggacctgtgggaaaggccctgagcgacgcatgtatgggcacaatcgcctccttcctgtctaagtaccaggacatcatcatcgaacaccagaaggtggtgaagggcaaccagaagagactggagagcctgcgggagctggccggcaaggaaaacctggaataccctagcgtgaccctgccacctcagcctcacaccaaggagggcgttgatgcctacaacgaagtgatcgcccgggtgcgaatgtgggtgaacctgaacctgtggcagaagctgaagctaagcagagatgatgccaagcctctgctgagactgaagggattcccttcctttcctctggtcgagagacaggccaacgaagtggactggtgggacatggtgtgtaacgtgaagaagctgatcaacgagaaaaaggaggatggcaaggtgttttggcagaatctggctggctacaagagacaggaagccctgagaccatacctgagcagcgaggaagatcggaagaagggaaagaaattcgctcggtaccagctgggcgacctgctgctgcacctggaaaagaagcacggcgaggactggggaaaggtgtacgacgaggcctgggagcggattgacaagaaagtggaaggcctgagcaagcacatcaagctggaagaggaacggagaagcgaggacgcccagagcaaggccgccctgaccgactggctgcgggctaaggccagcttcgtgatcgagggcctgaaggaggccgacaaggacgagttctgcagatgcgagctgaagctgcagaagtggtacggggacctgcggggaaagcccttcgccatcgaagccgagaacagcatcctggacatcagcggcttcagcaagcagtacaactgtgccttcatctggcagaaggacggcgtgaagaagctgaacctgtacctgatcatcaactacttcaagggcggcaagctgcggttcaagaagatcaaacctgaagccttcgaagccaacagattctacaccgtgatcaacaaaaagagcggcgagatcgtgcccatggaggtgaacttcaacttcgacgaccccaacctgatcatcctgcctctggcctttggcaagagacagggcagagaattcatctggaacgacctgctgtccctggaaaccggcagcctgaagctggccaacggaagagtgatcgagaagacactgtacaacagaagaacccggcaggatgagcctgccctgttcgtggccctgaccttcgagcggcgggaggtcctggactcctccaatatcaaaccaatgaacctgatcggcgtggcaagaggcgaaaacatccccgccgtgatcgccctgaccgaccccgagggctgcccactgagccggtttaaggatagcctgggaaacccaacccacatcctgagaatcggcgagagctataaggagaagcagcggaccatccaggccaagaaggaggtggagcagcggagagccggcggctacagccggaagtacgccagcaaagccaagaatctggcagacgatatggtgagaaacaccgctagagatctgctgtactacgccgtgacccaggatgccatgctgatcttcgccaacctgagccggggcttcggccggcagggcaagcggaccttcatggccgagagacagtacacacggatggaggactggctgaccgccaagctggcctacgagggcctgagcaagacctacctgtccaagacactggcccagtacacctccaagacatgcagcaactgtgggtttaccatcaccagcgccgactacgacagggtgctggagaagctgaagaagacagcaacaggctggatgaccacaattaacggcaaggagctgaaggtggagggccagattacctactacaacagatacaagagacagaacgtagtcaaggacctgtccgtcgagctggatagactgagcgaagaatctgtgaacaacgacatctcctcctggacaaagggcagaagcggagaagctctgagcctcctgaagaaaagattctcccatagacccgtgcaggagaagttcgtgtgcctgaactgcggcttcgagacacacgcagccgagcaagccgccctgaacatcgccagatcctggctgttcctgcggagccaggagtacaagaaataccagacaaacaagacaaccggcaacaccgataagagagccttcgtcgagacctggcagtccttttaccggaagaagcttaaggaggtgtggaaacctgccgtgcggtctggcggatctggcggaggctccacaagcgcccagggcctggtgcccttcgaggaggtggccgtgtacttcaccaggaccgagtgggccctgctggaccccgcccagagggccctgtacagggccgtgatgcaggagaactacgagaacgtgaccagcctgggcttcgccgtgagcaagcccgacgtgatcagccagctggagaggggcgaggagccctgggtgcccgagctgcagggcagcgagcacagggagatcctgggcggcaccggcaccagccccaagaaaaagagaaaagtctaagctgccttctgcggggcttgccttctggccatgcccttcttctctcccttgcacctgtacctcttggtctttgaataaagcctgagtaggaaggctagcaaaaaaaaaaaaaaaaaaaaaaaaaaaaaaaaaaaaaaaaaaaaaaaaaaaaaaaaaaaaaaaaaaaaaaaaaaaaaaaa

SEQ ID NO: 3622 - RNA, 5419 nt, synthetic construct
  source 1..5419: mol_type = other RNA
aggaaataagagagaaaagaagagtaagaagaaatataagagccaccatggcccctaagaagaagcgtaaagtgagccgggtgaacggcagcggcagcggcggcggcatgaaccacgaccaggagttcgacccccctaaggtgtaccctcccgtccccgccgagaagagaaagcccatccgggtcctgagcctgttcgatggcatcgccaccggtctgctggtgctgaaggacctgggcatccaggtggataggtacattgcctccgaggtgtgcgaggactccatcaccgtgggaatggtgcgtcatcagggcaagatcatgtacgtgggcgacgtgcggagcgtgacacagaagcatatccaggagtggggccctttcgacctggtgatcggcggcagcccttgcaatgacctgagcatcgtgaacccagcccggaagggcctgtacgagggaaccggcagactgttcttcgagttttacagactgctgcacgacgcccggcctaaggaaggcgacgaccggcccttcttttggctgttcgagaatgtggtggccatgggagtcagcgacaagcgggatattagccggttcctggagagcaaccccgtgatgatcgatgccaaggaagtgagcgccgcccaccgggccagatacttctggggcaatctgcctggcatgaacagacccctggccagcaccgtgaacgacaagctggagctgcaggagtgcctggagcacggccggatcgccaagttcagcaaggtgagaaccatcaccacccgaagcaacagcatcaaacaaggcaaggaccagcactttcctgtgttcatgaacgagaaggaggacatcctgtggtgtaccgagatggagagagtgttcgggttcccagtccactacacagatgtcagcaacatgtctagactggccagacagagactgctgggaagaagctggtccgtccctgtgatcagacacctgttcgcccctctgaaggagtacttcgcctgcgtgagcagcggcaacagcaacgccaacagccggggccccagcttctctagcggcctggtgccactgtccctgagagggagccacatgggccccatggagatctacaaaaccgtgagcgcctggaagcggcagcctgtgcgcgtgctgagcctgtttcggaatatcgataaagtcctgaaaagcctgggattcctggagagcggctctggctccggcggtggcaccctgaagtacgtggaggatgtgacaaacgtggtcagacgggatgtggagaagtggggccccttcgatctggtgtacggcagcacccaacccctgggcagctcttgtgaccggtgccctggctggtacatgtttcagttccaccggatcctgcagtacgccctgccgagacaggagtcccagcggccattcttttggattttcatggacaacttgctgctgaccgaggatgaccaggaaactaccactcggttcctgcagaccgaagccgtgaccctgcaggacgtgagaggccgggactaccagaacgccatgcgggtgtggtccaacatccctggactgaaaagcaagcacgcacctctgacccctaaagaagaggagtacctgcaggcccaggtgcggagcagaagcaagctggacgcccctaaggtggatctgctggtgaagaattgcctcctgcccctgagagagtacttcaagtatttcagccagaatagtctgcccctgggcggcccaagcagcggcgcccctcctcccagcggcggcagcccagccggctccccaacctctaccgaggagggcacctctgagtccgccacccccgagagcggccctggcacctccaccgagcccagcgagggcagcgcacccggcagccctgccggcagccccacctccacagaggagggaaccagcaccgagcccagcgaaggcagcgccccaggcaccagcaccgagcctagtgagggcggctctggcggcggcagcgcccaggagattaaacggatcaacaagatcagaagaagacttgtgaaagacagcaacaccaagaaggccggcaagacaggccccatgaaaaccctgctggttagagtgatgacacccgatctgagagagcggctggaaaacctgagaaagaagcctgaaaatatcccccagcccatcagcaatacatctagagccaacctgaataagctgctgaccgattacaccgaaatgaagaaggcgatcctgcatgtgtactgggaagagttccagaaggaccctgtgggcctgatgagccgggtggcccagcctgccagcaagaagatcgatcagaacaagctgaaacctgagatggacgagaagggcaacctgaccaccgccggctttgcctgctctcagtgtggccagcccctgttcgtgtacaagctggagcaggtgtctgagaagggcaaggcttacaccaactacttcggacggtgcaatgtggccgagcacgaaaagctgatcctgctggcccagctgaagcccgagaaggatagcgacgaagccgtgacatatagcctgggaaagtttgggcagagggccctggatttctacagcattcatgtgaccaaggagtccacccaccccgtgaagcccctggcccagatcgccggaaacagatacgcctccggacctgtgggaaaggccctgagcgacgcatgtatgggcacaatcgcctccttcctgtctaagtaccaggacatcatcatcgaacaccagaaggtggtgaagggcaaccagaagagactggagagcctgcgggagctggccggcaaggaaaacctggaataccctagcgtgaccctgccacctcagcctcacaccaaggagggcgttgatgcctacaacgaagtgatcgcccgggtgcgaatgtgggtgaacctgaacctgtggcagaagctgaagctaagcagagatgatgccaagcctctgctgagactgaagggattcccttcctttcctctggtcgagagacaggccaacgaagtggactggtgggacatggtgtgtaacgtgaagaagctgatcaacgagaaaaaggaggatggcaaggtgttttggcagaatctggctggctacaagagacaggaagccctgagaccatacctgagcagcgaggaagatcggaagaagggaaagaaattcgctcggtaccagctgggcgacctgctgctgcacctggaaaagaagcacggcgaggactggggaaaggtgtacgacgaggcctgggagcggattgacaagaaagtggaaggcctgagcaagcacatcaagctggaagaggaacggagaagcgaggacgcccagagcaaggccgccctgaccgactggctgcgggctaaggccagcttcgtgatcgagggcctgaaggaggccgacaaggacgagttctgcagatgcgagctgaagctgcagaagtggtacggggacctgcggggaaagcccttcgccatcgaagccgagaacagcatcctggacatcagcggcttcagcaagcagtacaactgtgccttcatctggcagaaggacggcgtgaagaagctgaacctgtacctgatcatcaactacttcaagggcggcaagctgcggttcaagaagatcaaacctgaagccttcgaagccaacagattctacaccgtgatcaacaaaaagagcggcgagatcgtgcccatggaggtgaacttcaacttcgacgaccccaacctgatcatcctgcctctggcctttggcaagagacagggcagagaattcatctggaacgacctgctgtccctggaaaccggcagcctgaagctggccaacggaagagtgatcgagaagacactgtacaacagaagaacccggcaggatgagcctgccctgttcgtggccctgaccttcgagcggcgggaggtcctggactcctccaatatcaaaccaatgaacctgatcggcgtggcaagaggcgaaaacatccccgccgtgatcgccctgaccgaccccgagggctgcccactgagccggtttaaggatagcctgggaaacccaacccacatcctgagaatcggcgagagctataaggagaagcagcggaccatccaggccaagaaggaggtggagcagcggagagccggcggctacagccggaagtacgccagcaaagccaagaatctggcagacgatatggtgagaaacaccgctagagatctgctgtactacgccgtgacccaggatgccatgctgatcttcgccaacctgagccggggcttcggccggcagggcaagcggaccttcatggccgagagacagtacacacggatggaggactggctgaccgccaagctggcctacgagggcctgagcaagacctacctgtccaagacactggcccagtacacctccaagacatgcagcaactgtgggtttaccatcaccagcgccgactacgacagggtgctggagaagctgaagaagacagcaacaggctggatgaccacaattaacggcaaggagctgaaggtggagggccagattacctactacaacagatacaagagacagaacgtagtcaaggacctgtccgtcgagctggatagactgagcgaagaatctgtgaacaacgacatctcctcctggacaaagggcagaagcggagaagctctgagcctcctgaagaaaagattctcccatagacccgtgcaggagaagttcgtgtgcctgaactgcggcttcgagacacacgcagccgagcaagccgccctgaacatcgccagatcctggctgttcctgcggagccaggagtacaagaaataccagacaaacaagacaaccggcaacaccgataagagagccttcgtcgagacctggcagtccttttaccggaagaagcttaaggaggtgtggaaacctgccgtgcggtctggcggatctggcggaggctccacaagcagccagggcagcgtgagcttcaaggacgtgaccgtggacttcacccaggaggagtggcagcagctggaccccgcccagaaggccctgtacagggacgtgatgctggagaactactgccacttcgtgagcgtgggcttccacatgaccaagcccgacatgatcaggaagctggagcagggcgaggagctgtggacccagaggatcttccccagctacagctacctggccgaggacggcaagaccaccagccccaagaaaaagagaaaagtctaagctgccttctgcggggcttgccttctggccatgcccttcttctctcccttgcacctgtacctcttggtctttgaataaagcctgagtaggaaggctagcaaaaaaaaaaaaaaaaaaaaaaaaaaaaaaaaaaaaaaaaaaaaaaaaaaaaaaaaaaaaaaaaaaaaaaaaaaaaaaaa

SEQ ID NO: 3623 - RNA, 5419 nt, synthetic construct
  source 1..5419: mol_type = other RNA
aggaaataagagagaaaagaagagtaagaagaaatataagagccaccatggcccctaagaagaagcgtaaagtgagccgggtgaacggcagcggcagcggcggcggcatgaaccacgaccaggagttcgacccccctaaggtgtaccctcccgtccccgccgagaagagaaagcccatccgggtcctgagcctgttcgatggcatcgccaccggtctgctggtgctgaaggacctgggcatccaggtggataggtacattgcctccgaggtgtgcgaggactccatcaccgtgggaatggtgcgtcatcagggcaagatcatgtacgtgggcgacgtgcggagcgtgacacagaagcatatccaggagtggggccctttcgacctggtgatcggcggcagcccttgcaatgacctgagcatcgtgaacccagcccggaagggcctgtacgagggaaccggcagactgttcttcgagttttacagactgctgcacgacgcccggcctaaggaaggcgacgaccggcccttcttttggctgttcgagaatgtggtggccatgggagtcagcgacaagcgggatattagccggttcctggagagcaaccccgtgatgatcgatgccaaggaagtgagcgccgcccaccgggccagatacttctggggcaatctgcctggcatgaacagacccctggccagcaccgtgaacgacaagctggagctgcaggagtgcctggagcacggccggatcgccaagttcagcaaggtgagaaccatcaccacccgaagcaacagcatcaaacaaggcaaggaccagcactttcctgtgttcatgaacgagaaggaggacatcctgtggtgtaccgagatggagagagtgttcgggttcccagtccactacacagatgtcagcaacatgtctagactggccagacagagactgctgggaagaagctggtccgtccctgtgatcagacacctgttcgcccctctgaaggagtacttcgcctgcgtgagcagcggcaacagcaacgccaacagccggggccccagcttctctagcggcctggtgccactgtccctgagagggagccacatgggccccatggagatctacaaaaccgtgagcgcctggaagcggcagcctgtgcgcgtgctgagcctgtttcggaatatcgataaagtcctgaaaagcctgggattcctggagagcggctctggctccggcggtggcaccctgaagtacgtggaggatgtgacaaacgtggtcagacgggatgtggagaagtggggccccttcgatctggtgtacggcagcacccaacccctgggcagctcttgtgaccggtgccctggctggtacatgtttcagttccaccggatcctgcagtacgccctgccgagacaggagtcccagcggccattcttttggattttcatggacaacttgctgctgaccgaggatgaccaggaaactaccactcggttcctgcagaccgaagccgtgaccctgcaggacgtgagaggccgggactaccagaacgccatgcgggtgtggtccaacatccctggactgaaaagcaagcacgcacctctgacccctaaagaagaggagtacctgcaggcccaggtgcggagcagaagcaagctggacgcccctaaggtggatctgctggtgaagaattgcctcctgcccctgagagagtacttcaagtatttcagccagaatagtctgcccctgggcggcccaagcagcggcgcccctcctcccagcggcggcagcccagccggctccccaacctctaccgaggagggcacctctgagtccgccacccccgagagcggccctggcacctccaccgagcccagcgagggcagcgcacccggcagccctgccggcagccccacctccacagaggagggaaccagcaccgagcccagcgaaggcagcgccccaggcaccagcaccgagcctagtgagggcggctctggcggcggcagcgcccaggagattaaacggatcaacaagatcagaagaagacttgtgaaagacagcaacaccaagaaggccggcaagacaggccccatgaaaaccctgctggttagagtgatgacacccgatctgagagagcggctggaaaacctgagaaagaagcctgaaaatatcccccagcccatcagcaatacatctagagccaacctgaataagctgctgaccgattacaccgaaatgaagaaggcgatcctgcatgtgtactgggaagagttccagaaggaccctgtgggcctgatgagccgggtggcccagcctgccagcaagaagatcgatcagaacaagctgaaacctgagatggacgagaagggcaacctgaccaccgccggctttgcctgctctcagtgtggccagcccctgttcgtgtacaagctggagcaggtgtctgagaagggcaaggcttacaccaactacttcggacggtgcaatgtggccgagcacgaaaagctgatcctgctggcccagctgaagcccgagaaggatagcgacgaagccgtgacatatagcctgggaaagtttgggcagagggccctggatttctacagcattcatgtgaccaaggagtccacccaccccgtgaagcccctggcccagatcgccggaaacagatacgcctccggacctgtgggaaaggccctgagcgacgcatgtatgggcacaatcgcctccttcctgtctaagtaccaggacatcatcatcgaacaccagaaggtggtgaagggcaaccagaagagactggagagcctgcgggagctggccggcaaggaaaacctggaataccctagcgtgaccctgccacctcagcctcacaccaaggagggcgttgatgcctacaacgaagtgatcgcccgggtgcgaatgtgggtgaacctgaacctgtggcagaagctgaagctaagcagagatgatgccaagcctctgctgagactgaagggattcccttcctttcctctggtcgagagacaggccaacgaagtggactggtgggacatggtgtgtaacgtgaagaagctgatcaacgagaaaaaggaggatggcaaggtgttttggcagaatctggctggctacaagagacaggaagccctgagaccatacctgagcagcgaggaagatcggaagaagggaaagaaattcgctcggtaccagctgggcgacctgctgctgcacctggaaaagaagcacggcgaggactggggaaaggtgtacgacgaggcctgggagcggattgacaagaaagtggaaggcctgagcaagcacatcaagctggaagaggaacggagaagcgaggacgcccagagcaaggccgccctgaccgactggctgcgggctaaggccagcttcgtgatcgagggcctgaaggaggccgacaaggacgagttctgcagatgcgagctgaagctgcagaagtggtacggggacctgcggggaaagcccttcgccatcgaagccgagaacagcatcctggacatcagcggcttcagcaagcagtacaactgtgccttcatctggcagaaggacggcgtgaagaagctgaacctgtacctgatcatcaactacttcaagggcggcaagctgcggttcaagaagatcaaacctgaagccttcgaagccaacagattctacaccgtgatcaacaaaaagagcggcgagatcgtgcccatggaggtgaacttcaacttcgacgaccccaacctgatcatcctgcctctggcctttggcaagagacagggcagagaattcatctggaacgacctgctgtccctggaaaccggcagcctgaagctggccaacggaagagtgatcgagaagacactgtacaacagaagaacccggcaggatgagcctgccctgttcgtggccctgaccttcgagcggcgggaggtcctggactcctccaatatcaaaccaatgaacctgatcggcgtggcaagaggcgaaaacatccccgccgtgatcgccctgaccgaccccgagggctgcccactgagccggtttaaggatagcctgggaaacccaacccacatcctgagaatcggcgagagctataaggagaagcagcggaccatccaggccaagaaggaggtggagcagcggagagccggcggctacagccggaagtacgccagcaaagccaagaatctggcagacgatatggtgagaaacaccgctagagatctgctgtactacgccgtgacccaggatgccatgctgatcttcgccaacctgagccggggcttcggccggcagggcaagcggaccttcatggccgagagacagtacacacggatggaggactggctgaccgccaagctggcctacgagggcctgagcaagacctacctgtccaagacactggcccagtacacctccaagacatgcagcaactgtgggtttaccatcaccagcgccgactacgacagggtgctggagaagctgaagaagacagcaacaggctggatgaccacaattaacggcaaggagctgaaggtggagggccagattacctactacaacagatacaagagacagaacgtagtcaaggacctgtccgtcgagctggatagactgagcgaagaatctgtgaacaacgacatctcctcctggacaaagggcagaagcggagaagctctgagcctcctgaagaaaagattctcccatagacccgtgcaggagaagttcgtgtgcctgaactgcggcttcgagacacacgcagccgagcaagccgccctgaacatcgccagatcctggctgttcctgcggagccaggagtacaagaaataccagacaaacaagacaaccggcaacaccgataagagagccttcgtcgagacctggcagtccttttaccggaagaagcttaaggaggtgtggaaacctgccgtgcggtctggcggatctggcggaggctccacaagcaccctgctgaccttcagggacgtggccatcgagttcagcctggaggagtggaagtgcctggaccccgcccagcagaacctgtacagggacgtgatgctggagaactacaggaacctgttcagcatcggcctgaccgtgagcaagcccggcctgatcacctgcctggagcagaggaaggagccctggaacgtgaagaggcaggaggccgtggacggccaccccgccatgagcagccacgtgaccaccagccccaagaaaaagagaaaagtctaagctgccttctgcggggcttgccttctggccatgcccttcttctctcccttgcacctgtacctcttggtctttgaataaagcctgagtaggaaggctagcaaaaaaaaaaaaaaaaaaaaaaaaaaaaaaaaaaaaaaaaaaaaaaaaaaaaaaaaaaaaaaaaaaaaaaaaaaaaaaaa

SEQ ID NO: 3624 - RNA, 5419 nt, synthetic construct
  source 1..5419: mol_type = other RNA
aggaaataagagagaaaagaagagtaagaagaaatataagagccaccatggcccctaagaagaagcgtaaagtgagccgggtgaacggcagcggcagcggcggcggcatgaaccacgaccaggagttcgacccccctaaggtgtaccctcccgtccccgccgagaagagaaagcccatccgggtcctgagcctgttcgatggcatcgccaccggtctgctggtgctgaaggacctgggcatccaggtggataggtacattgcctccgaggtgtgcgaggactccatcaccgtgggaatggtgcgtcatcagggcaagatcatgtacgtgggcgacgtgcggagcgtgacacagaagcatatccaggagtggggccctttcgacctggtgatcggcggcagcccttgcaatgacctgagcatcgtgaacccagcccggaagggcctgtacgagggaaccggcagactgttcttcgagttttacagactgctgcacgacgcccggcctaaggaaggcgacgaccggcccttcttttggctgttcgagaatgtggtggccatgggagtcagcgacaagcgggatattagccggttcctggagagcaaccccgtgatgatcgatgccaaggaagtgagcgccgcccaccgggccagatacttctggggcaatctgcctggcatgaacagacccctggccagcaccgtgaacgacaagctggagctgcaggagtgcctggagcacggccggatcgccaagttcagcaaggtgagaaccatcaccacccgaagcaacagcatcaaacaaggcaaggaccagcactttcctgtgttcatgaacgagaaggaggacatcctgtggtgtaccgagatggagagagtgttcgggttcccagtccactacacagatgtcagcaacatgtctagactggccagacagagactgctgggaagaagctggtccgtccctgtgatcagacacctgttcgcccctctgaaggagtacttcgcctgcgtgagcagcggcaacagcaacgccaacagccggggccccagcttctctagcggcctggtgccactgtccctgagagggagccacatgggccccatggagatctacaaaaccgtgagcgcctggaagcggcagcctgtgcgcgtgctgagcctgtttcggaatatcgataaagtcctgaaaagcctgggattcctggagagcggctctggctccggcggtggcaccctgaagtacgtggaggatgtgacaaacgtggtcagacgggatgtggagaagtggggccccttcgatctggtgtacggcagcacccaacccctgggcagctcttgtgaccggtgccctggctggtacatgtttcagttccaccggatcctgcagtacgccctgccgagacaggagtcccagcggccattcttttggattttcatggacaacttgctgctgaccgaggatgaccaggaaactaccactcggttcctgcagaccgaagccgtgaccctgcaggacgtgagaggccgggactaccagaacgccatgcgggtgtggtccaacatccctggactgaaaagcaagcacgcacctctgacccctaaagaagaggagtacctgcaggcccaggtgcggagcagaagcaagctggacgcccctaaggtggatctgctggtgaagaattgcctcctgcccctgagagagtacttcaagtatttcagccagaatagtctgcccctgggcggcccaagcagcggcgcccctcctcccagcggcggcagcccagccggctccccaacctctaccgaggagggcacctctgagtccgccacccccgagagcggccctggcacctccaccgagcccagcgagggcagcgcacccggcagccctgccggcagccccacctccacagaggagggaaccagcaccgagcccagcgaaggcagcgccccaggcaccagcaccgagcctagtgagggcggctctggcggcggcagcgcccaggagattaaacggatcaacaagatcagaagaagacttgtgaaagacagcaacaccaagaaggccggcaagacaggccccatgaaaaccctgctggttagagtgatgacacccgatctgagagagcggctggaaaacctgagaaagaagcctgaaaatatcccccagcccatcagcaatacatctagagccaacctgaataagctgctgaccgattacaccgaaatgaagaaggcgatcctgcatgtgtactgggaagagttccagaaggaccctgtgggcctgatgagccgggtggcccagcctgccagcaagaagatcgatcagaacaagctgaaacctgagatggacgagaagggcaacctgaccaccgccggctttgcctgctctcagtgtggccagcccctgttcgtgtacaagctggagcaggtgtctgagaagggcaaggcttacaccaactacttcggacggtgcaatgtggccgagcacgaaaagctgatcctgctggcccagctgaagcccgagaaggatagcgacgaagccgtgacatatagcctgggaaagtttgggcagagggccctggatttctacagcattcatgtgaccaaggagtccacccaccccgtgaagcccctggcccagatcgccggaaacagatacgcctccggacctgtgggaaaggccctgagcgacgcatgtatgggcacaatcgcctccttcctgtctaagtaccaggacatcatcatcgaacaccagaaggtggtgaagggcaaccagaagagactggagagcctgcgggagctggccggcaaggaaaacctggaataccctagcgtgaccctgccacctcagcctcacaccaaggagggcgttgatgcctacaacgaagtgatcgcccgggtgcgaatgtgggtgaacctgaacctgtggcagaagctgaagctaagcagagatgatgccaagcctctgctgagactgaagggattcccttcctttcctctggtcgagagacaggccaacgaagtggactggtgggacatggtgtgtaacgtgaagaagctgatcaacgagaaaaaggaggatggcaaggtgttttggcagaatctggctggctacaagagacaggaagccctgagaccatacctgagcagcgaggaagatcggaagaagggaaagaaattcgctcggtaccagctgggcgacctgctgctgcacctggaaaagaagcacggcgaggactggggaaaggtgtacgacgaggcctgggagcggattgacaagaaagtggaaggcctgagcaagcacatcaagctggaagaggaacggagaagcgaggacgcccagagcaaggccgccctgaccgactggctgcgggctaaggccagcttcgtgatcgagggcctgaaggaggccgacaaggacgagttctgcagatgcgagctgaagctgcagaagtggtacggggacctgcggggaaagcccttcgccatcgaagccgagaacagcatcctggacatcagcggcttcagcaagcagtacaactgtgccttcatctggcagaaggacggcgtgaagaagctgaacctgtacctgatcatcaactacttcaagggcggcaagctgcggttcaagaagatcaaacctgaagccttcgaagccaacagattctacaccgtgatcaacaaaaagagcggcgagatcgtgcccatggaggtgaacttcaacttcgacgaccccaacctgatcatcctgcctctggcctttggcaagagacagggcagagaattcatctggaacgacctgctgtccctggaaaccggcagcctgaagctggccaacggaagagtgatcgagaagacactgtacaacagaagaacccggcaggatgagcctgccctgttcgtggccctgaccttcgagcggcgggaggtcctggactcctccaatatcaaaccaatgaacctgatcggcgtggcaagaggcgaaaacatccccgccgtgatcgccctgaccgaccccgagggctgcccactgagccggtttaaggatagcctgggaaacccaacccacatcctgagaatcggcgagagctataaggagaagcagcggaccatccaggccaagaaggaggtggagcagcggagagccggcggctacagccggaagtacgccagcaaagccaagaatctggcagacgatatggtgagaaacaccgctagagatctgctgtactacgccgtgacccaggatgccatgctgatcttcgccaacctgagccggggcttcggccggcagggcaagcggaccttcatggccgagagacagtacacacggatggaggactggctgaccgccaagctggcctacgagggcctgagcaagacctacctgtccaagacactggcccagtacacctccaagacatgcagcaactgtgggtttaccatcaccagcgccgactacgacagggtgctggagaagctgaagaagacagcaacaggctggatgaccacaattaacggcaaggagctgaaggtggagggccagattacctactacaacagatacaagagacagaacgtagtcaaggacctgtccgtcgagctggatagactgagcgaagaatctgtgaacaacgacatctcctcctggacaaagggcagaagcggagaagctctgagcctcctgaagaaaagattctcccatagacccgtgcaggagaagttcgtgtgcctgaactgcggcttcgagacacacgcagccgagcaagccgccctgaacatcgccagatcctggctgttcctgcggagccaggagtacaagaaataccagacaaacaagacaaccggcaacaccgataagagagccttcgtcgagacctggcagtccttttaccggaagaagcttaaggaggtgtggaaacctgccgtgcggtctggcggatctggcggaggctccacaagcctgcagggcagcctgagcttcgaggacgtgaccgtgggcttcagccaggaggagtggcagaggctggaccccgcccagaggaccctgtacagggacgtgatgctggagaactacagccacctggtggccgtgggctgctgcgtgcccaagcccgacgtgatcttcaggctggagcagggccagcagccctggctggtggaggaggagagcctggaccagagctgccccgaggtgtgcagggtgaccagccccaagaaaaagagaaaagtctaagctgccttctgcggggcttgccttctggccatgcccttcttctctcccttgcacctgtacctcttggtctttgaataaagcctgagtaggaaggctagcaaaaaaaaaaaaaaaaaaaaaaaaaaaaaaaaaaaaaaaaaaaaaaaaaaaaaaaaaaaaaaaaaaaaaaaaaaaaaaaa

SEQ ID NO: 3625 - RNA, 5419 nt, synthetic construct
  source 1..5419: mol_type = other RNA
aggaaataagagagaaaagaagagtaagaagaaatataagagccaccatggcccctaagaagaagcgtaaagtgagccgggtgaacggcagcggcagcggcggcggcatgaaccacgaccaggagttcgacccccctaaggtgtaccctcccgtccccgccgagaagagaaagcccatccgggtcctgagcctgttcgatggcatcgccaccggtctgctggtgctgaaggacctgggcatccaggtggataggtacattgcctccgaggtgtgcgaggactccatcaccgtgggaatggtgcgtcatcagggcaagatcatgtacgtgggcgacgtgcggagcgtgacacagaagcatatccaggagtggggccctttcgacctggtgatcggcggcagcccttgcaatgacctgagcatcgtgaacccagcccggaagggcctgtacgagggaaccggcagactgttcttcgagttttacagactgctgcacgacgcccggcctaaggaaggcgacgaccggcccttcttttggctgttcgagaatgtggtggccatgggagtcagcgacaagcgggatattagccggttcctggagagcaaccccgtgatgatcgatgccaaggaagtgagcgccgcccaccgggccagatacttctggggcaatctgcctggcatgaacagacccctggccagcaccgtgaacgacaagctggagctgcaggagtgcctggagcacggccggatcgccaagttcagcaaggtgagaaccatcaccacccgaagcaacagcatcaaacaaggcaaggaccagcactttcctgtgttcatgaacgagaaggaggacatcctgtggtgtaccgagatggagagagtgttcgggttcccagtccactacacagatgtcagcaacatgtctagactggccagacagagactgctgggaagaagctggtccgtccctgtgatcagacacctgttcgcccctctgaaggagtacttcgcctgcgtgagcagcggcaacagcaacgccaacagccggggccccagcttctctagcggcctggtgccactgtccctgagagggagccacatgggccccatggagatctacaaaaccgtgagcgcctggaagcggcagcctgtgcgcgtgctgagcctgtttcggaatatcgataaagtcctgaaaagcctgggattcctggagagcggctctggctccggcggtggcaccctgaagtacgtggaggatgtgacaaacgtggtcagacgggatgtggagaagtggggccccttcgatctggtgtacggcagcacccaacccctgggcagctcttgtgaccggtgccctggctggtacatgtttcagttccaccggatcctgcagtacgccctgccgagacaggagtcccagcggccattcttttggattttcatggacaacttgctgctgaccgaggatgaccaggaaactaccactcggttcctgcagaccgaagccgtgaccctgcaggacgtgagaggccgggactaccagaacgccatgcgggtgtggtccaacatccctggactgaaaagcaagcacgcacctctgacccctaaagaagaggagtacctgcaggcccaggtgcggagcagaagcaagctggacgcccctaaggtggatctgctggtgaagaattgcctcctgcccctgagagagtacttcaagtatttcagccagaatagtctgcccctgggcggcccaagcagcggcgcccctcctcccagcggcggcagcccagccggctccccaacctctaccgaggagggcacctctgagtccgccacccccgagagcggccctggcacctccaccgagcccagcgagggcagcgcacccggcagccctgccggcagccccacctccacagaggagggaaccagcaccgagcccagcgaaggcagcgccccaggcaccagcaccgagcctagtgagggcggctctggcggcggcagcgcccaggagattaaacggatcaacaagatcagaagaagacttgtgaaagacagcaacaccaagaaggccggcaagacaggccccatgaaaaccctgctggttagagtgatgacacccgatctgagagagcggctggaaaacctgagaaagaagcctgaaaatatcccccagcccatcagcaatacatctagagccaacctgaataagctgctgaccgattacaccgaaatgaagaaggcgatcctgcatgtgtactgggaagagttccagaaggaccctgtgggcctgatgagccgggtggcccagcctgccagcaagaagatcgatcagaacaagctgaaacctgagatggacgagaagggcaacctgaccaccgccggctttgcctgctctcagtgtggccagcccctgttcgtgtacaagctggagcaggtgtctgagaagggcaaggcttacaccaactacttcggacggtgcaatgtggccgagcacgaaaagctgatcctgctggcccagctgaagcccgagaaggatagcgacgaagccgtgacatatagcctgggaaagtttgggcagagggccctggatttctacagcattcatgtgaccaaggagtccacccaccccgtgaagcccctggcccagatcgccggaaacagatacgcctccggacctgtgggaaaggccctgagcgacgcatgtatgggcacaatcgcctccttcctgtctaagtaccaggacatcatcatcgaacaccagaaggtggtgaagggcaaccagaagagactggagagcctgcgggagctggccggcaaggaaaacctggaataccctagcgtgaccctgccacctcagcctcacaccaaggagggcgttgatgcctacaacgaagtgatcgcccgggtgcgaatgtgggtgaacctgaacctgtggcagaagctgaagctaagcagagatgatgccaagcctctgctgagactgaagggattcccttcctttcctctggtcgagagacaggccaacgaagtggactggtgggacatggtgtgtaacgtgaagaagctgatcaacgagaaaaaggaggatggcaaggtgttttggcagaatctggctggctacaagagacaggaagccctgagaccatacctgagcagcgaggaagatcggaagaagggaaagaaattcgctcggtaccagctgggcgacctgctgctgcacctggaaaagaagcacggcgaggactggggaaaggtgtacgacgaggcctgggagcggattgacaagaaagtggaaggcctgagcaagcacatcaagctggaagaggaacggagaagcgaggacgcccagagcaaggccgccctgaccgactggctgcgggctaaggccagcttcgtgatcgagggcctgaaggaggccgacaaggacgagttctgcagatgcgagctgaagctgcagaagtggtacggggacctgcggggaaagcccttcgccatcgaagccgagaacagcatcctggacatcagcggcttcagcaagcagtacaactgtgccttcatctggcagaaggacggcgtgaagaagctgaacctgtacctgatcatcaactacttcaagggcggcaagctgcggttcaagaagatcaaacctgaagccttcgaagccaacagattctacaccgtgatcaacaaaaagagcggcgagatcgtgcccatggaggtgaacttcaacttcgacgaccccaacctgatcatcctgcctctggcctttggcaagagacagggcagagaattcatctggaacgacctgctgtccctggaaaccggcagcctgaagctggccaacggaagagtgatcgagaagacactgtacaacagaagaacccggcaggatgagcctgccctgttcgtggccctgaccttcgagcggcgggaggtcctggactcctccaatatcaaaccaatgaacctgatcggcgtggcaagaggcgaaaacatccccgccgtgatcgccctgaccgaccccgagggctgcccactgagccggtttaaggatagcctgggaaacccaacccacatcctgagaatcggcgagagctataaggagaagcagcggaccatccaggccaagaaggaggtggagcagcggagagccggcggctacagccggaagtacgccagcaaagccaagaatctggcagacgatatggtgagaaacaccgctagagatctgctgtactacgccgtgacccaggatgccatgctgatcttcgccaacctgagccggggcttcggccggcagggcaagcggaccttcatggccgagagacagtacacacggatggaggactggctgaccgccaagctggcctacgagggcctgagcaagacctacctgtccaagacactggcccagtacacctccaagacatgcagcaactgtgggtttaccatcaccagcgccgactacgacagggtgctggagaagctgaagaagacagcaacaggctggatgaccacaattaacggcaaggagctgaaggtggagggccagattacctactacaacagatacaagagacagaacgtagtcaaggacctgtccgtcgagctggatagactgagcgaagaatctgtgaacaacgacatctcctcctggacaaagggcagaagcggagaagctctgagcctcctgaagaaaagattctcccatagacccgtgcaggagaagttcgtgtgcctgaactgcggcttcgagacacacgcagccgagcaagccgccctgaacatcgccagatcctggctgttcctgcggagccaggagtacaagaaataccagacaaacaagacaaccggcaacaccgataagagagccttcgtcgagacctggcagtccttttaccggaagaagcttaaggaggtgtggaaacctgccgtgcggtctggcggatctggcggaggctccacaagcatggacatggcccaggagcccgtgaccttcagggacgtggccatctacttcagcagggaggagtgggcctgcctggagcccagccagaggaccctgtacagggacgtgatgctggacaacttcagcagcgtggccgccctgggcttctgcagccccaggcccgacctggtgagcaggctggagcagtgggaggagccctgggtggaggacagggagaggcccgagctgcaggccgtgaggaggaccagccccaagaaaaagagaaaagtctaagctgccttctgcggggcttgccttctggccatgcccttcttctctcccttgcacctgtacctcttggtctttgaataaagcctgagtaggaaggctagcaaaaaaaaaaaaaaaaaaaaaaaaaaaaaaaaaaaaaaaaaaaaaaaaaaaaaaaaaaaaaaaaaaaaaaaaaaaaaaaa

SEQ ID NO: 3626 - RNA, 5419 nt, synthetic construct
  source 1..5419: mol_type = other RNA
aggaaataagagagaaaagaagagtaagaagaaatataagagccaccatggcccctaagaagaagcgtaaagtgagccgggtgaacggcagcggcagcggcggcggcatgaaccacgaccaggagttcgacccccctaaggtgtaccctcccgtccccgccgagaagagaaagcccatccgggtcctgagcctgttcgatggcatcgccaccggtctgctggtgctgaaggacctgggcatccaggtggataggtacattgcctccgaggtgtgcgaggactccatcaccgtgggaatggtgcgtcatcagggcaagatcatgtacgtgggcgacgtgcggagcgtgacacagaagcatatccaggagtggggccctttcgacctggtgatcggcggcagcccttgcaatgacctgagcatcgtgaacccagcccggaagggcctgtacgagggaaccggcagactgttcttcgagttttacagactgctgcacgacgcccggcctaaggaaggcgacgaccggcccttcttttggctgttcgagaatgtggtggccatgggagtcagcgacaagcgggatattagccggttcctggagagcaaccccgtgatgatcgatgccaaggaagtgagcgccgcccaccgggccagatacttctggggcaatctgcctggcatgaacagacccctggccagcaccgtgaacgacaagctggagctgcaggagtgcctggagcacggccggatcgccaagttcagcaaggtgagaaccatcaccacccgaagcaacagcatcaaacaaggcaaggaccagcactttcctgtgttcatgaacgagaaggaggacatcctgtggtgtaccgagatggagagagtgttcgggttcccagtccactacacagatgtcagcaacatgtctagactggccagacagagactgctgggaagaagctggtccgtccctgtgatcagacacctgttcgcccctctgaaggagtacttcgcctgcgtgagcagcggcaacagcaacgccaacagccggggccccagcttctctagcggcctggtgccactgtccctgagagggagccacatgggccccatggagatctacaaaaccgtgagcgcctggaagcggcagcctgtgcgcgtgctgagcctgtttcggaatatcgataaagtcctgaaaagcctgggattcctggagagcggctctggctccggcggtggcaccctgaagtacgtggaggatgtgacaaacgtggtcagacgggatgtggagaagtggggccccttcgatctggtgtacggcagcacccaacccctgggcagctcttgtgaccggtgccctggctggtacatgtttcagttccaccggatcctgcagtacgccctgccgagacaggagtcccagcggccattcttttggattttcatggacaacttgctgctgaccgaggatgaccaggaaactaccactcggttcctgcagaccgaagccgtgaccctgcaggacgtgagaggccgggactaccagaacgccatgcgggtgtggtccaacatccctggactgaaaagcaagcacgcacctctgacccctaaagaagaggagtacctgcaggcccaggtgcggagcagaagcaagctggacgcccctaaggtggatctgctggtgaagaattgcctcctgcccctgagagagtacttcaagtatttcagccagaatagtctgcccctgggcggcccaagcagcggcgcccctcctcccagcggcggcagcccagccggctccccaacctctaccgaggagggcacctctgagtccgccacccccgagagcggccctggcacctccaccgagcccagcgagggcagcgcacccggcagccctgccggcagccccacctccacagaggagggaaccagcaccgagcccagcgaaggcagcgccccaggcaccagcaccgagcctagtgagggcggctctggcggcggcagcgcccaggagattaaacggatcaacaagatcagaagaagacttgtgaaagacagcaacaccaagaaggccggcaagacaggccccatgaaaaccctgctggttagagtgatgacacccgatctgagagagcggctggaaaacctgagaaagaagcctgaaaatatcccccagcccatcagcaatacatctagagccaacctgaataagctgctgaccgattacaccgaaatgaagaaggcgatcctgcatgtgtactgggaagagttccagaaggaccctgtgggcctgatgagccgggtggcccagcctgccagcaagaagatcgatcagaacaagctgaaacctgagatggacgagaagggcaacctgaccaccgccggctttgcctgctctcagtgtggccagcccctgttcgtgtacaagctggagcaggtgtctgagaagggcaaggcttacaccaactacttcggacggtgcaatgtggccgagcacgaaaagctgatcctgctggcccagctgaagcccgagaaggatagcgacgaagccgtgacatatagcctgggaaagtttgggcagagggccctggatttctacagcattcatgtgaccaaggagtccacccaccccgtgaagcccctggcccagatcgccggaaacagatacgcctccggacctgtgggaaaggccctgagcgacgcatgtatgggcacaatcgcctccttcctgtctaagtaccaggacatcatcatcgaacaccagaaggtggtgaagggcaaccagaagagactggagagcctgcgggagctggccggcaaggaaaacctggaataccctagcgtgaccctgccacctcagcctcacaccaaggagggcgttgatgcctacaacgaagtgatcgcccgggtgcgaatgtgggtgaacctgaacctgtggcagaagctgaagctaagcagagatgatgccaagcctctgctgagactgaagggattcccttcctttcctctggtcgagagacaggccaacgaagtggactggtgggacatggtgtgtaacgtgaagaagctgatcaacgagaaaaaggaggatggcaaggtgttttggcagaatctggctggctacaagagacaggaagccctgagaccatacctgagcagcgaggaagatcggaagaagggaaagaaattcgctcggtaccagctgggcgacctgctgctgcacctggaaaagaagcacggcgaggactggggaaaggtgtacgacgaggcctgggagcggattgacaagaaagtggaaggcctgagcaagcacatcaagctggaagaggaacggagaagcgaggacgcccagagcaaggccgccctgaccgactggctgcgggctaaggccagcttcgtgatcgagggcctgaaggaggccgacaaggacgagttctgcagatgcgagctgaagctgcagaagtggtacggggacctgcggggaaagcccttcgccatcgaagccgagaacagcatcctggacatcagcggcttcagcaagcagtacaactgtgccttcatctggcagaaggacggcgtgaagaagctgaacctgtacctgatcatcaactacttcaagggcggcaagctgcggttcaagaagatcaaacctgaagccttcgaagccaacagattctacaccgtgatcaacaaaaagagcggcgagatcgtgcccatggaggtgaacttcaacttcgacgaccccaacctgatcatcctgcctctggcctttggcaagagacagggcagagaattcatctggaacgacctgctgtccctggaaaccggcagcctgaagctggccaacggaagagtgatcgagaagacactgtacaacagaagaacccggcaggatgagcctgccctgttcgtggccctgaccttcgagcggcgggaggtcctggactcctccaatatcaaaccaatgaacctgatcggcgtggcaagaggcgaaaacatccccgccgtgatcgccctgaccgaccccgagggctgcccactgagccggtttaaggatagcctgggaaacccaacccacatcctgagaatcggcgagagctataaggagaagcagcggaccatccaggccaagaaggaggtggagcagcggagagccggcggctacagccggaagtacgccagcaaagccaagaatctggcagacgatatggtgagaaacaccgctagagatctgctgtactacgccgtgacccaggatgccatgctgatcttcgccaacctgagccggggcttcggccggcagggcaagcggaccttcatggccgagagacagtacacacggatggaggactggctgaccgccaagctggcctacgagggcctgagcaagacctacctgtccaagacactggcccagtacacctccaagacatgcagcaactgtgggtttaccatcaccagcgccgactacgacagggtgctggagaagctgaagaagacagcaacaggctggatgaccacaattaacggcaaggagctgaaggtggagggccagattacctactacaacagatacaagagacagaacgtagtcaaggacctgtccgtcgagctggatagactgagcgaagaatctgtgaacaacgacatctcctcctggacaaagggcagaagcggagaagctctgagcctcctgaagaaaagattctcccatagacccgtgcaggagaagttcgtgtgcctgaactgcggcttcgagacacacgcagccgagcaagccgccctgaacatcgccagatcctggctgttcctgcggagccaggagtacaagaaataccagacaaacaagacaaccggcaacaccgataagagagccttcgtcgagacctggcagtccttttaccggaagaagcttaaggaggtgtggaaacctgccgtgcggtctggcggatctggcggaggctccacaagcagccacggccccctgagcttcgaggacgtggccgtggccttcaccaaggaggagtggcagcagctggaccccgcccagaggaccctgtacagggacgtgatgctggagaacttcagccacctggtgagcctgggccaccccgtgagcaagcccgacgtgatcagcaagctggagcagggcgaggagccctggatcatcaagagggacatccccaactggatctaccccgagagggagaacaggaccagccccaagaaaaagagaaaagtctaagctgccttctgcggggcttgccttctggccatgcccttcttctctcccttgcacctgtacctcttggtctttgaataaagcctgagtaggaaggctagcaaaaaaaaaaaaaaaaaaaaaaaaaaaaaaaaaaaaaaaaaaaaaaaaaaaaaaaaaaaaaaaaaaaaaaaaaaaaaaaa

SEQ ID NO: 3627 - RNA, 5419 nt, synthetic construct
  source 1..5419: mol_type = other RNA
aggaaataagagagaaaagaagagtaagaagaaatataagagccaccatggcccctaagaagaagcgtaaagtgagccgggtgaacggcagcggcagcggcggcggcatgaaccacgaccaggagttcgacccccctaaggtgtaccctcccgtccccgccgagaagagaaagcccatccgggtcctgagcctgttcgatggcatcgccaccggtctgctggtgctgaaggacctgggcatccaggtggataggtacattgcctccgaggtgtgcgaggactccatcaccgtgggaatggtgcgtcatcagggcaagatcatgtacgtgggcgacgtgcggagcgtgacacagaagcatatccaggagtggggccctttcgacctggtgatcggcggcagcccttgcaatgacctgagcatcgtgaacccagcccggaagggcctgtacgagggaaccggcagactgttcttcgagttttacagactgctgcacgacgcccggcctaaggaaggcgacgaccggcccttcttttggctgttcgagaatgtggtggccatgggagtcagcgacaagcgggatattagccggttcctggagagcaaccccgtgatgatcgatgccaaggaagtgagcgccgcccaccgggccagatacttctggggcaatctgcctggcatgaacagacccctggccagcaccgtgaacgacaagctggagctgcaggagtgcctggagcacggccggatcgccaagttcagcaaggtgagaaccatcaccacccgaagcaacagcatcaaacaaggcaaggaccagcactttcctgtgttcatgaacgagaaggaggacatcctgtggtgtaccgagatggagagagtgttcgggttcccagtccactacacagatgtcagcaacatgtctagactggccagacagagactgctgggaagaagctggtccgtccctgtgatcagacacctgttcgcccctctgaaggagtacttcgcctgcgtgagcagcggcaacagcaacgccaacagccggggccccagcttctctagcggcctggtgccactgtccctgagagggagccacatgggccccatggagatctacaaaaccgtgagcgcctggaagcggcagcctgtgcgcgtgctgagcctgtttcggaatatcgataaagtcctgaaaagcctgggattcctggagagcggctctggctccggcggtggcaccctgaagtacgtggaggatgtgacaaacgtggtcagacgggatgtggagaagtggggccccttcgatctggtgtacggcagcacccaacccctgggcagctcttgtgaccggtgccctggctggtacatgtttcagttccaccggatcctgcagtacgccctgccgagacaggagtcccagcggccattcttttggattttcatggacaacttgctgctgaccgaggatgaccaggaaactaccactcggttcctgcagaccgaagccgtgaccctgcaggacgtgagaggccgggactaccagaacgccatgcgggtgtggtccaacatccctggactgaaaagcaagcacgcacctctgacccctaaagaagaggagtacctgcaggcccaggtgcggagcagaagcaagctggacgcccctaaggtggatctgctggtgaagaattgcctcctgcccctgagagagtacttcaagtatttcagccagaatagtctgcccctgggcggcccaagcagcggcgcccctcctcccagcggcggcagcccagccggctccccaacctctaccgaggagggcacctctgagtccgccacccccgagagcggccctggcacctccaccgagcccagcgagggcagcgcacccggcagccctgccggcagccccacctccacagaggagggaaccagcaccgagcccagcgaaggcagcgccccaggcaccagcaccgagcctagtgagggcggctctggcggcggcagcgcccaggagattaaacggatcaacaagatcagaagaagacttgtgaaagacagcaacaccaagaaggccggcaagacaggccccatgaaaaccctgctggttagagtgatgacacccgatctgagagagcggctggaaaacctgagaaagaagcctgaaaatatcccccagcccatcagcaatacatctagagccaacctgaataagctgctgaccgattacaccgaaatgaagaaggcgatcctgcatgtgtactgggaagagttccagaaggaccctgtgggcctgatgagccgggtggcccagcctgccagcaagaagatcgatcagaacaagctgaaacctgagatggacgagaagggcaacctgaccaccgccggctttgcctgctctcagtgtggccagcccctgttcgtgtacaagctggagcaggtgtctgagaagggcaaggcttacaccaactacttcggacggtgcaatgtggccgagcacgaaaagctgatcctgctggcccagctgaagcccgagaaggatagcgacgaagccgtgacatatagcctgggaaagtttgggcagagggccctggatttctacagcattcatgtgaccaaggagtccacccaccccgtgaagcccctggcccagatcgccggaaacagatacgcctccggacctgtgggaaaggccctgagcgacgcatgtatgggcacaatcgcctccttcctgtctaagtaccaggacatcatcatcgaacaccagaaggtggtgaagggcaaccagaagagactggagagcctgcgggagctggccggcaaggaaaacctggaataccctagcgtgaccctgccacctcagcctcacaccaaggagggcgttgatgcctacaacgaagtgatcgcccgggtgcgaatgtgggtgaacctgaacctgtggcagaagctgaagctaagcagagatgatgccaagcctctgctgagactgaagggattcccttcctttcctctggtcgagagacaggccaacgaagtggactggtgggacatggtgtgtaacgtgaagaagctgatcaacgagaaaaaggaggatggcaaggtgttttggcagaatctggctggctacaagagacaggaagccctgagaccatacctgagcagcgaggaagatcggaagaagggaaagaaattcgctcggtaccagctgggcgacctgctgctgcacctggaaaagaagcacggcgaggactggggaaaggtgtacgacgaggcctgggagcggattgacaagaaagtggaaggcctgagcaagcacatcaagctggaagaggaacggagaagcgaggacgcccagagcaaggccgccctgaccgactggctgcgggctaaggccagcttcgtgatcgagggcctgaaggaggccgacaaggacgagttctgcagatgcgagctgaagctgcagaagtggtacggggacctgcggggaaagcccttcgccatcgaagccgagaacagcatcctggacatcagcggcttcagcaagcagtacaactgtgccttcatctggcagaaggacggcgtgaagaagctgaacctgtacctgatcatcaactacttcaagggcggcaagctgcggttcaagaagatcaaacctgaagccttcgaagccaacagattctacaccgtgatcaacaaaaagagcggcgagatcgtgcccatggaggtgaacttcaacttcgacgaccccaacctgatcatcctgcctctggcctttggcaagagacagggcagagaattcatctggaacgacctgctgtccctggaaaccggcagcctgaagctggccaacggaagagtgatcgagaagacactgtacaacagaagaacccggcaggatgagcctgccctgttcgtggccctgaccttcgagcggcgggaggtcctggactcctccaatatcaaaccaatgaacctgatcggcgtggcaagaggcgaaaacatccccgccgtgatcgccctgaccgaccccgagggctgcccactgagccggtttaaggatagcctgggaaacccaacccacatcctgagaatcggcgagagctataaggagaagcagcggaccatccaggccaagaaggaggtggagcagcggagagccggcggctacagccggaagtacgccagcaaagccaagaatctggcagacgatatggtgagaaacaccgctagagatctgctgtactacgccgtgacccaggatgccatgctgatcttcgccaacctgagccggggcttcggccggcagggcaagcggaccttcatggccgagagacagtacacacggatggaggactggctgaccgccaagctggcctacgagggcctgagcaagacctacctgtccaagacactggcccagtacacctccaagacatgcagcaactgtgggtttaccatcaccagcgccgactacgacagggtgctggagaagctgaagaagacagcaacaggctggatgaccacaattaacggcaaggagctgaaggtggagggccagattacctactacaacagatacaagagacagaacgtagtcaaggacctgtccgtcgagctggatagactgagcgaagaatctgtgaacaacgacatctcctcctggacaaagggcagaagcggagaagctctgagcctcctgaagaaaagattctcccatagacccgtgcaggagaagttcgtgtgcctgaactgcggcttcgagacacacgcagccgagcaagccgccctgaacatcgccagatcctggctgttcctgcggagccaggagtacaagaaataccagacaaacaagacaaccggcaacaccgataagagagccttcgtcgagacctggcagtccttttaccggaagaagcttaaggaggtgtggaaacctgccgtgcggtctggcggatctggcggaggctccacaagcgacctggtgacctacgacgacgtgcacgtgaacttcacccaggaggagtgggccctgctggaccccagccagaagaacctgtacaaggacgtgatgctggagacctacaggaacctgagcgccatcggctacatctgggaggtgcacaccagcgaggaccacttccagaccagcaggagccacggcaggcacgagaggagctgcaccgccgtgcagcccagcgagttcatccagtgcggcaagaccagccccaagaaaaagagaaaagtctaagctgccttctgcggggcttgccttctggccatgcccttcttctctcccttgcacctgtacctcttggtctttgaataaagcctgagtaggaaggctagcaaaaaaaaaaaaaaaaaaaaaaaaaaaaaaaaaaaaaaaaaaaaaaaaaaaaaaaaaaaaaaaaaaaaaaaaaaaaaaaa

SEQ ID NO: 3628 - RNA, 5419 nt, synthetic construct
  source 1..5419: mol_type = other RNA
aggaaataagagagaaaagaagagtaagaagaaatataagagccaccatggcccctaagaagaagcgtaaagtgagccgggtgaacggcagcggcagcggcggcggcatgaaccacgaccaggagttcgacccccctaaggtgtaccctcccgtccccgccgagaagagaaagcccatccgggtcctgagcctgttcgatggcatcgccaccggtctgctggtgctgaaggacctgggcatccaggtggataggtacattgcctccgaggtgtgcgaggactccatcaccgtgggaatggtgcgtcatcagggcaagatcatgtacgtgggcgacgtgcggagcgtgacacagaagcatatccaggagtggggccctttcgacctggtgatcggcggcagcccttgcaatgacctgagcatcgtgaacccagcccggaagggcctgtacgagggaaccggcagactgttcttcgagttttacagactgctgcacgacgcccggcctaaggaaggcgacgaccggcccttcttttggctgttcgagaatgtggtggccatgggagtcagcgacaagcgggatattagccggttcctggagagcaaccccgtgatgatcgatgccaaggaagtgagcgccgcccaccgggccagatacttctggggcaatctgcctggcatgaacagacccctggccagcaccgtgaacgacaagctggagctgcaggagtgcctggagcacggccggatcgccaagttcagcaaggtgagaaccatcaccacccgaagcaacagcatcaaacaaggcaaggaccagcactttcctgtgttcatgaacgagaaggaggacatcctgtggtgtaccgagatggagagagtgttcgggttcccagtccactacacagatgtcagcaacatgtctagactggccagacagagactgctgggaagaagctggtccgtccctgtgatcagacacctgttcgcccctctgaaggagtacttcgcctgcgtgagcagcggcaacagcaacgccaacagccggggccccagcttctctagcggcctggtgccactgtccctgagagggagccacatgggccccatggagatctacaaaaccgtgagcgcctggaagcggcagcctgtgcgcgtgctgagcctgtttcggaatatcgataaagtcctgaaaagcctgggattcctggagagcggctctggctccggcggtggcaccctgaagtacgtggaggatgtgacaaacgtggtcagacgggatgtggagaagtggggccccttcgatctggtgtacggcagcacccaacccctgggcagctcttgtgaccggtgccctggctggtacatgtttcagttccaccggatcctgcagtacgccctgccgagacaggagtcccagcggccattcttttggattttcatggacaacttgctgctgaccgaggatgaccaggaaactaccactcggttcctgcagaccgaagccgtgaccctgcaggacgtgagaggccgggactaccagaacgccatgcgggtgtggtccaacatccctggactgaaaagcaagcacgcacctctgacccctaaagaagaggagtacctgcaggcccaggtgcggagcagaagcaagctggacgcccctaaggtggatctgctggtgaagaattgcctcctgcccctgagagagtacttcaagtatttcagccagaatagtctgcccctgggcggcccaagcagcggcgcccctcctcccagcggcggcagcccagccggctccccaacctctaccgaggagggcacctctgagtccgccacccccgagagcggccctggcacctccaccgagcccagcgagggcagcgcacccggcagccctgccggcagccccacctccacagaggagggaaccagcaccgagcccagcgaaggcagcgccccaggcaccagcaccgagcctagtgagggcggctctggcggcggcagcgcccaggagattaaacggatcaacaagatcagaagaagacttgtgaaagacagcaacaccaagaaggccggcaagacaggccccatgaaaaccctgctggttagagtgatgacacccgatctgagagagcggctggaaaacctgagaaagaagcctgaaaatatcccccagcccatcagcaatacatctagagccaacctgaataagctgctgaccgattacaccgaaatgaagaaggcgatcctgcatgtgtactgggaagagttccagaaggaccctgtgggcctgatgagccgggtggcccagcctgccagcaagaagatcgatcagaacaagctgaaacctgagatggacgagaagggcaacctgaccaccgccggctttgcctgctctcagtgtggccagcccctgttcgtgtacaagctggagcaggtgtctgagaagggcaaggcttacaccaactacttcggacggtgcaatgtggccgagcacgaaaagctgatcctgctggcccagctgaagcccgagaaggatagcgacgaagccgtgacatatagcctgggaaagtttgggcagagggccctggatttctacagcattcatgtgaccaaggagtccacccaccccgtgaagcccctggcccagatcgccggaaacagatacgcctccggacctgtgggaaaggccctgagcgacgcatgtatgggcacaatcgcctccttcctgtctaagtaccaggacatcatcatcgaacaccagaaggtggtgaagggcaaccagaagagactggagagcctgcgggagctggccggcaaggaaaacctggaataccctagcgtgaccctgccacctcagcctcacaccaaggagggcgttgatgcctacaacgaagtgatcgcccgggtgcgaatgtgggtgaacctgaacctgtggcagaagctgaagctaagcagagatgatgccaagcctctgctgagactgaagggattcccttcctttcctctggtcgagagacaggccaacgaagtggactggtgggacatggtgtgtaacgtgaagaagctgatcaacgagaaaaaggaggatggcaaggtgttttggcagaatctggctggctacaagagacaggaagccctgagaccatacctgagcagcgaggaagatcggaagaagggaaagaaattcgctcggtaccagctgggcgacctgctgctgcacctggaaaagaagcacggcgaggactggggaaaggtgtacgacgaggcctgggagcggattgacaagaaagtggaaggcctgagcaagcacatcaagctggaagaggaacggagaagcgaggacgcccagagcaaggccgccctgaccgactggctgcgggctaaggccagcttcgtgatcgagggcctgaaggaggccgacaaggacgagttctgcagatgcgagctgaagctgcagaagtggtacggggacctgcggggaaagcccttcgccatcgaagccgagaacagcatcctggacatcagcggcttcagcaagcagtacaactgtgccttcatctggcagaaggacggcgtgaagaagctgaacctgtacctgatcatcaactacttcaagggcggcaagctgcggttcaagaagatcaaacctgaagccttcgaagccaacagattctacaccgtgatcaacaaaaagagcggcgagatcgtgcccatggaggtgaacttcaacttcgacgaccccaacctgatcatcctgcctctggcctttggcaagagacagggcagagaattcatctggaacgacctgctgtccctggaaaccggcagcctgaagctggccaacggaagagtgatcgagaagacactgtacaacagaagaacccggcaggatgagcctgccctgttcgtggccctgaccttcgagcggcgggaggtcctggactcctccaatatcaaaccaatgaacctgatcggcgtggcaagaggcgaaaacatccccgccgtgatcgccctgaccgaccccgagggctgcccactgagccggtttaaggatagcctgggaaacccaacccacatcctgagaatcggcgagagctataaggagaagcagcggaccatccaggccaagaaggaggtggagcagcggagagccggcggctacagccggaagtacgccagcaaagccaagaatctggcagacgatatggtgagaaacaccgctagagatctgctgtactacgccgtgacccaggatgccatgctgatcttcgccaacctgagccggggcttcggccggcagggcaagcggaccttcatggccgagagacagtacacacggatggaggactggctgaccgccaagctggcctacgagggcctgagcaagacctacctgtccaagacactggcccagtacacctccaagacatgcagcaactgtgggtttaccatcaccagcgccgactacgacagggtgctggagaagctgaagaagacagcaacaggctggatgaccacaattaacggcaaggagctgaaggtggagggccagattacctactacaacagatacaagagacagaacgtagtcaaggacctgtccgtcgagctggatagactgagcgaagaatctgtgaacaacgacatctcctcctggacaaagggcagaagcggagaagctctgagcctcctgaagaaaagattctcccatagacccgtgcaggagaagttcgtgtgcctgaactgcggcttcgagacacacgcagccgagcaagccgccctgaacatcgccagatcctggctgttcctgcggagccaggagtacaagaaataccagacaaacaagacaaccggcaacaccgataagagagccttcgtcgagacctggcagtccttttaccggaagaagcttaaggaggtgtggaaacctgccgtgcggtctggcggatctggcggaggctccacaagcatgccccagggcagcgtgagcttcaaggacgtgaccgtggacttcacccaggaggagtggcagcagctggacagcgcccagaaggccctgtacagggacgtgatgctggagaactactgccacttcgtgagcgtgggcttccacatgaccaagcccgacatgatccacaagctggagcagggcaaggagctgtggaccaccggcaggatcttccccagcaggagctacctgggcgagagcgtgaccagccccaagaaaaagagaaaagtctaagctgccttctgcggggcttgccttctggccatgcccttcttctctcccttgcacctgtacctcttggtctttgaataaagcctgagtaggaaggctagcaaaaaaaaaaaaaaaaaaaaaaaaaaaaaaaaaaaaaaaaaaaaaaaaaaaaaaaaaaaaaaaaaaaaaaaaaaaaaaaa

SEQ ID NO: 3629 - RNA, 5419 nt, synthetic construct
  source 1..5419: mol_type = other RNA
aggaaataagagagaaaagaagagtaagaagaaatataagagccaccatggcccctaagaagaagcgtaaagtgagccgggtgaacggcagcggcagcggcggcggcatgaaccacgaccaggagttcgacccccctaaggtgtaccctcccgtccccgccgagaagagaaagcccatccgggtcctgagcctgttcgatggcatcgccaccggtctgctggtgctgaaggacctgggcatccaggtggataggtacattgcctccgaggtgtgcgaggactccatcaccgtgggaatggtgcgtcatcagggcaagatcatgtacgtgggcgacgtgcggagcgtgacacagaagcatatccaggagtggggccctttcgacctggtgatcggcggcagcccttgcaatgacctgagcatcgtgaacccagcccggaagggcctgtacgagggaaccggcagactgttcttcgagttttacagactgctgcacgacgcccggcctaaggaaggcgacgaccggcccttcttttggctgttcgagaatgtggtggccatgggagtcagcgacaagcgggatattagccggttcctggagagcaaccccgtgatgatcgatgccaaggaagtgagcgccgcccaccgggccagatacttctggggcaatctgcctggcatgaacagacccctggccagcaccgtgaacgacaagctggagctgcaggagtgcctggagcacggccggatcgccaagttcagcaaggtgagaaccatcaccacccgaagcaacagcatcaaacaaggcaaggaccagcactttcctgtgttcatgaacgagaaggaggacatcctgtggtgtaccgagatggagagagtgttcgggttcccagtccactacacagatgtcagcaacatgtctagactggccagacagagactgctgggaagaagctggtccgtccctgtgatcagacacctgttcgcccctctgaaggagtacttcgcctgcgtgagcagcggcaacagcaacgccaacagccggggccccagcttctctagcggcctggtgccactgtccctgagagggagccacatgggccccatggagatctacaaaaccgtgagcgcctggaagcggcagcctgtgcgcgtgctgagcctgtttcggaatatcgataaagtcctgaaaagcctgggattcctggagagcggctctggctccggcggtggcaccctgaagtacgtggaggatgtgacaaacgtggtcagacgggatgtggagaagtggggccccttcgatctggtgtacggcagcacccaacccctgggcagctcttgtgaccggtgccctggctggtacatgtttcagttccaccggatcctgcagtacgccctgccgagacaggagtcccagcggccattcttttggattttcatggacaacttgctgctgaccgaggatgaccaggaaactaccactcggttcctgcagaccgaagccgtgaccctgcaggacgtgagaggccgggactaccagaacgccatgcgggtgtggtccaacatccctggactgaaaagcaagcacgcacctctgacccctaaagaagaggagtacctgcaggcccaggtgcggagcagaagcaagctggacgcccctaaggtggatctgctggtgaagaattgcctcctgcccctgagagagtacttcaagtatttcagccagaatagtctgcccctgggcggcccaagcagcggcgcccctcctcccagcggcggcagcccagccggctccccaacctctaccgaggagggcacctctgagtccgccacccccgagagcggccctggcacctccaccgagcccagcgagggcagcgcacccggcagccctgccggcagccccacctccacagaggagggaaccagcaccgagcccagcgaaggcagcgccccaggcaccagcaccgagcctagtgagggcggctctggcggcggcagcgcccaggagattaaacggatcaacaagatcagaagaagacttgtgaaagacagcaacaccaagaaggccggcaagacaggccccatgaaaaccctgctggttagagtgatgacacccgatctgagagagcggctggaaaacctgagaaagaagcctgaaaatatcccccagcccatcagcaatacatctagagccaacctgaataagctgctgaccgattacaccgaaatgaagaaggcgatcctgcatgtgtactgggaagagttccagaaggaccctgtgggcctgatgagccgggtggcccagcctgccagcaagaagatcgatcagaacaagctgaaacctgagatggacgagaagggcaacctgaccaccgccggctttgcctgctctcagtgtggccagcccctgttcgtgtacaagctggagcaggtgtctgagaagggcaaggcttacaccaactacttcggacggtgcaatgtggccgagcacgaaaagctgatcctgctggcccagctgaagcccgagaaggatagcgacgaagccgtgacatatagcctgggaaagtttgggcagagggccctggatttctacagcattcatgtgaccaaggagtccacccaccccgtgaagcccctggcccagatcgccggaaacagatacgcctccggacctgtgggaaaggccctgagcgacgcatgtatgggcacaatcgcctccttcctgtctaagtaccaggacatcatcatcgaacaccagaaggtggtgaagggcaaccagaagagactggagagcctgcgggagctggccggcaaggaaaacctggaataccctagcgtgaccctgccacctcagcctcacaccaaggagggcgttgatgcctacaacgaagtgatcgcccgggtgcgaatgtgggtgaacctgaacctgtggcagaagctgaagctaagcagagatgatgccaagcctctgctgagactgaagggattcccttcctttcctctggtcgagagacaggccaacgaagtggactggtgggacatggtgtgtaacgtgaagaagctgatcaacgagaaaaaggaggatggcaaggtgttttggcagaatctggctggctacaagagacaggaagccctgagaccatacctgagcagcgaggaagatcggaagaagggaaagaaattcgctcggtaccagctgggcgacctgctgctgcacctggaaaagaagcacggcgaggactggggaaaggtgtacgacgaggcctgggagcggattgacaagaaagtggaaggcctgagcaagcacatcaagctggaagaggaacggagaagcgaggacgcccagagcaaggccgccctgaccgactggctgcgggctaaggccagcttcgtgatcgagggcctgaaggaggccgacaaggacgagttctgcagatgcgagctgaagctgcagaagtggtacggggacctgcggggaaagcccttcgccatcgaagccgagaacagcatcctggacatcagcggcttcagcaagcagtacaactgtgccttcatctggcagaaggacggcgtgaagaagctgaacctgtacctgatcatcaactacttcaagggcggcaagctgcggttcaagaagatcaaacctgaagccttcgaagccaacagattctacaccgtgatcaacaaaaagagcggcgagatcgtgcccatggaggtgaacttcaacttcgacgaccccaacctgatcatcctgcctctggcctttggcaagagacagggcagagaattcatctggaacgacctgctgtccctggaaaccggcagcctgaagctggccaacggaagagtgatcgagaagacactgtacaacagaagaacccggcaggatgagcctgccctgttcgtggccctgaccttcgagcggcgggaggtcctggactcctccaatatcaaaccaatgaacctgatcggcgtggcaagaggcgaaaacatccccgccgtgatcgccctgaccgaccccgagggctgcccactgagccggtttaaggatagcctgggaaacccaacccacatcctgagaatcggcgagagctataaggagaagcagcggaccatccaggccaagaaggaggtggagcagcggagagccggcggctacagccggaagtacgccagcaaagccaagaatctggcagacgatatggtgagaaacaccgctagagatctgctgtactacgccgtgacccaggatgccatgctgatcttcgccaacctgagccggggcttcggccggcagggcaagcggaccttcatggccgagagacagtacacacggatggaggactggctgaccgccaagctggcctacgagggcctgagcaagacctacctgtccaagacactggcccagtacacctccaagacatgcagcaactgtgggtttaccatcaccagcgccgactacgacagggtgctggagaagctgaagaagacagcaacaggctggatgaccacaattaacggcaaggagctgaaggtggagggccagattacctactacaacagatacaagagacagaacgtagtcaaggacctgtccgtcgagctggatagactgagcgaagaatctgtgaacaacgacatctcctcctggacaaagggcagaagcggagaagctctgagcctcctgaagaaaagattctcccatagacccgtgcaggagaagttcgtgtgcctgaactgcggcttcgagacacacgcagccgagcaagccgccctgaacatcgccagatcctggctgttcctgcggagccaggagtacaagaaataccagacaaacaagacaaccggcaacaccgataagagagccttcgtcgagacctggcagtccttttaccggaagaagcttaaggaggtgtggaaacctgccgtgcggtctggcggatctggcggaggctccacaagcaaggagaagctggtgaccttcgaggacgtggccgtgtacttcacccaggccgagtgggacggcctgagccccgcccagaggaccctgtacagggacgtgatgctggagaactacggcaacgtggccagcctgggcttccccctgctgaagcccgccgtgatcagccagctggagggcggcggcgagctgggcggccccagccccctggccgccggcaccggcctgtggggcctgaggaccggcaccagccccaagaaaaagagaaaagtctaagctgccttctgcggggcttgccttctggccatgcccttcttctctcccttgcacctgtacctcttggtctttgaataaagcctgagtaggaaggctagcaaaaaaaaaaaaaaaaaaaaaaaaaaaaaaaaaaaaaaaaaaaaaaaaaaaaaaaaaaaaaaaaaaaaaaaaaaaaaaaa

SEQ ID NO: 3630 - RNA, 5419 nt, synthetic construct
  source 1..5419: mol_type = other RNA
aggaaataagagagaaaagaagagtaagaagaaatataagagccaccatggcccctaagaagaagcgtaaagtgagccgggtgaacggcagcggcagcggcggcggcatgaaccacgaccaggagttcgacccccctaaggtgtaccctcccgtccccgccgagaagagaaagcccatccgggtcctgagcctgttcgatggcatcgccaccggtctgctggtgctgaaggacctgggcatccaggtggataggtacattgcctccgaggtgtgcgaggactccatcaccgtgggaatggtgcgtcatcagggcaagatcatgtacgtgggcgacgtgcggagcgtgacacagaagcatatccaggagtggggccctttcgacctggtgatcggcggcagcccttgcaatgacctgagcatcgtgaacccagcccggaagggcctgtacgagggaaccggcagactgttcttcgagttttacagactgctgcacgacgcccggcctaaggaaggcgacgaccggcccttcttttggctgttcgagaatgtggtggccatgggagtcagcgacaagcgggatattagccggttcctggagagcaaccccgtgatgatcgatgccaaggaagtgagcgccgcccaccgggccagatacttctggggcaatctgcctggcatgaacagacccctggccagcaccgtgaacgacaagctggagctgcaggagtgcctggagcacggccggatcgccaagttcagcaaggtgagaaccatcaccacccgaagcaacagcatcaaacaaggcaaggaccagcactttcctgtgttcatgaacgagaaggaggacatcctgtggtgtaccgagatggagagagtgttcgggttcccagtccactacacagatgtcagcaacatgtctagactggccagacagagactgctgggaagaagctggtccgtccctgtgatcagacacctgttcgcccctctgaaggagtacttcgcctgcgtgagcagcggcaacagcaacgccaacagccggggccccagcttctctagcggcctggtgccactgtccctgagagggagccacatgggccccatggagatctacaaaaccgtgagcgcctggaagcggcagcctgtgcgcgtgctgagcctgtttcggaatatcgataaagtcctgaaaagcctgggattcctggagagcggctctggctccggcggtggcaccctgaagtacgtggaggatgtgacaaacgtggtcagacgggatgtggagaagtggggccccttcgatctggtgtacggcagcacccaacccctgggcagctcttgtgaccggtgccctggctggtacatgtttcagttccaccggatcctgcagtacgccctgccgagacaggagtcccagcggccattcttttggattttcatggacaacttgctgctgaccgaggatgaccaggaaactaccactcggttcctgcagaccgaagccgtgaccctgcaggacgtgagaggccgggactaccagaacgccatgcgggtgtggtccaacatccctggactgaaaagcaagcacgcacctctgacccctaaagaagaggagtacctgcaggcccaggtgcggagcagaagcaagctggacgcccctaaggtggatctgctggtgaagaattgcctcctgcccctgagagagtacttcaagtatttcagccagaatagtctgcccctgggcggcccaagcagcggcgcccctcctcccagcggcggcagcccagccggctccccaacctctaccgaggagggcacctctgagtccgccacccccgagagcggccctggcacctccaccgagcccagcgagggcagcgcacccggcagccctgccggcagccccacctccacagaggagggaaccagcaccgagcccagcgaaggcagcgccccaggcaccagcaccgagcctagtgagggcggctctggcggcggcagcgcccaggagattaaacggatcaacaagatcagaagaagacttgtgaaagacagcaacaccaagaaggccggcaagacaggccccatgaaaaccctgctggttagagtgatgacacccgatctgagagagcggctggaaaacctgagaaagaagcctgaaaatatcccccagcccatcagcaatacatctagagccaacctgaataagctgctgaccgattacaccgaaatgaagaaggcgatcctgcatgtgtactgggaagagttccagaaggaccctgtgggcctgatgagccgggtggcccagcctgccagcaagaagatcgatcagaacaagctgaaacctgagatggacgagaagggcaacctgaccaccgccggctttgcctgctctcagtgtggccagcccctgttcgtgtacaagctggagcaggtgtctgagaagggcaaggcttacaccaactacttcggacggtgcaatgtggccgagcacgaaaagctgatcctgctggcccagctgaagcccgagaaggatagcgacgaagccgtgacatatagcctgggaaagtttgggcagagggccctggatttctacagcattcatgtgaccaaggagtccacccaccccgtgaagcccctggcccagatcgccggaaacagatacgcctccggacctgtgggaaaggccctgagcgacgcatgtatgggcacaatcgcctccttcctgtctaagtaccaggacatcatcatcgaacaccagaaggtggtgaagggcaaccagaagagactggagagcctgcgggagctggccggcaaggaaaacctggaataccctagcgtgaccctgccacctcagcctcacaccaaggagggcgttgatgcctacaacgaagtgatcgcccgggtgcgaatgtgggtgaacctgaacctgtggcagaagctgaagctaagcagagatgatgccaagcctctgctgagactgaagggattcccttcctttcctctggtcgagagacaggccaacgaagtggactggtgggacatggtgtgtaacgtgaagaagctgatcaacgagaaaaaggaggatggcaaggtgttttggcagaatctggctggctacaagagacaggaagccctgagaccatacctgagcagcgaggaagatcggaagaagggaaagaaattcgctcggtaccagctgggcgacctgctgctgcacctggaaaagaagcacggcgaggactggggaaaggtgtacgacgaggcctgggagcggattgacaagaaagtggaaggcctgagcaagcacatcaagctggaagaggaacggagaagcgaggacgcccagagcaaggccgccctgaccgactggctgcgggctaaggccagcttcgtgatcgagggcctgaaggaggccgacaaggacgagttctgcagatgcgagctgaagctgcagaagtggtacggggacctgcggggaaagcccttcgccatcgaagccgagaacagcatcctggacatcagcggcttcagcaagcagtacaactgtgccttcatctggcagaaggacggcgtgaagaagctgaacctgtacctgatcatcaactacttcaagggcggcaagctgcggttcaagaagatcaaacctgaagccttcgaagccaacagattctacaccgtgatcaacaaaaagagcggcgagatcgtgcccatggaggtgaacttcaacttcgacgaccccaacctgatcatcctgcctctggcctttggcaagagacagggcagagaattcatctggaacgacctgctgtccctggaaaccggcagcctgaagctggccaacggaagagtgatcgagaagacactgtacaacagaagaacccggcaggatgagcctgccctgttcgtggccctgaccttcgagcggcgggaggtcctggactcctccaatatcaaaccaatgaacctgatcggcgtggcaagaggcgaaaacatccccgccgtgatcgccctgaccgaccccgagggctgcccactgagccggtttaaggatagcctgggaaacccaacccacatcctgagaatcggcgagagctataaggagaagcagcggaccatccaggccaagaaggaggtggagcagcggagagccggcggctacagccggaagtacgccagcaaagccaagaatctggcagacgatatggtgagaaacaccgctagagatctgctgtactacgccgtgacccaggatgccatgctgatcttcgccaacctgagccggggcttcggccggcagggcaagcggaccttcatggccgagagacagtacacacggatggaggactggctgaccgccaagctggcctacgagggcctgagcaagacctacctgtccaagacactggcccagtacacctccaagacatgcagcaactgtgggtttaccatcaccagcgccgactacgacagggtgctggagaagctgaagaagacagcaacaggctggatgaccacaattaacggcaaggagctgaaggtggagggccagattacctactacaacagatacaagagacagaacgtagtcaaggacctgtccgtcgagctggatagactgagcgaagaatctgtgaacaacgacatctcctcctggacaaagggcagaagcggagaagctctgagcctcctgaagaaaagattctcccatagacccgtgcaggagaagttcgtgtgcctgaactgcggcttcgagacacacgcagccgagcaagccgccctgaacatcgccagatcctggctgttcctgcggagccaggagtacaagaaataccagacaaacaagacaaccggcaacaccgataagagagccttcgtcgagacctggcagtccttttaccggaagaagcttaaggaggtgtggaaacctgccgtgcggtctggcggatctggcggaggctccacaagcaagcccggcgccctgagcttcgccgacgtggccgtgtacttcagcagcgaggagtggggctgcctgaggcccgcccagagggccctgtacagggacgtgatgagggagacctacggccacctgggcgccctgggctgcgccggccccaagcccgccctgatcagctggctggagaggaacaccgacgactgggagcccgccgccctggacccccaggagtgccccaggggcgtggccgtgcagaccagccccaagaaaaagagaaaagtctaagctgccttctgcggggcttgccttctggccatgcccttcttctctcccttgcacctgtacctcttggtctttgaataaagcctgagtaggaaggctagcaaaaaaaaaaaaaaaaaaaaaaaaaaaaaaaaaaaaaaaaaaaaaaaaaaaaaaaaaaaaaaaaaaaaaaaaaaaaaaaa

SEQ ID NO: 3631 - RNA, 5419 nt, synthetic construct
  source 1..5419: mol_type = other RNA
aggaaataagagagaaaagaagagtaagaagaaatataagagccaccatggcccctaagaagaagcgtaaagtgagccgggtgaacggcagcggcagcggcggcggcatgaaccacgaccaggagttcgacccccctaaggtgtaccctcccgtccccgccgagaagagaaagcccatccgggtcctgagcctgttcgatggcatcgccaccggtctgctggtgctgaaggacctgggcatccaggtggataggtacattgcctccgaggtgtgcgaggactccatcaccgtgggaatggtgcgtcatcagggcaagatcatgtacgtgggcgacgtgcggagcgtgacacagaagcatatccaggagtggggccctttcgacctggtgatcggcggcagcccttgcaatgacctgagcatcgtgaacccagcccggaagggcctgtacgagggaaccggcagactgttcttcgagttttacagactgctgcacgacgcccggcctaaggaaggcgacgaccggcccttcttttggctgttcgagaatgtggtggccatgggagtcagcgacaagcgggatattagccggttcctggagagcaaccccgtgatgatcgatgccaaggaagtgagcgccgcccaccgggccagatacttctggggcaatctgcctggcatgaacagacccctggccagcaccgtgaacgacaagctggagctgcaggagtgcctggagcacggccggatcgccaagttcagcaaggtgagaaccatcaccacccgaagcaacagcatcaaacaaggcaaggaccagcactttcctgtgttcatgaacgagaaggaggacatcctgtggtgtaccgagatggagagagtgttcgggttcccagtccactacacagatgtcagcaacatgtctagactggccagacagagactgctgggaagaagctggtccgtccctgtgatcagacacctgttcgcccctctgaaggagtacttcgcctgcgtgagcagcggcaacagcaacgccaacagccggggccccagcttctctagcggcctggtgccactgtccctgagagggagccacatgggccccatggagatctacaaaaccgtgagcgcctggaagcggcagcctgtgcgcgtgctgagcctgtttcggaatatcgataaagtcctgaaaagcctgggattcctggagagcggctctggctccggcggtggcaccctgaagtacgtggaggatgtgacaaacgtggtcagacgggatgtggagaagtggggccccttcgatctggtgtacggcagcacccaacccctgggcagctcttgtgaccggtgccctggctggtacatgtttcagttccaccggatcctgcagtacgccctgccgagacaggagtcccagcggccattcttttggattttcatggacaacttgctgctgaccgaggatgaccaggaaactaccactcggttcctgcagaccgaagccgtgaccctgcaggacgtgagaggccgggactaccagaacgccatgcgggtgtggtccaacatccctggactgaaaagcaagcacgcacctctgacccctaaagaagaggagtacctgcaggcccaggtgcggagcagaagcaagctggacgcccctaaggtggatctgctggtgaagaattgcctcctgcccctgagagagtacttcaagtatttcagccagaatagtctgcccctgggcggcccaagcagcggcgcccctcctcccagcggcggcagcccagccggctccccaacctctaccgaggagggcacctctgagtccgccacccccgagagcggccctggcacctccaccgagcccagcgagggcagcgcacccggcagccctgccggcagccccacctccacagaggagggaaccagcaccgagcccagcgaaggcagcgccccaggcaccagcaccgagcctagtgagggcggctctggcggcggcagcgcccaggagattaaacggatcaacaagatcagaagaagacttgtgaaagacagcaacaccaagaaggccggcaagacaggccccatgaaaaccctgctggttagagtgatgacacccgatctgagagagcggctggaaaacctgagaaagaagcctgaaaatatcccccagcccatcagcaatacatctagagccaacctgaataagctgctgaccgattacaccgaaatgaagaaggcgatcctgcatgtgtactgggaagagttccagaaggaccctgtgggcctgatgagccgggtggcccagcctgccagcaagaagatcgatcagaacaagctgaaacctgagatggacgagaagggcaacctgaccaccgccggctttgcctgctctcagtgtggccagcccctgttcgtgtacaagctggagcaggtgtctgagaagggcaaggcttacaccaactacttcggacggtgcaatgtggccgagcacgaaaagctgatcctgctggcccagctgaagcccgagaaggatagcgacgaagccgtgacatatagcctgggaaagtttgggcagagggccctggatttctacagcattcatgtgaccaaggagtccacccaccccgtgaagcccctggcccagatcgccggaaacagatacgcctccggacctgtgggaaaggccctgagcgacgcatgtatgggcacaatcgcctccttcctgtctaagtaccaggacatcatcatcgaacaccagaaggtggtgaagggcaaccagaagagactggagagcctgcgggagctggccggcaaggaaaacctggaataccctagcgtgaccctgccacctcagcctcacaccaaggagggcgttgatgcctacaacgaagtgatcgcccgggtgcgaatgtgggtgaacctgaacctgtggcagaagctgaagctaagcagagatgatgccaagcctctgctgagactgaagggattcccttcctttcctctggtcgagagacaggccaacgaagtggactggtgggacatggtgtgtaacgtgaagaagctgatcaacgagaaaaaggaggatggcaaggtgttttggcagaatctggctggctacaagagacaggaagccctgagaccatacctgagcagcgaggaagatcggaagaagggaaagaaattcgctcggtaccagctgggcgacctgctgctgcacctggaaaagaagcacggcgaggactggggaaaggtgtacgacgaggcctgggagcggattgacaagaaagtggaaggcctgagcaagcacatcaagctggaagaggaacggagaagcgaggacgcccagagcaaggccgccctgaccgactggctgcgggctaaggccagcttcgtgatcgagggcctgaaggaggccgacaaggacgagttctgcagatgcgagctgaagctgcagaagtggtacggggacctgcggggaaagcccttcgccatcgaagccgagaacagcatcctggacatcagcggcttcagcaagcagtacaactgtgccttcatctggcagaaggacggcgtgaagaagctgaacctgtacctgatcatcaactacttcaagggcggcaagctgcggttcaagaagatcaaacctgaagccttcgaagccaacagattctacaccgtgatcaacaaaaagagcggcgagatcgtgcccatggaggtgaacttcaacttcgacgaccccaacctgatcatcctgcctctggcctttggcaagagacagggcagagaattcatctggaacgacctgctgtccctggaaaccggcagcctgaagctggccaacggaagagtgatcgagaagacactgtacaacagaagaacccggcaggatgagcctgccctgttcgtggccctgaccttcgagcggcgggaggtcctggactcctccaatatcaaaccaatgaacctgatcggcgtggcaagaggcgaaaacatccccgccgtgatcgccctgaccgaccccgagggctgcccactgagccggtttaaggatagcctgggaaacccaacccacatcctgagaatcggcgagagctataaggagaagcagcggaccatccaggccaagaaggaggtggagcagcggagagccggcggctacagccggaagtacgccagcaaagccaagaatctggcagacgatatggtgagaaacaccgctagagatctgctgtactacgccgtgacccaggatgccatgctgatcttcgccaacctgagccggggcttcggccggcagggcaagcggaccttcatggccgagagacagtacacacggatggaggactggctgaccgccaagctggcctacgagggcctgagcaagacctacctgtccaagacactggcccagtacacctccaagacatgcagcaactgtgggtttaccatcaccagcgccgactacgacagggtgctggagaagctgaagaagacagcaacaggctggatgaccacaattaacggcaaggagctgaaggtggagggccagattacctactacaacagatacaagagacagaacgtagtcaaggacctgtccgtcgagctggatagactgagcgaagaatctgtgaacaacgacatctcctcctggacaaagggcagaagcggagaagctctgagcctcctgaagaaaagattctcccatagacccgtgcaggagaagttcgtgtgcctgaactgcggcttcgagacacacgcagccgagcaagccgccctgaacatcgccagatcctggctgttcctgcggagccaggagtacaagaaataccagacaaacaagacaaccggcaacaccgataagagagccttcgtcgagacctggcagtccttttaccggaagaagcttaaggaggtgtggaaacctgccgtgcggtctggcggatctggcggaggctccacaagcaagcccggcaccgtgagcttcgccgacgtggccgtgtacttcagccccgaggagtggaggtacctgaggcccgcccagagggccctgtacagggaggtgatgagggagacctacggcctgctgacctacctggacgtgggctgcgccaagcccgccctgatcagctgggtggaggaggagagcgaggtgtggggccccggcgcccaggaccccgaggtggccatgtgcaggaccgaggtgcacaccagccccaagaaaaagagaaaagtctaagctgccttctgcggggcttgccttctggccatgcccttcttctctcccttgcacctgtacctcttggtctttgaataaagcctgagtaggaaggctagcaaaaaaaaaaaaaaaaaaaaaaaaaaaaaaaaaaaaaaaaaaaaaaaaaaaaaaaaaaaaaaaaaaaaaaaaaaaaaaaa

SEQ ID NO: 3632 - RNA, 5419 nt, synthetic construct
  source 1..5419: mol_type = other RNA
aggaaataagagagaaaagaagagtaagaagaaatataagagccaccatggcccctaagaagaagcgtaaagtgagccgggtgaacggcagcggcagcggcggcggcatgaaccacgaccaggagttcgacccccctaaggtgtaccctcccgtccccgccgagaagagaaagcccatccgggtcctgagcctgttcgatggcatcgccaccggtctgctggtgctgaaggacctgggcatccaggtggataggtacattgcctccgaggtgtgcgaggactccatcaccgtgggaatggtgcgtcatcagggcaagatcatgtacgtgggcgacgtgcggagcgtgacacagaagcatatccaggagtggggccctttcgacctggtgatcggcggcagcccttgcaatgacctgagcatcgtgaacccagcccggaagggcctgtacgagggaaccggcagactgttcttcgagttttacagactgctgcacgacgcccggcctaaggaaggcgacgaccggcccttcttttggctgttcgagaatgtggtggccatgggagtcagcgacaagcgggatattagccggttcctggagagcaaccccgtgatgatcgatgccaaggaagtgagcgccgcccaccgggccagatacttctggggcaatctgcctggcatgaacagacccctggccagcaccgtgaacgacaagctggagctgcaggagtgcctggagcacggccggatcgccaagttcagcaaggtgagaaccatcaccacccgaagcaacagcatcaaacaaggcaaggaccagcactttcctgtgttcatgaacgagaaggaggacatcctgtggtgtaccgagatggagagagtgttcgggttcccagtccactacacagatgtcagcaacatgtctagactggccagacagagactgctgggaagaagctggtccgtccctgtgatcagacacctgttcgcccctctgaaggagtacttcgcctgcgtgagcagcggcaacagcaacgccaacagccggggccccagcttctctagcggcctggtgccactgtccctgagagggagccacatgggccccatggagatctacaaaaccgtgagcgcctggaagcggcagcctgtgcgcgtgctgagcctgtttcggaatatcgataaagtcctgaaaagcctgggattcctggagagcggctctggctccggcggtggcaccctgaagtacgtggaggatgtgacaaacgtggtcagacgggatgtggagaagtggggccccttcgatctggtgtacggcagcacccaacccctgggcagctcttgtgaccggtgccctggctggtacatgtttcagttccaccggatcctgcagtacgccctgccgagacaggagtcccagcggccattcttttggattttcatggacaacttgctgctgaccgaggatgaccaggaaactaccactcggttcctgcagaccgaagccgtgaccctgcaggacgtgagaggccgggactaccagaacgccatgcgggtgtggtccaacatccctggactgaaaagcaagcacgcacctctgacccctaaagaagaggagtacctgcaggcccaggtgcggagcagaagcaagctggacgcccctaaggtggatctgctggtgaagaattgcctcctgcccctgagagagtacttcaagtatttcagccagaatagtctgcccctgggcggcccaagcagcggcgcccctcctcccagcggcggcagcccagccggctccccaacctctaccgaggagggcacctctgagtccgccacccccgagagcggccctggcacctccaccgagcccagcgagggcagcgcacccggcagccctgccggcagccccacctccacagaggagggaaccagcaccgagcccagcgaaggcagcgccccaggcaccagcaccgagcctagtgagggcggctctggcggcggcagcgcccaggagattaaacggatcaacaagatcagaagaagacttgtgaaagacagcaacaccaagaaggccggcaagacaggccccatgaaaaccctgctggttagagtgatgacacccgatctgagagagcggctggaaaacctgagaaagaagcctgaaaatatcccccagcccatcagcaatacatctagagccaacctgaataagctgctgaccgattacaccgaaatgaagaaggcgatcctgcatgtgtactgggaagagttccagaaggaccctgtgggcctgatgagccgggtggcccagcctgccagcaagaagatcgatcagaacaagctgaaacctgagatggacgagaagggcaacctgaccaccgccggctttgcctgctctcagtgtggccagcccctgttcgtgtacaagctggagcaggtgtctgagaagggcaaggcttacaccaactacttcggacggtgcaatgtggccgagcacgaaaagctgatcctgctggcccagctgaagcccgagaaggatagcgacgaagccgtgacatatagcctgggaaagtttgggcagagggccctggatttctacagcattcatgtgaccaaggagtccacccaccccgtgaagcccctggcccagatcgccggaaacagatacgcctccggacctgtgggaaaggccctgagcgacgcatgtatgggcacaatcgcctccttcctgtctaagtaccaggacatcatcatcgaacaccagaaggtggtgaagggcaaccagaagagactggagagcctgcgggagctggccggcaaggaaaacctggaataccctagcgtgaccctgccacctcagcctcacaccaaggagggcgttgatgcctacaacgaagtgatcgcccgggtgcgaatgtgggtgaacctgaacctgtggcagaagctgaagctaagcagagatgatgccaagcctctgctgagactgaagggattcccttcctttcctctggtcgagagacaggccaacgaagtggactggtgggacatggtgtgtaacgtgaagaagctgatcaacgagaaaaaggaggatggcaaggtgttttggcagaatctggctggctacaagagacaggaagccctgagaccatacctgagcagcgaggaagatcggaagaagggaaagaaattcgctcggtaccagctgggcgacctgctgctgcacctggaaaagaagcacggcgaggactggggaaaggtgtacgacgaggcctgggagcggattgacaagaaagtggaaggcctgagcaagcacatcaagctggaagaggaacggagaagcgaggacgcccagagcaaggccgccctgaccgactggctgcgggctaaggccagcttcgtgatcgagggcctgaaggaggccgacaaggacgagttctgcagatgcgagctgaagctgcagaagtggtacggggacctgcggggaaagcccttcgccatcgaagccgagaacagcatcctggacatcagcggcttcagcaagcagtacaactgtgccttcatctggcagaaggacggcgtgaagaagctgaacctgtacctgatcatcaactacttcaagggcggcaagctgcggttcaagaagatcaaacctgaagccttcgaagccaacagattctacaccgtgatcaacaaaaagagcggcgagatcgtgcccatggaggtgaacttcaacttcgacgaccccaacctgatcatcctgcctctggcctttggcaagagacagggcagagaattcatctggaacgacctgctgtccctggaaaccggcagcctgaagctggccaacggaagagtgatcgagaagacactgtacaacagaagaacccggcaggatgagcctgccctgttcgtggccctgaccttcgagcggcgggaggtcctggactcctccaatatcaaaccaatgaacctgatcggcgtggcaagaggcgaaaacatccccgccgtgatcgccctgaccgaccccgagggctgcccactgagccggtttaaggatagcctgggaaacccaacccacatcctgagaatcggcgagagctataaggagaagcagcggaccatccaggccaagaaggaggtggagcagcggagagccggcggctacagccggaagtacgccagcaaagccaagaatctggcagacgatatggtgagaaacaccgctagagatctgctgtactacgccgtgacccaggatgccatgctgatcttcgccaacctgagccggggcttcggccggcagggcaagcggaccttcatggccgagagacagtacacacggatggaggactggctgaccgccaagctggcctacgagggcctgagcaagacctacctgtccaagacactggcccagtacacctccaagacatgcagcaactgtgggtttaccatcaccagcgccgactacgacagggtgctggagaagctgaagaagacagcaacaggctggatgaccacaattaacggcaaggagctgaaggtggagggccagattacctactacaacagatacaagagacagaacgtagtcaaggacctgtccgtcgagctggatagactgagcgaagaatctgtgaacaacgacatctcctcctggacaaagggcagaagcggagaagctctgagcctcctgaagaaaagattctcccatagacccgtgcaggagaagttcgtgtgcctgaactgcggcttcgagacacacgcagccgagcaagccgccctgaacatcgccagatcctggctgttcctgcggagccaggagtacaagaaataccagacaaacaagacaaccggcaacaccgataagagagccttcgtcgagacctggcagtccttttaccggaagaagcttaaggaggtgtggaaacctgccgtgcggtctggcggatctggcggaggctccacaagcccccagaagctggtgaccttcgaggacgtggccgtgtacttcacccagaccgagtgggacggcctgagcaccgcccagagggccctgtacagggacgtgatgctggagaactacggcaacgtggccagcctgggcttccccctgctgaagcccgccgtgatcagccagctggagggcggcggcgagctggagggccccagcagcctggccagcggcgccggcaccggcccccagggcctgtggaccagccccaagaaaaagagaaaagtctaagctgccttctgcggggcttgccttctggccatgcccttcttctctcccttgcacctgtacctcttggtctttgaataaagcctgagtaggaaggctagcaaaaaaaaaaaaaaaaaaaaaaaaaaaaaaaaaaaaaaaaaaaaaaaaaaaaaaaaaaaaaaaaaaaaaaaaaaaaaaaa

SEQ ID NO: 3633 - RNA, 5419 nt, synthetic construct
  source 1..5419: mol_type = other RNA
aggaaataagagagaaaagaagagtaagaagaaatataagagccaccatggcccctaagaagaagcgtaaagtgagccgggtgaacggcagcggcagcggcggcggcatgaaccacgaccaggagttcgacccccctaaggtgtaccctcccgtccccgccgagaagagaaagcccatccgggtcctgagcctgttcgatggcatcgccaccggtctgctggtgctgaaggacctgggcatccaggtggataggtacattgcctccgaggtgtgcgaggactccatcaccgtgggaatggtgcgtcatcagggcaagatcatgtacgtgggcgacgtgcggagcgtgacacagaagcatatccaggagtggggccctttcgacctggtgatcggcggcagcccttgcaatgacctgagcatcgtgaacccagcccggaagggcctgtacgagggaaccggcagactgttcttcgagttttacagactgctgcacgacgcccggcctaaggaaggcgacgaccggcccttcttttggctgttcgagaatgtggtggccatgggagtcagcgacaagcgggatattagccggttcctggagagcaaccccgtgatgatcgatgccaaggaagtgagcgccgcccaccgggccagatacttctggggcaatctgcctggcatgaacagacccctggccagcaccgtgaacgacaagctggagctgcaggagtgcctggagcacggccggatcgccaagttcagcaaggtgagaaccatcaccacccgaagcaacagcatcaaacaaggcaaggaccagcactttcctgtgttcatgaacgagaaggaggacatcctgtggtgtaccgagatggagagagtgttcgggttcccagtccactacacagatgtcagcaacatgtctagactggccagacagagactgctgggaagaagctggtccgtccctgtgatcagacacctgttcgcccctctgaaggagtacttcgcctgcgtgagcagcggcaacagcaacgccaacagccggggccccagcttctctagcggcctggtgccactgtccctgagagggagccacatgggccccatggagatctacaaaaccgtgagcgcctggaagcggcagcctgtgcgcgtgctgagcctgtttcggaatatcgataaagtcctgaaaagcctgggattcctggagagcggctctggctccggcggtggcaccctgaagtacgtggaggatgtgacaaacgtggtcagacgggatgtggagaagtggggccccttcgatctggtgtacggcagcacccaacccctgggcagctcttgtgaccggtgccctggctggtacatgtttcagttccaccggatcctgcagtacgccctgccgagacaggagtcccagcggccattcttttggattttcatggacaacttgctgctgaccgaggatgaccaggaaactaccactcggttcctgcagaccgaagccgtgaccctgcaggacgtgagaggccgggactaccagaacgccatgcgggtgtggtccaacatccctggactgaaaagcaagcacgcacctctgacccctaaagaagaggagtacctgcaggcccaggtgcggagcagaagcaagctggacgcccctaaggtggatctgctggtgaagaattgcctcctgcccctgagagagtacttcaagtatttcagccagaatagtctgcccctgggcggcccaagcagcggcgcccctcctcccagcggcggcagcccagccggctccccaacctctaccgaggagggcacctctgagtccgccacccccgagagcggccctggcacctccaccgagcccagcgagggcagcgcacccggcagccctgccggcagccccacctccacagaggagggaaccagcaccgagcccagcgaaggcagcgccccaggcaccagcaccgagcctagtgagggcggctctggcggcggcagcgcccaggagattaaacggatcaacaagatcagaagaagacttgtgaaagacagcaacaccaagaaggccggcaagacaggccccatgaaaaccctgctggttagagtgatgacacccgatctgagagagcggctggaaaacctgagaaagaagcctgaaaatatcccccagcccatcagcaatacatctagagccaacctgaataagctgctgaccgattacaccgaaatgaagaaggcgatcctgcatgtgtactgggaagagttccagaaggaccctgtgggcctgatgagccgggtggcccagcctgccagcaagaagatcgatcagaacaagctgaaacctgagatggacgagaagggcaacctgaccaccgccggctttgcctgctctcagtgtggccagcccctgttcgtgtacaagctggagcaggtgtctgagaagggcaaggcttacaccaactacttcggacggtgcaatgtggccgagcacgaaaagctgatcctgctggcccagctgaagcccgagaaggatagcgacgaagccgtgacatatagcctgggaaagtttgggcagagggccctggatttctacagcattcatgtgaccaaggagtccacccaccccgtgaagcccctggcccagatcgccggaaacagatacgcctccggacctgtgggaaaggccctgagcgacgcatgtatgggcacaatcgcctccttcctgtctaagtaccaggacatcatcatcgaacaccagaaggtggtgaagggcaaccagaagagactggagagcctgcgggagctggccggcaaggaaaacctggaataccctagcgtgaccctgccacctcagcctcacaccaaggagggcgttgatgcctacaacgaagtgatcgcccgggtgcgaatgtgggtgaacctgaacctgtggcagaagctgaagctaagcagagatgatgccaagcctctgctgagactgaagggattcccttcctttcctctggtcgagagacaggccaacgaagtggactggtgggacatggtgtgtaacgtgaagaagctgatcaacgagaaaaaggaggatggcaaggtgttttggcagaatctggctggctacaagagacaggaagccctgagaccatacctgagcagcgaggaagatcggaagaagggaaagaaattcgctcggtaccagctgggcgacctgctgctgcacctggaaaagaagcacggcgaggactggggaaaggtgtacgacgaggcctgggagcggattgacaagaaagtggaaggcctgagcaagcacatcaagctggaagaggaacggagaagcgaggacgcccagagcaaggccgccctgaccgactggctgcgggctaaggccagcttcgtgatcgagggcctgaaggaggccgacaaggacgagttctgcagatgcgagctgaagctgcagaagtggtacggggacctgcggggaaagcccttcgccatcgaagccgagaacagcatcctggacatcagcggcttcagcaagcagtacaactgtgccttcatctggcagaaggacggcgtgaagaagctgaacctgtacctgatcatcaactacttcaagggcggcaagctgcggttcaagaagatcaaacctgaagccttcgaagccaacagattctacaccgtgatcaacaaaaagagcggcgagatcgtgcccatggaggtgaacttcaacttcgacgaccccaacctgatcatcctgcctctggcctttggcaagagacagggcagagaattcatctggaacgacctgctgtccctggaaaccggcagcctgaagctggccaacggaagagtgatcgagaagacactgtacaacagaagaacccggcaggatgagcctgccctgttcgtggccctgaccttcgagcggcgggaggtcctggactcctccaatatcaaaccaatgaacctgatcggcgtggcaagaggcgaaaacatccccgccgtgatcgccctgaccgaccccgagggctgcccactgagccggtttaaggatagcctgggaaacccaacccacatcctgagaatcggcgagagctataaggagaagcagcggaccatccaggccaagaaggaggtggagcagcggagagccggcggctacagccggaagtacgccagcaaagccaagaatctggcagacgatatggtgagaaacaccgctagagatctgctgtactacgccgtgacccaggatgccatgctgatcttcgccaacctgagccggggcttcggccggcagggcaagcggaccttcatggccgagagacagtacacacggatggaggactggctgaccgccaagctggcctacgagggcctgagcaagacctacctgtccaagacactggcccagtacacctccaagacatgcagcaactgtgggtttaccatcaccagcgccgactacgacagggtgctggagaagctgaagaagacagcaacaggctggatgaccacaattaacggcaaggagctgaaggtggagggccagattacctactacaacagatacaagagacagaacgtagtcaaggacctgtccgtcgagctggatagactgagcgaagaatctgtgaacaacgacatctcctcctggacaaagggcagaagcggagaagctctgagcctcctgaagaaaagattctcccatagacccgtgcaggagaagttcgtgtgcctgaactgcggcttcgagacacacgcagccgagcaagccgccctgaacatcgccagatcctggctgttcctgcggagccaggagtacaagaaataccagacaaacaagacaaccggcaacaccgataagagagccttcgtcgagacctggcagtccttttaccggaagaagcttaaggaggtgtggaaacctgccgtgcggtctggcggatctggcggaggctccacaagcgcccaggagcccctgaccttccacgacgtggccgtggacttcacctgggaggagtggcagctgctggaccccgagcagaaggacctgtacagggacgtgatgctggagacctacagccacctggtgagcgtgggctacgaggccagcaagcccgacatcctgagcaagctggaccacggcgaggccccctggaccgtggccggcgagatccactgcggcacccacagcgagatctggaagaggaccagccccaagaaaaagagaaaagtctaagctgccttctgcggggcttgccttctggccatgcccttcttctctcccttgcacctgtacctcttggtctttgaataaagcctgagtaggaaggctagcaaaaaaaaaaaaaaaaaaaaaaaaaaaaaaaaaaaaaaaaaaaaaaaaaaaaaaaaaaaaaaaaaaaaaaaaaaaaaaaa

SEQ ID NO: 3634 - RNA, 5419 nt, synthetic construct
  source 1..5419: mol_type = other RNA
aggaaataagagagaaaagaagagtaagaagaaatataagagccaccatggcccctaagaagaagcgtaaagtgagccgggtgaacggcagcggcagcggcggcggcatgaaccacgaccaggagttcgacccccctaaggtgtaccctcccgtccccgccgagaagagaaagcccatccgggtcctgagcctgttcgatggcatcgccaccggtctgctggtgctgaaggacctgggcatccaggtggataggtacattgcctccgaggtgtgcgaggactccatcaccgtgggaatggtgcgtcatcagggcaagatcatgtacgtgggcgacgtgcggagcgtgacacagaagcatatccaggagtggggccctttcgacctggtgatcggcggcagcccttgcaatgacctgagcatcgtgaacccagcccggaagggcctgtacgagggaaccggcagactgttcttcgagttttacagactgctgcacgacgcccggcctaaggaaggcgacgaccggcccttcttttggctgttcgagaatgtggtggccatgggagtcagcgacaagcgggatattagccggttcctggagagcaaccccgtgatgatcgatgccaaggaagtgagcgccgcccaccgggccagatacttctggggcaatctgcctggcatgaacagacccctggccagcaccgtgaacgacaagctggagctgcaggagtgcctggagcacggccggatcgccaagttcagcaaggtgagaaccatcaccacccgaagcaacagcatcaaacaaggcaaggaccagcactttcctgtgttcatgaacgagaaggaggacatcctgtggtgtaccgagatggagagagtgttcgggttcccagtccactacacagatgtcagcaacatgtctagactggccagacagagactgctgggaagaagctggtccgtccctgtgatcagacacctgttcgcccctctgaaggagtacttcgcctgcgtgagcagcggcaacagcaacgccaacagccggggccccagcttctctagcggcctggtgccactgtccctgagagggagccacatgggccccatggagatctacaaaaccgtgagcgcctggaagcggcagcctgtgcgcgtgctgagcctgtttcggaatatcgataaagtcctgaaaagcctgggattcctggagagcggctctggctccggcggtggcaccctgaagtacgtggaggatgtgacaaacgtggtcagacgggatgtggagaagtggggccccttcgatctggtgtacggcagcacccaacccctgggcagctcttgtgaccggtgccctggctggtacatgtttcagttccaccggatcctgcagtacgccctgccgagacaggagtcccagcggccattcttttggattttcatggacaacttgctgctgaccgaggatgaccaggaaactaccactcggttcctgcagaccgaagccgtgaccctgcaggacgtgagaggccgggactaccagaacgccatgcgggtgtggtccaacatccctggactgaaaagcaagcacgcacctctgacccctaaagaagaggagtacctgcaggcccaggtgcggagcagaagcaagctggacgcccctaaggtggatctgctggtgaagaattgcctcctgcccctgagagagtacttcaagtatttcagccagaatagtctgcccctgggcggcccaagcagcggcgcccctcctcccagcggcggcagcccagccggctccccaacctctaccgaggagggcacctctgagtccgccacccccgagagcggccctggcacctccaccgagcccagcgagggcagcgcacccggcagccctgccggcagccccacctccacagaggagggaaccagcaccgagcccagcgaaggcagcgccccaggcaccagcaccgagcctagtgagggcggctctggcggcggcagcgcccaggagattaaacggatcaacaagatcagaagaagacttgtgaaagacagcaacaccaagaaggccggcaagacaggccccatgaaaaccctgctggttagagtgatgacacccgatctgagagagcggctggaaaacctgagaaagaagcctgaaaatatcccccagcccatcagcaatacatctagagccaacctgaataagctgctgaccgattacaccgaaatgaagaaggcgatcctgcatgtgtactgggaagagttccagaaggaccctgtgggcctgatgagccgggtggcccagcctgccagcaagaagatcgatcagaacaagctgaaacctgagatggacgagaagggcaacctgaccaccgccggctttgcctgctctcagtgtggccagcccctgttcgtgtacaagctggagcaggtgtctgagaagggcaaggcttacaccaactacttcggacggtgcaatgtggccgagcacgaaaagctgatcctgctggcccagctgaagcccgagaaggatagcgacgaagccgtgacatatagcctgggaaagtttgggcagagggccctggatttctacagcattcatgtgaccaaggagtccacccaccccgtgaagcccctggcccagatcgccggaaacagatacgcctccggacctgtgggaaaggccctgagcgacgcatgtatgggcacaatcgcctccttcctgtctaagtaccaggacatcatcatcgaacaccagaaggtggtgaagggcaaccagaagagactggagagcctgcgggagctggccggcaaggaaaacctggaataccctagcgtgaccctgccacctcagcctcacaccaaggagggcgttgatgcctacaacgaagtgatcgcccgggtgcgaatgtgggtgaacctgaacctgtggcagaagctgaagctaagcagagatgatgccaagcctctgctgagactgaagggattcccttcctttcctctggtcgagagacaggccaacgaagtggactggtgggacatggtgtgtaacgtgaagaagctgatcaacgagaaaaaggaggatggcaaggtgttttggcagaatctggctggctacaagagacaggaagccctgagaccatacctgagcagcgaggaagatcggaagaagggaaagaaattcgctcggtaccagctgggcgacctgctgctgcacctggaaaagaagcacggcgaggactggggaaaggtgtacgacgaggcctgggagcggattgacaagaaagtggaaggcctgagcaagcacatcaagctggaagaggaacggagaagcgaggacgcccagagcaaggccgccctgaccgactggctgcgggctaaggccagcttcgtgatcgagggcctgaaggaggccgacaaggacgagttctgcagatgcgagctgaagctgcagaagtggtacggggacctgcggggaaagcccttcgccatcgaagccgagaacagcatcctggacatcagcggcttcagcaagcagtacaactgtgccttcatctggcagaaggacggcgtgaagaagctgaacctgtacctgatcatcaactacttcaagggcggcaagctgcggttcaagaagatcaaacctgaagccttcgaagccaacagattctacaccgtgatcaacaaaaagagcggcgagatcgtgcccatggaggtgaacttcaacttcgacgaccccaacctgatcatcctgcctctggcctttggcaagagacagggcagagaattcatctggaacgacctgctgtccctggaaaccggcagcctgaagctggccaacggaagagtgatcgagaagacactgtacaacagaagaacccggcaggatgagcctgccctgttcgtggccctgaccttcgagcggcgggaggtcctggactcctccaatatcaaaccaatgaacctgatcggcgtggcaagaggcgaaaacatccccgccgtgatcgccctgaccgaccccgagggctgcccactgagccggtttaaggatagcctgggaaacccaacccacatcctgagaatcggcgagagctataaggagaagcagcggaccatccaggccaagaaggaggtggagcagcggagagccggcggctacagccggaagtacgccagcaaagccaagaatctggcagacgatatggtgagaaacaccgctagagatctgctgtactacgccgtgacccaggatgccatgctgatcttcgccaacctgagccggggcttcggccggcagggcaagcggaccttcatggccgagagacagtacacacggatggaggactggctgaccgccaagctggcctacgagggcctgagcaagacctacctgtccaagacactggcccagtacacctccaagacatgcagcaactgtgggtttaccatcaccagcgccgactacgacagggtgctggagaagctgaagaagacagcaacaggctggatgaccacaattaacggcaaggagctgaaggtggagggccagattacctactacaacagatacaagagacagaacgtagtcaaggacctgtccgtcgagctggatagactgagcgaagaatctgtgaacaacgacatctcctcctggacaaagggcagaagcggagaagctctgagcctcctgaagaaaagattctcccatagacccgtgcaggagaagttcgtgtgcctgaactgcggcttcgagacacacgcagccgagcaagccgccctgaacatcgccagatcctggctgttcctgcggagccaggagtacaagaaataccagacaaacaagacaaccggcaacaccgataagagagccttcgtcgagacctggcagtccttttaccggaagaagcttaaggaggtgtggaaacctgccgtgcggtctggcggatctggcggaggctccacaagcgccaggggcaagagcaagagcaaggcccccatcaccttcggcgacctggccatctacttcagccaggaggagtgggagtggctgagccccatccagaaggacctgtacgaggacgtgatgctggagaactacaggaacctggtgagcctgggcctgagcttcaggaggcccaacgtgatcaccctgctggagaagggcaaggccccctggatggtggagcccgtgaggaggaggagggcccccaccagccccaagaaaaagagaaaagtctaagctgccttctgcggggcttgccttctggccatgcccttcttctctcccttgcacctgtacctcttggtctttgaataaagcctgagtaggaaggctagcaaaaaaaaaaaaaaaaaaaaaaaaaaaaaaaaaaaaaaaaaaaaaaaaaaaaaaaaaaaaaaaaaaaaaaaaaaaaaaaa

SEQ ID NO: 3635 - RNA, 5419 nt, synthetic construct
  source 1..5419: mol_type = other RNA
aggaaataagagagaaaagaagagtaagaagaaatataagagccaccatggcccctaagaagaagcgtaaagtgagccgggtgaacggcagcggcagcggcggcggcatgaaccacgaccaggagttcgacccccctaaggtgtaccctcccgtccccgccgagaagagaaagcccatccgggtcctgagcctgttcgatggcatcgccaccggtctgctggtgctgaaggacctgggcatccaggtggataggtacattgcctccgaggtgtgcgaggactccatcaccgtgggaatggtgcgtcatcagggcaagatcatgtacgtgggcgacgtgcggagcgtgacacagaagcatatccaggagtggggccctttcgacctggtgatcggcggcagcccttgcaatgacctgagcatcgtgaacccagcccggaagggcctgtacgagggaaccggcagactgttcttcgagttttacagactgctgcacgacgcccggcctaaggaaggcgacgaccggcccttcttttggctgttcgagaatgtggtggccatgggagtcagcgacaagcgggatattagccggttcctggagagcaaccccgtgatgatcgatgccaaggaagtgagcgccgcccaccgggccagatacttctggggcaatctgcctggcatgaacagacccctggccagcaccgtgaacgacaagctggagctgcaggagtgcctggagcacggccggatcgccaagttcagcaaggtgagaaccatcaccacccgaagcaacagcatcaaacaaggcaaggaccagcactttcctgtgttcatgaacgagaaggaggacatcctgtggtgtaccgagatggagagagtgttcgggttcccagtccactacacagatgtcagcaacatgtctagactggccagacagagactgctgggaagaagctggtccgtccctgtgatcagacacctgttcgcccctctgaaggagtacttcgcctgcgtgagcagcggcaacagcaacgccaacagccggggccccagcttctctagcggcctggtgccactgtccctgagagggagccacatgggccccatggagatctacaaaaccgtgagcgcctggaagcggcagcctgtgcgcgtgctgagcctgtttcggaatatcgataaagtcctgaaaagcctgggattcctggagagcggctctggctccggcggtggcaccctgaagtacgtggaggatgtgacaaacgtggtcagacgggatgtggagaagtggggccccttcgatctggtgtacggcagcacccaacccctgggcagctcttgtgaccggtgccctggctggtacatgtttcagttccaccggatcctgcagtacgccctgccgagacaggagtcccagcggccattcttttggattttcatggacaacttgctgctgaccgaggatgaccaggaaactaccactcggttcctgcagaccgaagccgtgaccctgcaggacgtgagaggccgggactaccagaacgccatgcgggtgtggtccaacatccctggactgaaaagcaagcacgcacctctgacccctaaagaagaggagtacctgcaggcccaggtgcggagcagaagcaagctggacgcccctaaggtggatctgctggtgaagaattgcctcctgcccctgagagagtacttcaagtatttcagccagaatagtctgcccctgggcggcccaagcagcggcgcccctcctcccagcggcggcagcccagccggctccccaacctctaccgaggagggcacctctgagtccgccacccccgagagcggccctggcacctccaccgagcccagcgagggcagcgcacccggcagccctgccggcagccccacctccacagaggagggaaccagcaccgagcccagcgaaggcagcgccccaggcaccagcaccgagcctagtgagggcggctctggcggcggcagcgcccaggagattaaacggatcaacaagatcagaagaagacttgtgaaagacagcaacaccaagaaggccggcaagacaggccccatgaaaaccctgctggttagagtgatgacacccgatctgagagagcggctggaaaacctgagaaagaagcctgaaaatatcccccagcccatcagcaatacatctagagccaacctgaataagctgctgaccgattacaccgaaatgaagaaggcgatcctgcatgtgtactgggaagagttccagaaggaccctgtgggcctgatgagccgggtggcccagcctgccagcaagaagatcgatcagaacaagctgaaacctgagatggacgagaagggcaacctgaccaccgccggctttgcctgctctcagtgtggccagcccctgttcgtgtacaagctggagcaggtgtctgagaagggcaaggcttacaccaactacttcggacggtgcaatgtggccgagcacgaaaagctgatcctgctggcccagctgaagcccgagaaggatagcgacgaagccgtgacatatagcctgggaaagtttgggcagagggccctggatttctacagcattcatgtgaccaaggagtccacccaccccgtgaagcccctggcccagatcgccggaaacagatacgcctccggacctgtgggaaaggccctgagcgacgcatgtatgggcacaatcgcctccttcctgtctaagtaccaggacatcatcatcgaacaccagaaggtggtgaagggcaaccagaagagactggagagcctgcgggagctggccggcaaggaaaacctggaataccctagcgtgaccctgccacctcagcctcacaccaaggagggcgttgatgcctacaacgaagtgatcgcccgggtgcgaatgtgggtgaacctgaacctgtggcagaagctgaagctaagcagagatgatgccaagcctctgctgagactgaagggattcccttcctttcctctggtcgagagacaggccaacgaagtggactggtgggacatggtgtgtaacgtgaagaagctgatcaacgagaaaaaggaggatggcaaggtgttttggcagaatctggctggctacaagagacaggaagccctgagaccatacctgagcagcgaggaagatcggaagaagggaaagaaattcgctcggtaccagctgggcgacctgctgctgcacctggaaaagaagcacggcgaggactggggaaaggtgtacgacgaggcctgggagcggattgacaagaaagtggaaggcctgagcaagcacatcaagctggaagaggaacggagaagcgaggacgcccagagcaaggccgccctgaccgactggctgcgggctaaggccagcttcgtgatcgagggcctgaaggaggccgacaaggacgagttctgcagatgcgagctgaagctgcagaagtggtacggggacctgcggggaaagcccttcgccatcgaagccgagaacagcatcctggacatcagcggcttcagcaagcagtacaactgtgccttcatctggcagaaggacggcgtgaagaagctgaacctgtacctgatcatcaactacttcaagggcggcaagctgcggttcaagaagatcaaacctgaagccttcgaagccaacagattctacaccgtgatcaacaaaaagagcggcgagatcgtgcccatggaggtgaacttcaacttcgacgaccccaacctgatcatcctgcctctggcctttggcaagagacagggcagagaattcatctggaacgacctgctgtccctggaaaccggcagcctgaagctggccaacggaagagtgatcgagaagacactgtacaacagaagaacccggcaggatgagcctgccctgttcgtggccctgaccttcgagcggcgggaggtcctggactcctccaatatcaaaccaatgaacctgatcggcgtggcaagaggcgaaaacatccccgccgtgatcgccctgaccgaccccgagggctgcccactgagccggtttaaggatagcctgggaaacccaacccacatcctgagaatcggcgagagctataaggagaagcagcggaccatccaggccaagaaggaggtggagcagcggagagccggcggctacagccggaagtacgccagcaaagccaagaatctggcagacgatatggtgagaaacaccgctagagatctgctgtactacgccgtgacccaggatgccatgctgatcttcgccaacctgagccggggcttcggccggcagggcaagcggaccttcatggccgagagacagtacacacggatggaggactggctgaccgccaagctggcctacgagggcctgagcaagacctacctgtccaagacactggcccagtacacctccaagacatgcagcaactgtgggtttaccatcaccagcgccgactacgacagggtgctggagaagctgaagaagacagcaacaggctggatgaccacaattaacggcaaggagctgaaggtggagggccagattacctactacaacagatacaagagacagaacgtagtcaaggacctgtccgtcgagctggatagactgagcgaagaatctgtgaacaacgacatctcctcctggacaaagggcagaagcggagaagctctgagcctcctgaagaaaagattctcccatagacccgtgcaggagaagttcgtgtgcctgaactgcggcttcgagacacacgcagccgagcaagccgccctgaacatcgccagatcctggctgttcctgcggagccaggagtacaagaaataccagacaaacaagacaaccggcaacaccgataagagagccttcgtcgagacctggcagtccttttaccggaagaagcttaaggaggtgtggaaacctgccgtgcggtctggcggatctggcggaggctccacaagcggcctggtgagcttcgacgaggtgagcgtgcacttcaccaacgaggagtgggccctgctggaccccggccagagggccctgtacgaggaggtgatggaggagatcagggagatgatgaccagcgtgggcgacgtgagcgagttcctgaccgagggcgagcagagcgagcccagcagggagggcgccgaggagcagaaggagcagaggaagcagagggtgcaggtgggcacctacaggaaggagaccagccccaagaaaaagagaaaagtctaagctgccttctgcggggcttgccttctggccatgcccttcttctctcccttgcacctgtacctcttggtctttgaataaagcctgagtaggaaggctagcaaaaaaaaaaaaaaaaaaaaaaaaaaaaaaaaaaaaaaaaaaaaaaaaaaaaaaaaaaaaaaaaaaaaaaaaaaaaaaaa

SEQ ID NO: 3636 - RNA, 5419 nt, synthetic construct
  source 1..5419: mol_type = other RNA
aggaaataagagagaaaagaagagtaagaagaaatataagagccaccatggcccctaagaagaagcgtaaagtgagccgggtgaacggcagcggcagcggcggcggcatgaaccacgaccaggagttcgacccccctaaggtgtaccctcccgtccccgccgagaagagaaagcccatccgggtcctgagcctgttcgatggcatcgccaccggtctgctggtgctgaaggacctgggcatccaggtggataggtacattgcctccgaggtgtgcgaggactccatcaccgtgggaatggtgcgtcatcagggcaagatcatgtacgtgggcgacgtgcggagcgtgacacagaagcatatccaggagtggggccctttcgacctggtgatcggcggcagcccttgcaatgacctgagcatcgtgaacccagcccggaagggcctgtacgagggaaccggcagactgttcttcgagttttacagactgctgcacgacgcccggcctaaggaaggcgacgaccggcccttcttttggctgttcgagaatgtggtggccatgggagtcagcgacaagcgggatattagccggttcctggagagcaaccccgtgatgatcgatgccaaggaagtgagcgccgcccaccgggccagatacttctggggcaatctgcctggcatgaacagacccctggccagcaccgtgaacgacaagctggagctgcaggagtgcctggagcacggccggatcgccaagttcagcaaggtgagaaccatcaccacccgaagcaacagcatcaaacaaggcaaggaccagcactttcctgtgttcatgaacgagaaggaggacatcctgtggtgtaccgagatggagagagtgttcgggttcccagtccactacacagatgtcagcaacatgtctagactggccagacagagactgctgggaagaagctggtccgtccctgtgatcagacacctgttcgcccctctgaaggagtacttcgcctgcgtgagcagcggcaacagcaacgccaacagccggggccccagcttctctagcggcctggtgccactgtccctgagagggagccacatgggccccatggagatctacaaaaccgtgagcgcctggaagcggcagcctgtgcgcgtgctgagcctgtttcggaatatcgataaagtcctgaaaagcctgggattcctggagagcggctctggctccggcggtggcaccctgaagtacgtggaggatgtgacaaacgtggtcagacgggatgtggagaagtggggccccttcgatctggtgtacggcagcacccaacccctgggcagctcttgtgaccggtgccctggctggtacatgtttcagttccaccggatcctgcagtacgccctgccgagacaggagtcccagcggccattcttttggattttcatggacaacttgctgctgaccgaggatgaccaggaaactaccactcggttcctgcagaccgaagccgtgaccctgcaggacgtgagaggccgggactaccagaacgccatgcgggtgtggtccaacatccctggactgaaaagcaagcacgcacctctgacccctaaagaagaggagtacctgcaggcccaggtgcggagcagaagcaagctggacgcccctaaggtggatctgctggtgaagaattgcctcctgcccctgagagagtacttcaagtatttcagccagaatagtctgcccctgggcggcccaagcagcggcgcccctcctcccagcggcggcagcccagccggctccccaacctctaccgaggagggcacctctgagtccgccacccccgagagcggccctggcacctccaccgagcccagcgagggcagcgcacccggcagccctgccggcagccccacctccacagaggagggaaccagcaccgagcccagcgaaggcagcgccccaggcaccagcaccgagcctagtgagggcggctctggcggcggcagcgcccaggagattaaacggatcaacaagatcagaagaagacttgtgaaagacagcaacaccaagaaggccggcaagacaggccccatgaaaaccctgctggttagagtgatgacacccgatctgagagagcggctggaaaacctgagaaagaagcctgaaaatatcccccagcccatcagcaatacatctagagccaacctgaataagctgctgaccgattacaccgaaatgaagaaggcgatcctgcatgtgtactgggaagagttccagaaggaccctgtgggcctgatgagccgggtggcccagcctgccagcaagaagatcgatcagaacaagctgaaacctgagatggacgagaagggcaacctgaccaccgccggctttgcctgctctcagtgtggccagcccctgttcgtgtacaagctggagcaggtgtctgagaagggcaaggcttacaccaactacttcggacggtgcaatgtggccgagcacgaaaagctgatcctgctggcccagctgaagcccgagaaggatagcgacgaagccgtgacatatagcctgggaaagtttgggcagagggccctggatttctacagcattcatgtgaccaaggagtccacccaccccgtgaagcccctggcccagatcgccggaaacagatacgcctccggacctgtgggaaaggccctgagcgacgcatgtatgggcacaatcgcctccttcctgtctaagtaccaggacatcatcatcgaacaccagaaggtggtgaagggcaaccagaagagactggagagcctgcgggagctggccggcaaggaaaacctggaataccctagcgtgaccctgccacctcagcctcacaccaaggagggcgttgatgcctacaacgaagtgatcgcccgggtgcgaatgtgggtgaacctgaacctgtggcagaagctgaagctaagcagagatgatgccaagcctctgctgagactgaagggattcccttcctttcctctggtcgagagacaggccaacgaagtggactggtgggacatggtgtgtaacgtgaagaagctgatcaacgagaaaaaggaggatggcaaggtgttttggcagaatctggctggctacaagagacaggaagccctgagaccatacctgagcagcgaggaagatcggaagaagggaaagaaattcgctcggtaccagctgggcgacctgctgctgcacctggaaaagaagcacggcgaggactggggaaaggtgtacgacgaggcctgggagcggattgacaagaaagtggaaggcctgagcaagcacatcaagctggaagaggaacggagaagcgaggacgcccagagcaaggccgccctgaccgactggctgcgggctaaggccagcttcgtgatcgagggcctgaaggaggccgacaaggacgagttctgcagatgcgagctgaagctgcagaagtggtacggggacctgcggggaaagcccttcgccatcgaagccgagaacagcatcctggacatcagcggcttcagcaagcagtacaactgtgccttcatctggcagaaggacggcgtgaagaagctgaacctgtacctgatcatcaactacttcaagggcggcaagctgcggttcaagaagatcaaacctgaagccttcgaagccaacagattctacaccgtgatcaacaaaaagagcggcgagatcgtgcccatggaggtgaacttcaacttcgacgaccccaacctgatcatcctgcctctggcctttggcaagagacagggcagagaattcatctggaacgacctgctgtccctggaaaccggcagcctgaagctggccaacggaagagtgatcgagaagacactgtacaacagaagaacccggcaggatgagcctgccctgttcgtggccctgaccttcgagcggcgggaggtcctggactcctccaatatcaaaccaatgaacctgatcggcgtggcaagaggcgaaaacatccccgccgtgatcgccctgaccgaccccgagggctgcccactgagccggtttaaggatagcctgggaaacccaacccacatcctgagaatcggcgagagctataaggagaagcagcggaccatccaggccaagaaggaggtggagcagcggagagccggcggctacagccggaagtacgccagcaaagccaagaatctggcagacgatatggtgagaaacaccgctagagatctgctgtactacgccgtgacccaggatgccatgctgatcttcgccaacctgagccggggcttcggccggcagggcaagcggaccttcatggccgagagacagtacacacggatggaggactggctgaccgccaagctggcctacgagggcctgagcaagacctacctgtccaagacactggcccagtacacctccaagacatgcagcaactgtgggtttaccatcaccagcgccgactacgacagggtgctggagaagctgaagaagacagcaacaggctggatgaccacaattaacggcaaggagctgaaggtggagggccagattacctactacaacagatacaagagacagaacgtagtcaaggacctgtccgtcgagctggatagactgagcgaagaatctgtgaacaacgacatctcctcctggacaaagggcagaagcggagaagctctgagcctcctgaagaaaagattctcccatagacccgtgcaggagaagttcgtgtgcctgaactgcggcttcgagacacacgcagccgagcaagccgccctgaacatcgccagatcctggctgttcctgcggagccaggagtacaagaaataccagacaaacaagacaaccggcaacaccgataagagagccttcgtcgagacctggcagtccttttaccggaagaagcttaaggaggtgtggaaacctgccgtgcggtctggcggatctggcggaggctccacaagcgacagcatgagggtgaccttcgaggaggtggccgtgtacttcacccccggccagggcgccctgctgggccccgcccagagggccctgtacagggacgtgatgcaggagaactacgaggccgtgaccagcctgggcttccccgtgcccaagcccgagctgatcgccaggctggagaggggcgaggagccctgggtgcccgacctgcaggccagggaggagagggagatccccaggggcacctgcaccagccccaagaaaaagagaaaagtctaagctgccttctgcggggcttgccttctggccatgcccttcttctctcccttgcacctgtacctcttggtctttgaataaagcctgagtaggaaggctagcaaaaaaaaaaaaaaaaaaaaaaaaaaaaaaaaaaaaaaaaaaaaaaaaaaaaaaaaaaaaaaaaaaaaaaaaaaaaaaaa

SEQ ID NO: 3637 - RNA, 5419 nt, synthetic construct
  source 1..5419: mol_type = other RNA
aggaaataagagagaaaagaagagtaagaagaaatataagagccaccatggcccctaagaagaagcgtaaagtgagccgggtgaacggcagcggcagcggcggcggcatgaaccacgaccaggagttcgacccccctaaggtgtaccctcccgtccccgccgagaagagaaagcccatccgggtcctgagcctgttcgatggcatcgccaccggtctgctggtgctgaaggacctgggcatccaggtggataggtacattgcctccgaggtgtgcgaggactccatcaccgtgggaatggtgcgtcatcagggcaagatcatgtacgtgggcgacgtgcggagcgtgacacagaagcatatccaggagtggggccctttcgacctggtgatcggcggcagcccttgcaatgacctgagcatcgtgaacccagcccggaagggcctgtacgagggaaccggcagactgttcttcgagttttacagactgctgcacgacgcccggcctaaggaaggcgacgaccggcccttcttttggctgttcgagaatgtggtggccatgggagtcagcgacaagcgggatattagccggttcctggagagcaaccccgtgatgatcgatgccaaggaagtgagcgccgcccaccgggccagatacttctggggcaatctgcctggcatgaacagacccctggccagcaccgtgaacgacaagctggagctgcaggagtgcctggagcacggccggatcgccaagttcagcaaggtgagaaccatcaccacccgaagcaacagcatcaaacaaggcaaggaccagcactttcctgtgttcatgaacgagaaggaggacatcctgtggtgtaccgagatggagagagtgttcgggttcccagtccactacacagatgtcagcaacatgtctagactggccagacagagactgctgggaagaagctggtccgtccctgtgatcagacacctgttcgcccctctgaaggagtacttcgcctgcgtgagcagcggcaacagcaacgccaacagccggggccccagcttctctagcggcctggtgccactgtccctgagagggagccacatgggccccatggagatctacaaaaccgtgagcgcctggaagcggcagcctgtgcgcgtgctgagcctgtttcggaatatcgataaagtcctgaaaagcctgggattcctggagagcggctctggctccggcggtggcaccctgaagtacgtggaggatgtgacaaacgtggtcagacgggatgtggagaagtggggccccttcgatctggtgtacggcagcacccaacccctgggcagctcttgtgaccggtgccctggctggtacatgtttcagttccaccggatcctgcagtacgccctgccgagacaggagtcccagcggccattcttttggattttcatggacaacttgctgctgaccgaggatgaccaggaaactaccactcggttcctgcagaccgaagccgtgaccctgcaggacgtgagaggccgggactaccagaacgccatgcgggtgtggtccaacatccctggactgaaaagcaagcacgcacctctgacccctaaagaagaggagtacctgcaggcccaggtgcggagcagaagcaagctggacgcccctaaggtggatctgctggtgaagaattgcctcctgcccctgagagagtacttcaagtatttcagccagaatagtctgcccctgggcggcccaagcagcggcgcccctcctcccagcggcggcagcccagccggctccccaacctctaccgaggagggcacctctgagtccgccacccccgagagcggccctggcacctccaccgagcccagcgagggcagcgcacccggcagccctgccggcagccccacctccacagaggagggaaccagcaccgagcccagcgaaggcagcgccccaggcaccagcaccgagcctagtgagggcggctctggcggcggcagcgcccaggagattaaacggatcaacaagatcagaagaagacttgtgaaagacagcaacaccaagaaggccggcaagacaggccccatgaaaaccctgctggttagagtgatgacacccgatctgagagagcggctggaaaacctgagaaagaagcctgaaaatatcccccagcccatcagcaatacatctagagccaacctgaataagctgctgaccgattacaccgaaatgaagaaggcgatcctgcatgtgtactgggaagagttccagaaggaccctgtgggcctgatgagccgggtggcccagcctgccagcaagaagatcgatcagaacaagctgaaacctgagatggacgagaagggcaacctgaccaccgccggctttgcctgctctcagtgtggccagcccctgttcgtgtacaagctggagcaggtgtctgagaagggcaaggcttacaccaactacttcggacggtgcaatgtggccgagcacgaaaagctgatcctgctggcccagctgaagcccgagaaggatagcgacgaagccgtgacatatagcctgggaaagtttgggcagagggccctggatttctacagcattcatgtgaccaaggagtccacccaccccgtgaagcccctggcccagatcgccggaaacagatacgcctccggacctgtgggaaaggccctgagcgacgcatgtatgggcacaatcgcctccttcctgtctaagtaccaggacatcatcatcgaacaccagaaggtggtgaagggcaaccagaagagactggagagcctgcgggagctggccggcaaggaaaacctggaataccctagcgtgaccctgccacctcagcctcacaccaaggagggcgttgatgcctacaacgaagtgatcgcccgggtgcgaatgtgggtgaacctgaacctgtggcagaagctgaagctaagcagagatgatgccaagcctctgctgagactgaagggattcccttcctttcctctggtcgagagacaggccaacgaagtggactggtgggacatggtgtgtaacgtgaagaagctgatcaacgagaaaaaggaggatggcaaggtgttttggcagaatctggctggctacaagagacaggaagccctgagaccatacctgagcagcgaggaagatcggaagaagggaaagaaattcgctcggtaccagctgggcgacctgctgctgcacctggaaaagaagcacggcgaggactggggaaaggtgtacgacgaggcctgggagcggattgacaagaaagtggaaggcctgagcaagcacatcaagctggaagaggaacggagaagcgaggacgcccagagcaaggccgccctgaccgactggctgcgggctaaggccagcttcgtgatcgagggcctgaaggaggccgacaaggacgagttctgcagatgcgagctgaagctgcagaagtggtacggggacctgcggggaaagcccttcgccatcgaagccgagaacagcatcctggacatcagcggcttcagcaagcagtacaactgtgccttcatctggcagaaggacggcgtgaagaagctgaacctgtacctgatcatcaactacttcaagggcggcaagctgcggttcaagaagatcaaacctgaagccttcgaagccaacagattctacaccgtgatcaacaaaaagagcggcgagatcgtgcccatggaggtgaacttcaacttcgacgaccccaacctgatcatcctgcctctggcctttggcaagagacagggcagagaattcatctggaacgacctgctgtccctggaaaccggcagcctgaagctggccaacggaagagtgatcgagaagacactgtacaacagaagaacccggcaggatgagcctgccctgttcgtggccctgaccttcgagcggcgggaggtcctggactcctccaatatcaaaccaatgaacctgatcggcgtggcaagaggcgaaaacatccccgccgtgatcgccctgaccgaccccgagggctgcccactgagccggtttaaggatagcctgggaaacccaacccacatcctgagaatcggcgagagctataaggagaagcagcggaccatccaggccaagaaggaggtggagcagcggagagccggcggctacagccggaagtacgccagcaaagccaagaatctggcagacgatatggtgagaaacaccgctagagatctgctgtactacgccgtgacccaggatgccatgctgatcttcgccaacctgagccggggcttcggccggcagggcaagcggaccttcatggccgagagacagtacacacggatggaggactggctgaccgccaagctggcctacgagggcctgagcaagacctacctgtccaagacactggcccagtacacctccaagacatgcagcaactgtgggtttaccatcaccagcgccgactacgacagggtgctggagaagctgaagaagacagcaacaggctggatgaccacaattaacggcaaggagctgaaggtggagggccagattacctactacaacagatacaagagacagaacgtagtcaaggacctgtccgtcgagctggatagactgagcgaagaatctgtgaacaacgacatctcctcctggacaaagggcagaagcggagaagctctgagcctcctgaagaaaagattctcccatagacccgtgcaggagaagttcgtgtgcctgaactgcggcttcgagacacacgcagccgagcaagccgccctgaacatcgccagatcctggctgttcctgcggagccaggagtacaagaaataccagacaaacaagacaaccggcaacaccgataagagagccttcgtcgagacctggcagtccttttaccggaagaagcttaaggaggtgtggaaacctgccgtgcggtctggcggatctggcggaggctccacaagctgcttcagcggcgaggagaggatggccgccggccacccccccaggtggccccaggagctggtgaccttcgaggacgtgagcgtggacttcagccaggaggagtgggagctgctggaccccgcccagaaggagctgtacagggaggtgaccctggagaactacaggaacctggtgagcctggaggccctgaagaacccctgcgccgacgccggcatggaggagggccccttcagcaccgcccacaccagccccaagaaaaagagaaaagtctaagctgccttctgcggggcttgccttctggccatgcccttcttctctcccttgcacctgtacctcttggtctttgaataaagcctgagtaggaaggctagcaaaaaaaaaaaaaaaaaaaaaaaaaaaaaaaaaaaaaaaaaaaaaaaaaaaaaaaaaaaaaaaaaaaaaaaaaaaaaaaa

SEQ ID NO: 3638 - RNA, 5419 nt, synthetic construct
  source 1..5419: mol_type = other RNA
aggaaataagagagaaaagaagagtaagaagaaatataagagccaccatggcccctaagaagaagcgtaaagtgagccgggtgaacggcagcggcagcggcggcggcatgaaccacgaccaggagttcgacccccctaaggtgtaccctcccgtccccgccgagaagagaaagcccatccgggtcctgagcctgttcgatggcatcgccaccggtctgctggtgctgaaggacctgggcatccaggtggataggtacattgcctccgaggtgtgcgaggactccatcaccgtgggaatggtgcgtcatcagggcaagatcatgtacgtgggcgacgtgcggagcgtgacacagaagcatatccaggagtggggccctttcgacctggtgatcggcggcagcccttgcaatgacctgagcatcgtgaacccagcccggaagggcctgtacgagggaaccggcagactgttcttcgagttttacagactgctgcacgacgcccggcctaaggaaggcgacgaccggcccttcttttggctgttcgagaatgtggtggccatgggagtcagcgacaagcgggatattagccggttcctggagagcaaccccgtgatgatcgatgccaaggaagtgagcgccgcccaccgggccagatacttctggggcaatctgcctggcatgaacagacccctggccagcaccgtgaacgacaagctggagctgcaggagtgcctggagcacggccggatcgccaagttcagcaaggtgagaaccatcaccacccgaagcaacagcatcaaacaaggcaaggaccagcactttcctgtgttcatgaacgagaaggaggacatcctgtggtgtaccgagatggagagagtgttcgggttcccagtccactacacagatgtcagcaacatgtctagactggccagacagagactgctgggaagaagctggtccgtccctgtgatcagacacctgttcgcccctctgaaggagtacttcgcctgcgtgagcagcggcaacagcaacgccaacagccggggccccagcttctctagcggcctggtgccactgtccctgagagggagccacatgggccccatggagatctacaaaaccgtgagcgcctggaagcggcagcctgtgcgcgtgctgagcctgtttcggaatatcgataaagtcctgaaaagcctgggattcctggagagcggctctggctccggcggtggcaccctgaagtacgtggaggatgtgacaaacgtggtcagacgggatgtggagaagtggggccccttcgatctggtgtacggcagcacccaacccctgggcagctcttgtgaccggtgccctggctggtacatgtttcagttccaccggatcctgcagtacgccctgccgagacaggagtcccagcggccattcttttggattttcatggacaacttgctgctgaccgaggatgaccaggaaactaccactcggttcctgcagaccgaagccgtgaccctgcaggacgtgagaggccgggactaccagaacgccatgcgggtgtggtccaacatccctggactgaaaagcaagcacgcacctctgacccctaaagaagaggagtacctgcaggcccaggtgcggagcagaagcaagctggacgcccctaaggtggatctgctggtgaagaattgcctcctgcccctgagagagtacttcaagtatttcagccagaatagtctgcccctgggcggcccaagcagcggcgcccctcctcccagcggcggcagcccagccggctccccaacctctaccgaggagggcacctctgagtccgccacccccgagagcggccctggcacctccaccgagcccagcgagggcagcgcacccggcagccctgccggcagccccacctccacagaggagggaaccagcaccgagcccagcgaaggcagcgccccaggcaccagcaccgagcctagtgagggcggctctggcggcggcagcgcccaggagattaaacggatcaacaagatcagaagaagacttgtgaaagacagcaacaccaagaaggccggcaagacaggccccatgaaaaccctgctggttagagtgatgacacccgatctgagagagcggctggaaaacctgagaaagaagcctgaaaatatcccccagcccatcagcaatacatctagagccaacctgaataagctgctgaccgattacaccgaaatgaagaaggcgatcctgcatgtgtactgggaagagttccagaaggaccctgtgggcctgatgagccgggtggcccagcctgccagcaagaagatcgatcagaacaagctgaaacctgagatggacgagaagggcaacctgaccaccgccggctttgcctgctctcagtgtggccagcccctgttcgtgtacaagctggagcaggtgtctgagaagggcaaggcttacaccaactacttcggacggtgcaatgtggccgagcacgaaaagctgatcctgctggcccagctgaagcccgagaaggatagcgacgaagccgtgacatatagcctgggaaagtttgggcagagggccctggatttctacagcattcatgtgaccaaggagtccacccaccccgtgaagcccctggcccagatcgccggaaacagatacgcctccggacctgtgggaaaggccctgagcgacgcatgtatgggcacaatcgcctccttcctgtctaagtaccaggacatcatcatcgaacaccagaaggtggtgaagggcaaccagaagagactggagagcctgcgggagctggccggcaaggaaaacctggaataccctagcgtgaccctgccacctcagcctcacaccaaggagggcgttgatgcctacaacgaagtgatcgcccgggtgcgaatgtgggtgaacctgaacctgtggcagaagctgaagctaagcagagatgatgccaagcctctgctgagactgaagggattcccttcctttcctctggtcgagagacaggccaacgaagtggactggtgggacatggtgtgtaacgtgaagaagctgatcaacgagaaaaaggaggatggcaaggtgttttggcagaatctggctggctacaagagacaggaagccctgagaccatacctgagcagcgaggaagatcggaagaagggaaagaaattcgctcggtaccagctgggcgacctgctgctgcacctggaaaagaagcacggcgaggactggggaaaggtgtacgacgaggcctgggagcggattgacaagaaagtggaaggcctgagcaagcacatcaagctggaagaggaacggagaagcgaggacgcccagagcaaggccgccctgaccgactggctgcgggctaaggccagcttcgtgatcgagggcctgaaggaggccgacaaggacgagttctgcagatgcgagctgaagctgcagaagtggtacggggacctgcggggaaagcccttcgccatcgaagccgagaacagcatcctggacatcagcggcttcagcaagcagtacaactgtgccttcatctggcagaaggacggcgtgaagaagctgaacctgtacctgatcatcaactacttcaagggcggcaagctgcggttcaagaagatcaaacctgaagccttcgaagccaacagattctacaccgtgatcaacaaaaagagcggcgagatcgtgcccatggaggtgaacttcaacttcgacgaccccaacctgatcatcctgcctctggcctttggcaagagacagggcagagaattcatctggaacgacctgctgtccctggaaaccggcagcctgaagctggccaacggaagagtgatcgagaagacactgtacaacagaagaacccggcaggatgagcctgccctgttcgtggccctgaccttcgagcggcgggaggtcctggactcctccaatatcaaaccaatgaacctgatcggcgtggcaagaggcgaaaacatccccgccgtgatcgccctgaccgaccccgagggctgcccactgagccggtttaaggatagcctgggaaacccaacccacatcctgagaatcggcgagagctataaggagaagcagcggaccatccaggccaagaaggaggtggagcagcggagagccggcggctacagccggaagtacgccagcaaagccaagaatctggcagacgatatggtgagaaacaccgctagagatctgctgtactacgccgtgacccaggatgccatgctgatcttcgccaacctgagccggggcttcggccggcagggcaagcggaccttcatggccgagagacagtacacacggatggaggactggctgaccgccaagctggcctacgagggcctgagcaagacctacctgtccaagacactggcccagtacacctccaagacatgcagcaactgtgggtttaccatcaccagcgccgactacgacagggtgctggagaagctgaagaagacagcaacaggctggatgaccacaattaacggcaaggagctgaaggtggagggccagattacctactacaacagatacaagagacagaacgtagtcaaggacctgtccgtcgagctggatagactgagcgaagaatctgtgaacaacgacatctcctcctggacaaagggcagaagcggagaagctctgagcctcctgaagaaaagattctcccatagacccgtgcaggagaagttcgtgtgcctgaactgcggcttcgagacacacgcagccgagcaagccgccctgaacatcgccagatcctggctgttcctgcggagccaggagtacaagaaataccagacaaacaagacaaccggcaacaccgataagagagccttcgtcgagacctggcagtccttttaccggaagaagcttaaggaggtgtggaaacctgccgtgcggtctggcggatctggcggaggctccacaagcgagctggtgatgttcagggacgtggccatcgacgtgagccaggaggagtgggagtgcctgaaccccgcccagaggaacctgtacaaggaggtgatgctggagaactacagcaacctggtgagcctgggcctgagcgtgagcaagcccgccgtgatcagcagcctggagcagggcaaggagccctggatgttcgtgagggaggagaccggcaggtggtgcagcgacctggccagcagggacgagaccagccccaagaaaaagagaaaagtctaagctgccttctgcggggcttgccttctggccatgcccttcttctctcccttgcacctgtacctcttggtctttgaataaagcctgagtaggaaggctagcaaaaaaaaaaaaaaaaaaaaaaaaaaaaaaaaaaaaaaaaaaaaaaaaaaaaaaaaaaaaaaaaaaaaaaaaaaaaaaaa

SEQ ID NO: 3639 - RNA, 5419 nt, synthetic construct
  source 1..5419: mol_type = other RNA
aggaaataagagagaaaagaagagtaagaagaaatataagagccaccatggcccctaagaagaagcgtaaagtgagccgggtgaacggcagcggcagcggcggcggcatgaaccacgaccaggagttcgacccccctaaggtgtaccctcccgtccccgccgagaagagaaagcccatccgggtcctgagcctgttcgatggcatcgccaccggtctgctggtgctgaaggacctgggcatccaggtggataggtacattgcctccgaggtgtgcgaggactccatcaccgtgggaatggtgcgtcatcagggcaagatcatgtacgtgggcgacgtgcggagcgtgacacagaagcatatccaggagtggggccctttcgacctggtgatcggcggcagcccttgcaatgacctgagcatcgtgaacccagcccggaagggcctgtacgagggaaccggcagactgttcttcgagttttacagactgctgcacgacgcccggcctaaggaaggcgacgaccggcccttcttttggctgttcgagaatgtggtggccatgggagtcagcgacaagcgggatattagccggttcctggagagcaaccccgtgatgatcgatgccaaggaagtgagcgccgcccaccgggccagatacttctggggcaatctgcctggcatgaacagacccctggccagcaccgtgaacgacaagctggagctgcaggagtgcctggagcacggccggatcgccaagttcagcaaggtgagaaccatcaccacccgaagcaacagcatcaaacaaggcaaggaccagcactttcctgtgttcatgaacgagaaggaggacatcctgtggtgtaccgagatggagagagtgttcgggttcccagtccactacacagatgtcagcaacatgtctagactggccagacagagactgctgggaagaagctggtccgtccctgtgatcagacacctgttcgcccctctgaaggagtacttcgcctgcgtgagcagcggcaacagcaacgccaacagccggggccccagcttctctagcggcctggtgccactgtccctgagagggagccacatgggccccatggagatctacaaaaccgtgagcgcctggaagcggcagcctgtgcgcgtgctgagcctgtttcggaatatcgataaagtcctgaaaagcctgggattcctggagagcggctctggctccggcggtggcaccctgaagtacgtggaggatgtgacaaacgtggtcagacgggatgtggagaagtggggccccttcgatctggtgtacggcagcacccaacccctgggcagctcttgtgaccggtgccctggctggtacatgtttcagttccaccggatcctgcagtacgccctgccgagacaggagtcccagcggccattcttttggattttcatggacaacttgctgctgaccgaggatgaccaggaaactaccactcggttcctgcagaccgaagccgtgaccctgcaggacgtgagaggccgggactaccagaacgccatgcgggtgtggtccaacatccctggactgaaaagcaagcacgcacctctgacccctaaagaagaggagtacctgcaggcccaggtgcggagcagaagcaagctggacgcccctaaggtggatctgctggtgaagaattgcctcctgcccctgagagagtacttcaagtatttcagccagaatagtctgcccctgggcggcccaagcagcggcgcccctcctcccagcggcggcagcccagccggctccccaacctctaccgaggagggcacctctgagtccgccacccccgagagcggccctggcacctccaccgagcccagcgagggcagcgcacccggcagccctgccggcagccccacctccacagaggagggaaccagcaccgagcccagcgaaggcagcgccccaggcaccagcaccgagcctagtgagggcggctctggcggcggcagcgcccaggagattaaacggatcaacaagatcagaagaagacttgtgaaagacagcaacaccaagaaggccggcaagacaggccccatgaaaaccctgctggttagagtgatgacacccgatctgagagagcggctggaaaacctgagaaagaagcctgaaaatatcccccagcccatcagcaatacatctagagccaacctgaataagctgctgaccgattacaccgaaatgaagaaggcgatcctgcatgtgtactgggaagagttccagaaggaccctgtgggcctgatgagccgggtggcccagcctgccagcaagaagatcgatcagaacaagctgaaacctgagatggacgagaagggcaacctgaccaccgccggctttgcctgctctcagtgtggccagcccctgttcgtgtacaagctggagcaggtgtctgagaagggcaaggcttacaccaactacttcggacggtgcaatgtggccgagcacgaaaagctgatcctgctggcccagctgaagcccgagaaggatagcgacgaagccgtgacatatagcctgggaaagtttgggcagagggccctggatttctacagcattcatgtgaccaaggagtccacccaccccgtgaagcccctggcccagatcgccggaaacagatacgcctccggacctgtgggaaaggccctgagcgacgcatgtatgggcacaatcgcctccttcctgtctaagtaccaggacatcatcatcgaacaccagaaggtggtgaagggcaaccagaagagactggagagcctgcgggagctggccggcaaggaaaacctggaataccctagcgtgaccctgccacctcagcctcacaccaaggagggcgttgatgcctacaacgaagtgatcgcccgggtgcgaatgtgggtgaacctgaacctgtggcagaagctgaagctaagcagagatgatgccaagcctctgctgagactgaagggattcccttcctttcctctggtcgagagacaggccaacgaagtggactggtgggacatggtgtgtaacgtgaagaagctgatcaacgagaaaaaggaggatggcaaggtgttttggcagaatctggctggctacaagagacaggaagccctgagaccatacctgagcagcgaggaagatcggaagaagggaaagaaattcgctcggtaccagctgggcgacctgctgctgcacctggaaaagaagcacggcgaggactggggaaaggtgtacgacgaggcctgggagcggattgacaagaaagtggaaggcctgagcaagcacatcaagctggaagaggaacggagaagcgaggacgcccagagcaaggccgccctgaccgactggctgcgggctaaggccagcttcgtgatcgagggcctgaaggaggccgacaaggacgagttctgcagatgcgagctgaagctgcagaagtggtacggggacctgcggggaaagcccttcgccatcgaagccgagaacagcatcctggacatcagcggcttcagcaagcagtacaactgtgccttcatctggcagaaggacggcgtgaagaagctgaacctgtacctgatcatcaactacttcaagggcggcaagctgcggttcaagaagatcaaacctgaagccttcgaagccaacagattctacaccgtgatcaacaaaaagagcggcgagatcgtgcccatggaggtgaacttcaacttcgacgaccccaacctgatcatcctgcctctggcctttggcaagagacagggcagagaattcatctggaacgacctgctgtccctggaaaccggcagcctgaagctggccaacggaagagtgatcgagaagacactgtacaacagaagaacccggcaggatgagcctgccctgttcgtggccctgaccttcgagcggcgggaggtcctggactcctccaatatcaaaccaatgaacctgatcggcgtggcaagaggcgaaaacatccccgccgtgatcgccctgaccgaccccgagggctgcccactgagccggtttaaggatagcctgggaaacccaacccacatcctgagaatcggcgagagctataaggagaagcagcggaccatccaggccaagaaggaggtggagcagcggagagccggcggctacagccggaagtacgccagcaaagccaagaatctggcagacgatatggtgagaaacaccgctagagatctgctgtactacgccgtgacccaggatgccatgctgatcttcgccaacctgagccggggcttcggccggcagggcaagcggaccttcatggccgagagacagtacacacggatggaggactggctgaccgccaagctggcctacgagggcctgagcaagacctacctgtccaagacactggcccagtacacctccaagacatgcagcaactgtgggtttaccatcaccagcgccgactacgacagggtgctggagaagctgaagaagacagcaacaggctggatgaccacaattaacggcaaggagctgaaggtggagggccagattacctactacaacagatacaagagacagaacgtagtcaaggacctgtccgtcgagctggatagactgagcgaagaatctgtgaacaacgacatctcctcctggacaaagggcagaagcggagaagctctgagcctcctgaagaaaagattctcccatagacccgtgcaggagaagttcgtgtgcctgaactgcggcttcgagacacacgcagccgagcaagccgccctgaacatcgccagatcctggctgttcctgcggagccaggagtacaagaaataccagacaaacaagacaaccggcaacaccgataagagagccttcgtcgagacctggcagtccttttaccggaagaagcttaaggaggtgtggaaacctgccgtgcggtctggcggatctggcggaggctccacaagcaccagccagagccccctgaccttcggcgacgtggccgtggagttcagcggcgaggagtgggcctggctggacagcgcccagaggagcctgcacaggagcgtgatgctggagaactacaggaacctggccagcctgggcaaggtgagcaagcccgagatgatcagcagcctggagcagaggaaggagccctgggccgtgaccaggaagaccaccggcggcgagtgcgccgacagccagaccctgaccagccccaagaaaaagagaaaagtctaagctgccttctgcggggcttgccttctggccatgcccttcttctctcccttgcacctgtacctcttggtctttgaataaagcctgagtaggaaggctagcaaaaaaaaaaaaaaaaaaaaaaaaaaaaaaaaaaaaaaaaaaaaaaaaaaaaaaaaaaaaaaaaaaaaaaaaaaaaaaaa

SEQ ID NO: 3640 - RNA, 5419 nt, synthetic construct
  source 1..5419: mol_type = other RNA
aggaaataagagagaaaagaagagtaagaagaaatataagagccaccatggcccctaagaagaagcgtaaagtgagccgggtgaacggcagcggcagcggcggcggcatgaaccacgaccaggagttcgacccccctaaggtgtaccctcccgtccccgccgagaagagaaagcccatccgggtcctgagcctgttcgatggcatcgccaccggtctgctggtgctgaaggacctgggcatccaggtggataggtacattgcctccgaggtgtgcgaggactccatcaccgtgggaatggtgcgtcatcagggcaagatcatgtacgtgggcgacgtgcggagcgtgacacagaagcatatccaggagtggggccctttcgacctggtgatcggcggcagcccttgcaatgacctgagcatcgtgaacccagcccggaagggcctgtacgagggaaccggcagactgttcttcgagttttacagactgctgcacgacgcccggcctaaggaaggcgacgaccggcccttcttttggctgttcgagaatgtggtggccatgggagtcagcgacaagcgggatattagccggttcctggagagcaaccccgtgatgatcgatgccaaggaagtgagcgccgcccaccgggccagatacttctggggcaatctgcctggcatgaacagacccctggccagcaccgtgaacgacaagctggagctgcaggagtgcctggagcacggccggatcgccaagttcagcaaggtgagaaccatcaccacccgaagcaacagcatcaaacaaggcaaggaccagcactttcctgtgttcatgaacgagaaggaggacatcctgtggtgtaccgagatggagagagtgttcgggttcccagtccactacacagatgtcagcaacatgtctagactggccagacagagactgctgggaagaagctggtccgtccctgtgatcagacacctgttcgcccctctgaaggagtacttcgcctgcgtgagcagcggcaacagcaacgccaacagccggggccccagcttctctagcggcctggtgccactgtccctgagagggagccacatgggccccatggagatctacaaaaccgtgagcgcctggaagcggcagcctgtgcgcgtgctgagcctgtttcggaatatcgataaagtcctgaaaagcctgggattcctggagagcggctctggctccggcggtggcaccctgaagtacgtggaggatgtgacaaacgtggtcagacgggatgtggagaagtggggccccttcgatctggtgtacggcagcacccaacccctgggcagctcttgtgaccggtgccctggctggtacatgtttcagttccaccggatcctgcagtacgccctgccgagacaggagtcccagcggccattcttttggattttcatggacaacttgctgctgaccgaggatgaccaggaaactaccactcggttcctgcagaccgaagccgtgaccctgcaggacgtgagaggccgggactaccagaacgccatgcgggtgtggtccaacatccctggactgaaaagcaagcacgcacctctgacccctaaagaagaggagtacctgcaggcccaggtgcggagcagaagcaagctggacgcccctaaggtggatctgctggtgaagaattgcctcctgcccctgagagagtacttcaagtatttcagccagaatagtctgcccctgggcggcccaagcagcggcgcccctcctcccagcggcggcagcccagccggctccccaacctctaccgaggagggcacctctgagtccgccacccccgagagcggccctggcacctccaccgagcccagcgagggcagcgcacccggcagccctgccggcagccccacctccacagaggagggaaccagcaccgagcccagcgaaggcagcgccccaggcaccagcaccgagcctagtgagggcggctctggcggcggcagcgcccaggagattaaacggatcaacaagatcagaagaagacttgtgaaagacagcaacaccaagaaggccggcaagacaggccccatgaaaaccctgctggttagagtgatgacacccgatctgagagagcggctggaaaacctgagaaagaagcctgaaaatatcccccagcccatcagcaatacatctagagccaacctgaataagctgctgaccgattacaccgaaatgaagaaggcgatcctgcatgtgtactgggaagagttccagaaggaccctgtgggcctgatgagccgggtggcccagcctgccagcaagaagatcgatcagaacaagctgaaacctgagatggacgagaagggcaacctgaccaccgccggctttgcctgctctcagtgtggccagcccctgttcgtgtacaagctggagcaggtgtctgagaagggcaaggcttacaccaactacttcggacggtgcaatgtggccgagcacgaaaagctgatcctgctggcccagctgaagcccgagaaggatagcgacgaagccgtgacatatagcctgggaaagtttgggcagagggccctggatttctacagcattcatgtgaccaaggagtccacccaccccgtgaagcccctggcccagatcgccggaaacagatacgcctccggacctgtgggaaaggccctgagcgacgcatgtatgggcacaatcgcctccttcctgtctaagtaccaggacatcatcatcgaacaccagaaggtggtgaagggcaaccagaagagactggagagcctgcgggagctggccggcaaggaaaacctggaataccctagcgtgaccctgccacctcagcctcacaccaaggagggcgttgatgcctacaacgaagtgatcgcccgggtgcgaatgtgggtgaacctgaacctgtggcagaagctgaagctaagcagagatgatgccaagcctctgctgagactgaagggattcccttcctttcctctggtcgagagacaggccaacgaagtggactggtgggacatggtgtgtaacgtgaagaagctgatcaacgagaaaaaggaggatggcaaggtgttttggcagaatctggctggctacaagagacaggaagccctgagaccatacctgagcagcgaggaagatcggaagaagggaaagaaattcgctcggtaccagctgggcgacctgctgctgcacctggaaaagaagcacggcgaggactggggaaaggtgtacgacgaggcctgggagcggattgacaagaaagtggaaggcctgagcaagcacatcaagctggaagaggaacggagaagcgaggacgcccagagcaaggccgccctgaccgactggctgcgggctaaggccagcttcgtgatcgagggcctgaaggaggccgacaaggacgagttctgcagatgcgagctgaagctgcagaagtggtacggggacctgcggggaaagcccttcgccatcgaagccgagaacagcatcctggacatcagcggcttcagcaagcagtacaactgtgccttcatctggcagaaggacggcgtgaagaagctgaacctgtacctgatcatcaactacttcaagggcggcaagctgcggttcaagaagatcaaacctgaagccttcgaagccaacagattctacaccgtgatcaacaaaaagagcggcgagatcgtgcccatggaggtgaacttcaacttcgacgaccccaacctgatcatcctgcctctggcctttggcaagagacagggcagagaattcatctggaacgacctgctgtccctggaaaccggcagcctgaagctggccaacggaagagtgatcgagaagacactgtacaacagaagaacccggcaggatgagcctgccctgttcgtggccctgaccttcgagcggcgggaggtcctggactcctccaatatcaaaccaatgaacctgatcggcgtggcaagaggcgaaaacatccccgccgtgatcgccctgaccgaccccgagggctgcccactgagccggtttaaggatagcctgggaaacccaacccacatcctgagaatcggcgagagctataaggagaagcagcggaccatccaggccaagaaggaggtggagcagcggagagccggcggctacagccggaagtacgccagcaaagccaagaatctggcagacgatatggtgagaaacaccgctagagatctgctgtactacgccgtgacccaggatgccatgctgatcttcgccaacctgagccggggcttcggccggcagggcaagcggaccttcatggccgagagacagtacacacggatggaggactggctgaccgccaagctggcctacgagggcctgagcaagacctacctgtccaagacactggcccagtacacctccaagacatgcagcaactgtgggtttaccatcaccagcgccgactacgacagggtgctggagaagctgaagaagacagcaacaggctggatgaccacaattaacggcaaggagctgaaggtggagggccagattacctactacaacagatacaagagacagaacgtagtcaaggacctgtccgtcgagctggatagactgagcgaagaatctgtgaacaacgacatctcctcctggacaaagggcagaagcggagaagctctgagcctcctgaagaaaagattctcccatagacccgtgcaggagaagttcgtgtgcctgaactgcggcttcgagacacacgcagccgagcaagccgccctgaacatcgccagatcctggctgttcctgcggagccaggagtacaagaaataccagacaaacaagacaaccggcaacaccgataagagagccttcgtcgagacctggcagtccttttaccggaagaagcttaaggaggtgtggaaacctgccgtgcggtctggcggatctggcggaggctccacaagccaggagcccgtgaccttcgccgacgtggccgtgctgttcacccccgaggagtggatgttcctggacagcgcccagaggagcctgtacagggacgtgatgctggagaactacaggaacctggccagcgtgggcgccggcgaccagctgggcaagcccagcatgctgagcctgagcgagcccggcgaggagctgtgggcccccgagaggaggaccttccccggcaccaggcccgagccccagcacaccagccccaagaaaaagagaaaagtctaagctgccttctgcggggcttgccttctggccatgcccttcttctctcccttgcacctgtacctcttggtctttgaataaagcctgagtaggaaggctagcaaaaaaaaaaaaaaaaaaaaaaaaaaaaaaaaaaaaaaaaaaaaaaaaaaaaaaaaaaaaaaaaaaaaaaaaaaaaaaaa

SEQ ID NO: 3641 - RNA, 5419 nt, synthetic construct
  source 1..5419: mol_type = other RNA
aggaaataagagagaaaagaagagtaagaagaaatataagagccaccatggcccctaagaagaagcgtaaagtgagccgggtgaacggcagcggcagcggcggcggcatgaaccacgaccaggagttcgacccccctaaggtgtaccctcccgtccccgccgagaagagaaagcccatccgggtcctgagcctgttcgatggcatcgccaccggtctgctggtgctgaaggacctgggcatccaggtggataggtacattgcctccgaggtgtgcgaggactccatcaccgtgggaatggtgcgtcatcagggcaagatcatgtacgtgggcgacgtgcggagcgtgacacagaagcatatccaggagtggggccctttcgacctggtgatcggcggcagcccttgcaatgacctgagcatcgtgaacccagcccggaagggcctgtacgagggaaccggcagactgttcttcgagttttacagactgctgcacgacgcccggcctaaggaaggcgacgaccggcccttcttttggctgttcgagaatgtggtggccatgggagtcagcgacaagcgggatattagccggttcctggagagcaaccccgtgatgatcgatgccaaggaagtgagcgccgcccaccgggccagatacttctggggcaatctgcctggcatgaacagacccctggccagcaccgtgaacgacaagctggagctgcaggagtgcctggagcacggccggatcgccaagttcagcaaggtgagaaccatcaccacccgaagcaacagcatcaaacaaggcaaggaccagcactttcctgtgttcatgaacgagaaggaggacatcctgtggtgtaccgagatggagagagtgttcgggttcccagtccactacacagatgtcagcaacatgtctagactggccagacagagactgctgggaagaagctggtccgtccctgtgatcagacacctgttcgcccctctgaaggagtacttcgcctgcgtgagcagcggcaacagcaacgccaacagccggggccccagcttctctagcggcctggtgccactgtccctgagagggagccacatgggccccatggagatctacaaaaccgtgagcgcctggaagcggcagcctgtgcgcgtgctgagcctgtttcggaatatcgataaagtcctgaaaagcctgggattcctggagagcggctctggctccggcggtggcaccctgaagtacgtggaggatgtgacaaacgtggtcagacgggatgtggagaagtggggccccttcgatctggtgtacggcagcacccaacccctgggcagctcttgtgaccggtgccctggctggtacatgtttcagttccaccggatcctgcagtacgccctgccgagacaggagtcccagcggccattcttttggattttcatggacaacttgctgctgaccgaggatgaccaggaaactaccactcggttcctgcagaccgaagccgtgaccctgcaggacgtgagaggccgggactaccagaacgccatgcgggtgtggtccaacatccctggactgaaaagcaagcacgcacctctgacccctaaagaagaggagtacctgcaggcccaggtgcggagcagaagcaagctggacgcccctaaggtggatctgctggtgaagaattgcctcctgcccctgagagagtacttcaagtatttcagccagaatagtctgcccctgggcggcccaagcagcggcgcccctcctcccagcggcggcagcccagccggctccccaacctctaccgaggagggcacctctgagtccgccacccccgagagcggccctggcacctccaccgagcccagcgagggcagcgcacccggcagccctgccggcagccccacctccacagaggagggaaccagcaccgagcccagcgaaggcagcgccccaggcaccagcaccgagcctagtgagggcggctctggcggcggcagcgcccaggagattaaacggatcaacaagatcagaagaagacttgtgaaagacagcaacaccaagaaggccggcaagacaggccccatgaaaaccctgctggttagagtgatgacacccgatctgagagagcggctggaaaacctgagaaagaagcctgaaaatatcccccagcccatcagcaatacatctagagccaacctgaataagctgctgaccgattacaccgaaatgaagaaggcgatcctgcatgtgtactgggaagagttccagaaggaccctgtgggcctgatgagccgggtggcccagcctgccagcaagaagatcgatcagaacaagctgaaacctgagatggacgagaagggcaacctgaccaccgccggctttgcctgctctcagtgtggccagcccctgttcgtgtacaagctggagcaggtgtctgagaagggcaaggcttacaccaactacttcggacggtgcaatgtggccgagcacgaaaagctgatcctgctggcccagctgaagcccgagaaggatagcgacgaagccgtgacatatagcctgggaaagtttgggcagagggccctggatttctacagcattcatgtgaccaaggagtccacccaccccgtgaagcccctggcccagatcgccggaaacagatacgcctccggacctgtgggaaaggccctgagcgacgcatgtatgggcacaatcgcctccttcctgtctaagtaccaggacatcatcatcgaacaccagaaggtggtgaagggcaaccagaagagactggagagcctgcgggagctggccggcaaggaaaacctggaataccctagcgtgaccctgccacctcagcctcacaccaaggagggcgttgatgcctacaacgaagtgatcgcccgggtgcgaatgtgggtgaacctgaacctgtggcagaagctgaagctaagcagagatgatgccaagcctctgctgagactgaagggattcccttcctttcctctggtcgagagacaggccaacgaagtggactggtgggacatggtgtgtaacgtgaagaagctgatcaacgagaaaaaggaggatggcaaggtgttttggcagaatctggctggctacaagagacaggaagccctgagaccatacctgagcagcgaggaagatcggaagaagggaaagaaattcgctcggtaccagctgggcgacctgctgctgcacctggaaaagaagcacggcgaggactggggaaaggtgtacgacgaggcctgggagcggattgacaagaaagtggaaggcctgagcaagcacatcaagctggaagaggaacggagaagcgaggacgcccagagcaaggccgccctgaccgactggctgcgggctaaggccagcttcgtgatcgagggcctgaaggaggccgacaaggacgagttctgcagatgcgagctgaagctgcagaagtggtacggggacctgcggggaaagcccttcgccatcgaagccgagaacagcatcctggacatcagcggcttcagcaagcagtacaactgtgccttcatctggcagaaggacggcgtgaagaagctgaacctgtacctgatcatcaactacttcaagggcggcaagctgcggttcaagaagatcaaacctgaagccttcgaagccaacagattctacaccgtgatcaacaaaaagagcggcgagatcgtgcccatggaggtgaacttcaacttcgacgaccccaacctgatcatcctgcctctggcctttggcaagagacagggcagagaattcatctggaacgacctgctgtccctggaaaccggcagcctgaagctggccaacggaagagtgatcgagaagacactgtacaacagaagaacccggcaggatgagcctgccctgttcgtggccctgaccttcgagcggcgggaggtcctggactcctccaatatcaaaccaatgaacctgatcggcgtggcaagaggcgaaaacatccccgccgtgatcgccctgaccgaccccgagggctgcccactgagccggtttaaggatagcctgggaaacccaacccacatcctgagaatcggcgagagctataaggagaagcagcggaccatccaggccaagaaggaggtggagcagcggagagccggcggctacagccggaagtacgccagcaaagccaagaatctggcagacgatatggtgagaaacaccgctagagatctgctgtactacgccgtgacccaggatgccatgctgatcttcgccaacctgagccggggcttcggccggcagggcaagcggaccttcatggccgagagacagtacacacggatggaggactggctgaccgccaagctggcctacgagggcctgagcaagacctacctgtccaagacactggcccagtacacctccaagacatgcagcaactgtgggtttaccatcaccagcgccgactacgacagggtgctggagaagctgaagaagacagcaacaggctggatgaccacaattaacggcaaggagctgaaggtggagggccagattacctactacaacagatacaagagacagaacgtagtcaaggacctgtccgtcgagctggatagactgagcgaagaatctgtgaacaacgacatctcctcctggacaaagggcagaagcggagaagctctgagcctcctgaagaaaagattctcccatagacccgtgcaggagaagttcgtgtgcctgaactgcggcttcgagacacacgcagccgagcaagccgccctgaacatcgccagatcctggctgttcctgcggagccaggagtacaagaaataccagacaaacaagacaaccggcaacaccgataagagagccttcgtcgagacctggcagtccttttaccggaagaagcttaaggaggtgtggaaacctgccgtgcggtctggcggatctggcggaggctccacaagcatggcccagtgcctggtgaccttcgccgacgtggccatcgacttcagccaggaggagtgggcctgcctgaacagcgcccagagggacctgtactgggacgtgatgctggagaactacagcaacctggtgagcctggacctggagagcgcctacgagaacaagagcctgcccaccgagaagaacatccacgagatcagggccagcaagaggaacagcgacaggaggagcaagagcctgggcaggaccagccccaagaaaaagagaaaagtctaagctgccttctgcggggcttgccttctggccatgcccttcttctctcccttgcacctgtacctcttggtctttgaataaagcctgagtaggaaggctagcaaaaaaaaaaaaaaaaaaaaaaaaaaaaaaaaaaaaaaaaaaaaaaaaaaaaaaaaaaaaaaaaaaaaaaaaaaaaaaaa

SEQ ID NO: 3642 - RNA, 5419 nt, synthetic construct
  source 1..5419: mol_type = other RNA
aggaaataagagagaaaagaagagtaagaagaaatataagagccaccatggcccctaagaagaagcgtaaagtgagccgggtgaacggcagcggcagcggcggcggcatgaaccacgaccaggagttcgacccccctaaggtgtaccctcccgtccccgccgagaagagaaagcccatccgggtcctgagcctgttcgatggcatcgccaccggtctgctggtgctgaaggacctgggcatccaggtggataggtacattgcctccgaggtgtgcgaggactccatcaccgtgggaatggtgcgtcatcagggcaagatcatgtacgtgggcgacgtgcggagcgtgacacagaagcatatccaggagtggggccctttcgacctggtgatcggcggcagcccttgcaatgacctgagcatcgtgaacccagcccggaagggcctgtacgagggaaccggcagactgttcttcgagttttacagactgctgcacgacgcccggcctaaggaaggcgacgaccggcccttcttttggctgttcgagaatgtggtggccatgggagtcagcgacaagcgggatattagccggttcctggagagcaaccccgtgatgatcgatgccaaggaagtgagcgccgcccaccgggccagatacttctggggcaatctgcctggcatgaacagacccctggccagcaccgtgaacgacaagctggagctgcaggagtgcctggagcacggccggatcgccaagttcagcaaggtgagaaccatcaccacccgaagcaacagcatcaaacaaggcaaggaccagcactttcctgtgttcatgaacgagaaggaggacatcctgtggtgtaccgagatggagagagtgttcgggttcccagtccactacacagatgtcagcaacatgtctagactggccagacagagactgctgggaagaagctggtccgtccctgtgatcagacacctgttcgcccctctgaaggagtacttcgcctgcgtgagcagcggcaacagcaacgccaacagccggggccccagcttctctagcggcctggtgccactgtccctgagagggagccacatgggccccatggagatctacaaaaccgtgagcgcctggaagcggcagcctgtgcgcgtgctgagcctgtttcggaatatcgataaagtcctgaaaagcctgggattcctggagagcggctctggctccggcggtggcaccctgaagtacgtggaggatgtgacaaacgtggtcagacgggatgtggagaagtggggccccttcgatctggtgtacggcagcacccaacccctgggcagctcttgtgaccggtgccctggctggtacatgtttcagttccaccggatcctgcagtacgccctgccgagacaggagtcccagcggccattcttttggattttcatggacaacttgctgctgaccgaggatgaccaggaaactaccactcggttcctgcagaccgaagccgtgaccctgcaggacgtgagaggccgggactaccagaacgccatgcgggtgtggtccaacatccctggactgaaaagcaagcacgcacctctgacccctaaagaagaggagtacctgcaggcccaggtgcggagcagaagcaagctggacgcccctaaggtggatctgctggtgaagaattgcctcctgcccctgagagagtacttcaagtatttcagccagaatagtctgcccctgggcggcccaagcagcggcgcccctcctcccagcggcggcagcccagccggctccccaacctctaccgaggagggcacctctgagtccgccacccccgagagcggccctggcacctccaccgagcccagcgagggcagcgcacccggcagccctgccggcagccccacctccacagaggagggaaccagcaccgagcccagcgaaggcagcgccccaggcaccagcaccgagcctagtgagggcggctctggcggcggcagcgcccaggagattaaacggatcaacaagatcagaagaagacttgtgaaagacagcaacaccaagaaggccggcaagacaggccccatgaaaaccctgctggttagagtgatgacacccgatctgagagagcggctggaaaacctgagaaagaagcctgaaaatatcccccagcccatcagcaatacatctagagccaacctgaataagctgctgaccgattacaccgaaatgaagaaggcgatcctgcatgtgtactgggaagagttccagaaggaccctgtgggcctgatgagccgggtggcccagcctgccagcaagaagatcgatcagaacaagctgaaacctgagatggacgagaagggcaacctgaccaccgccggctttgcctgctctcagtgtggccagcccctgttcgtgtacaagctggagcaggtgtctgagaagggcaaggcttacaccaactacttcggacggtgcaatgtggccgagcacgaaaagctgatcctgctggcccagctgaagcccgagaaggatagcgacgaagccgtgacatatagcctgggaaagtttgggcagagggccctggatttctacagcattcatgtgaccaaggagtccacccaccccgtgaagcccctggcccagatcgccggaaacagatacgcctccggacctgtgggaaaggccctgagcgacgcatgtatgggcacaatcgcctccttcctgtctaagtaccaggacatcatcatcgaacaccagaaggtggtgaagggcaaccagaagagactggagagcctgcgggagctggccggcaaggaaaacctggaataccctagcgtgaccctgccacctcagcctcacaccaaggagggcgttgatgcctacaacgaagtgatcgcccgggtgcgaatgtgggtgaacctgaacctgtggcagaagctgaagctaagcagagatgatgccaagcctctgctgagactgaagggattcccttcctttcctctggtcgagagacaggccaacgaagtggactggtgggacatggtgtgtaacgtgaagaagctgatcaacgagaaaaaggaggatggcaaggtgttttggcagaatctggctggctacaagagacaggaagccctgagaccatacctgagcagcgaggaagatcggaagaagggaaagaaattcgctcggtaccagctgggcgacctgctgctgcacctggaaaagaagcacggcgaggactggggaaaggtgtacgacgaggcctgggagcggattgacaagaaagtggaaggcctgagcaagcacatcaagctggaagaggaacggagaagcgaggacgcccagagcaaggccgccctgaccgactggctgcgggctaaggccagcttcgtgatcgagggcctgaaggaggccgacaaggacgagttctgcagatgcgagctgaagctgcagaagtggtacggggacctgcggggaaagcccttcgccatcgaagccgagaacagcatcctggacatcagcggcttcagcaagcagtacaactgtgccttcatctggcagaaggacggcgtgaagaagctgaacctgtacctgatcatcaactacttcaagggcggcaagctgcggttcaagaagatcaaacctgaagccttcgaagccaacagattctacaccgtgatcaacaaaaagagcggcgagatcgtgcccatggaggtgaacttcaacttcgacgaccccaacctgatcatcctgcctctggcctttggcaagagacagggcagagaattcatctggaacgacctgctgtccctggaaaccggcagcctgaagctggccaacggaagagtgatcgagaagacactgtacaacagaagaacccggcaggatgagcctgccctgttcgtggccctgaccttcgagcggcgggaggtcctggactcctccaatatcaaaccaatgaacctgatcggcgtggcaagaggcgaaaacatccccgccgtgatcgccctgaccgaccccgagggctgcccactgagccggtttaaggatagcctgggaaacccaacccacatcctgagaatcggcgagagctataaggagaagcagcggaccatccaggccaagaaggaggtggagcagcggagagccggcggctacagccggaagtacgccagcaaagccaagaatctggcagacgatatggtgagaaacaccgctagagatctgctgtactacgccgtgacccaggatgccatgctgatcttcgccaacctgagccggggcttcggccggcagggcaagcggaccttcatggccgagagacagtacacacggatggaggactggctgaccgccaagctggcctacgagggcctgagcaagacctacctgtccaagacactggcccagtacacctccaagacatgcagcaactgtgggtttaccatcaccagcgccgactacgacagggtgctggagaagctgaagaagacagcaacaggctggatgaccacaattaacggcaaggagctgaaggtggagggccagattacctactacaacagatacaagagacagaacgtagtcaaggacctgtccgtcgagctggatagactgagcgaagaatctgtgaacaacgacatctcctcctggacaaagggcagaagcggagaagctctgagcctcctgaagaaaagattctcccatagacccgtgcaggagaagttcgtgtgcctgaactgcggcttcgagacacacgcagccgagcaagccgccctgaacatcgccagatcctggctgttcctgcggagccaggagtacaagaaataccagacaaacaagacaaccggcaacaccgataagagagccttcgtcgagacctggcagtccttttaccggaagaagcttaaggaggtgtggaaacctgccgtgcggtctggcggatctggcggaggctccacaagcgcccaggtgctggtgaccttcaaggacgtggccgtgaccttcaccagggaggagtggggccagctggacctggaccagaaggccctgtaccaggaggtgatgctggagacctacggcctgctggtgagcctgggccaccccgtgcccaagcccgagctgacccacctgctggagtgcggccaggagctgtggaagggcaagaggggcctgagccacagcacctgcagcggcgacgacaccaagaccagccccaagaaaaagagaaaagtctaagctgccttctgcggggcttgccttctggccatgcccttcttctctcccttgcacctgtacctcttggtctttgaataaagcctgagtaggaaggctagcaaaaaaaaaaaaaaaaaaaaaaaaaaaaaaaaaaaaaaaaaaaaaaaaaaaaaaaaaaaaaaaaaaaaaaaaaaaaaaaa

SEQ ID NO: 3643 - RNA, 5419 nt, synthetic construct
  source 1..5419: mol_type = other RNA
aggaaataagagagaaaagaagagtaagaagaaatataagagccaccatggcccctaagaagaagcgtaaagtgagccgggtgaacggcagcggcagcggcggcggcatgaaccacgaccaggagttcgacccccctaaggtgtaccctcccgtccccgccgagaagagaaagcccatccgggtcctgagcctgttcgatggcatcgccaccggtctgctggtgctgaaggacctgggcatccaggtggataggtacattgcctccgaggtgtgcgaggactccatcaccgtgggaatggtgcgtcatcagggcaagatcatgtacgtgggcgacgtgcggagcgtgacacagaagcatatccaggagtggggccctttcgacctggtgatcggcggcagcccttgcaatgacctgagcatcgtgaacccagcccggaagggcctgtacgagggaaccggcagactgttcttcgagttttacagactgctgcacgacgcccggcctaaggaaggcgacgaccggcccttcttttggctgttcgagaatgtggtggccatgggagtcagcgacaagcgggatattagccggttcctggagagcaaccccgtgatgatcgatgccaaggaagtgagcgccgcccaccgggccagatacttctggggcaatctgcctggcatgaacagacccctggccagcaccgtgaacgacaagctggagctgcaggagtgcctggagcacggccggatcgccaagttcagcaaggtgagaaccatcaccacccgaagcaacagcatcaaacaaggcaaggaccagcactttcctgtgttcatgaacgagaaggaggacatcctgtggtgtaccgagatggagagagtgttcgggttcccagtccactacacagatgtcagcaacatgtctagactggccagacagagactgctgggaagaagctggtccgtccctgtgatcagacacctgttcgcccctctgaaggagtacttcgcctgcgtgagcagcggcaacagcaacgccaacagccggggccccagcttctctagcggcctggtgccactgtccctgagagggagccacatgggccccatggagatctacaaaaccgtgagcgcctggaagcggcagcctgtgcgcgtgctgagcctgtttcggaatatcgataaagtcctgaaaagcctgggattcctggagagcggctctggctccggcggtggcaccctgaagtacgtggaggatgtgacaaacgtggtcagacgggatgtggagaagtggggccccttcgatctggtgtacggcagcacccaacccctgggcagctcttgtgaccggtgccctggctggtacatgtttcagttccaccggatcctgcagtacgccctgccgagacaggagtcccagcggccattcttttggattttcatggacaacttgctgctgaccgaggatgaccaggaaactaccactcggttcctgcagaccgaagccgtgaccctgcaggacgtgagaggccgggactaccagaacgccatgcgggtgtggtccaacatccctggactgaaaagcaagcacgcacctctgacccctaaagaagaggagtacctgcaggcccaggtgcggagcagaagcaagctggacgcccctaaggtggatctgctggtgaagaattgcctcctgcccctgagagagtacttcaagtatttcagccagaatagtctgcccctgggcggcccaagcagcggcgcccctcctcccagcggcggcagcccagccggctccccaacctctaccgaggagggcacctctgagtccgccacccccgagagcggccctggcacctccaccgagcccagcgagggcagcgcacccggcagccctgccggcagccccacctccacagaggagggaaccagcaccgagcccagcgaaggcagcgccccaggcaccagcaccgagcctagtgagggcggctctggcggcggcagcgcccaggagattaaacggatcaacaagatcagaagaagacttgtgaaagacagcaacaccaagaaggccggcaagacaggccccatgaaaaccctgctggttagagtgatgacacccgatctgagagagcggctggaaaacctgagaaagaagcctgaaaatatcccccagcccatcagcaatacatctagagccaacctgaataagctgctgaccgattacaccgaaatgaagaaggcgatcctgcatgtgtactgggaagagttccagaaggaccctgtgggcctgatgagccgggtggcccagcctgccagcaagaagatcgatcagaacaagctgaaacctgagatggacgagaagggcaacctgaccaccgccggctttgcctgctctcagtgtggccagcccctgttcgtgtacaagctggagcaggtgtctgagaagggcaaggcttacaccaactacttcggacggtgcaatgtggccgagcacgaaaagctgatcctgctggcccagctgaagcccgagaaggatagcgacgaagccgtgacatatagcctgggaaagtttgggcagagggccctggatttctacagcattcatgtgaccaaggagtccacccaccccgtgaagcccctggcccagatcgccggaaacagatacgcctccggacctgtgggaaaggccctgagcgacgcatgtatgggcacaatcgcctccttcctgtctaagtaccaggacatcatcatcgaacaccagaaggtggtgaagggcaaccagaagagactggagagcctgcgggagctggccggcaaggaaaacctggaataccctagcgtgaccctgccacctcagcctcacaccaaggagggcgttgatgcctacaacgaagtgatcgcccgggtgcgaatgtgggtgaacctgaacctgtggcagaagctgaagctaagcagagatgatgccaagcctctgctgagactgaagggattcccttcctttcctctggtcgagagacaggccaacgaagtggactggtgggacatggtgtgtaacgtgaagaagctgatcaacgagaaaaaggaggatggcaaggtgttttggcagaatctggctggctacaagagacaggaagccctgagaccatacctgagcagcgaggaagatcggaagaagggaaagaaattcgctcggtaccagctgggcgacctgctgctgcacctggaaaagaagcacggcgaggactggggaaaggtgtacgacgaggcctgggagcggattgacaagaaagtggaaggcctgagcaagcacatcaagctggaagaggaacggagaagcgaggacgcccagagcaaggccgccctgaccgactggctgcgggctaaggccagcttcgtgatcgagggcctgaaggaggccgacaaggacgagttctgcagatgcgagctgaagctgcagaagtggtacggggacctgcggggaaagcccttcgccatcgaagccgagaacagcatcctggacatcagcggcttcagcaagcagtacaactgtgccttcatctggcagaaggacggcgtgaagaagctgaacctgtacctgatcatcaactacttcaagggcggcaagctgcggttcaagaagatcaaacctgaagccttcgaagccaacagattctacaccgtgatcaacaaaaagagcggcgagatcgtgcccatggaggtgaacttcaacttcgacgaccccaacctgatcatcctgcctctggcctttggcaagagacagggcagagaattcatctggaacgacctgctgtccctggaaaccggcagcctgaagctggccaacggaagagtgatcgagaagacactgtacaacagaagaacccggcaggatgagcctgccctgttcgtggccctgaccttcgagcggcgggaggtcctggactcctccaatatcaaaccaatgaacctgatcggcgtggcaagaggcgaaaacatccccgccgtgatcgccctgaccgaccccgagggctgcccactgagccggtttaaggatagcctgggaaacccaacccacatcctgagaatcggcgagagctataaggagaagcagcggaccatccaggccaagaaggaggtggagcagcggagagccggcggctacagccggaagtacgccagcaaagccaagaatctggcagacgatatggtgagaaacaccgctagagatctgctgtactacgccgtgacccaggatgccatgctgatcttcgccaacctgagccggggcttcggccggcagggcaagcggaccttcatggccgagagacagtacacacggatggaggactggctgaccgccaagctggcctacgagggcctgagcaagacctacctgtccaagacactggcccagtacacctccaagacatgcagcaactgtgggtttaccatcaccagcgccgactacgacagggtgctggagaagctgaagaagacagcaacaggctggatgaccacaattaacggcaaggagctgaaggtggagggccagattacctactacaacagatacaagagacagaacgtagtcaaggacctgtccgtcgagctggatagactgagcgaagaatctgtgaacaacgacatctcctcctggacaaagggcagaagcggagaagctctgagcctcctgaagaaaagattctcccatagacccgtgcaggagaagttcgtgtgcctgaactgcggcttcgagacacacgcagccgagcaagccgccctgaacatcgccagatcctggctgttcctgcggagccaggagtacaagaaataccagacaaacaagacaaccggcaacaccgataagagagccttcgtcgagacctggcagtccttttaccggaagaagcttaaggaggtgtggaaacctgccgtgcggtctggcggatctggcggaggctccacaagcagcctgggccccgtgagcttcaaggacgtggccgtgggcttcacccaggaggagtggaggcagctggagcccgcccagaggaggacctacagggaggtgatgctggagaactacagccacctggtggccgtgggctgccacttcatcaagcccgacgtgatcaccaagctggagaggggcgaggagccctggatcgagggcggcttcctgccccagggctgcgccggcgacgaggtgtggcagaccagccccaagaaaaagagaaaagtctaagctgccttctgcggggcttgccttctggccatgcccttcttctctcccttgcacctgtacctcttggtctttgaataaagcctgagtaggaaggctagcaaaaaaaaaaaaaaaaaaaaaaaaaaaaaaaaaaaaaaaaaaaaaaaaaaaaaaaaaaaaaaaaaaaaaaaaaaaaaaaa

SEQ ID NO: 3644 - RNA, 5419 nt, synthetic construct
  source 1..5419: mol_type = other RNA
aggaaataagagagaaaagaagagtaagaagaaatataagagccaccatggcccctaagaagaagcgtaaagtgagccgggtgaacggcagcggcagcggcggcggcatgaaccacgaccaggagttcgacccccctaaggtgtaccctcccgtccccgccgagaagagaaagcccatccgggtcctgagcctgttcgatggcatcgccaccggtctgctggtgctgaaggacctgggcatccaggtggataggtacattgcctccgaggtgtgcgaggactccatcaccgtgggaatggtgcgtcatcagggcaagatcatgtacgtgggcgacgtgcggagcgtgacacagaagcatatccaggagtggggccctttcgacctggtgatcggcggcagcccttgcaatgacctgagcatcgtgaacccagcccggaagggcctgtacgagggaaccggcagactgttcttcgagttttacagactgctgcacgacgcccggcctaaggaaggcgacgaccggcccttcttttggctgttcgagaatgtggtggccatgggagtcagcgacaagcgggatattagccggttcctggagagcaaccccgtgatgatcgatgccaaggaagtgagcgccgcccaccgggccagatacttctggggcaatctgcctggcatgaacagacccctggccagcaccgtgaacgacaagctggagctgcaggagtgcctggagcacggccggatcgccaagttcagcaaggtgagaaccatcaccacccgaagcaacagcatcaaacaaggcaaggaccagcactttcctgtgttcatgaacgagaaggaggacatcctgtggtgtaccgagatggagagagtgttcgggttcccagtccactacacagatgtcagcaacatgtctagactggccagacagagactgctgggaagaagctggtccgtccctgtgatcagacacctgttcgcccctctgaaggagtacttcgcctgcgtgagcagcggcaacagcaacgccaacagccggggccccagcttctctagcggcctggtgccactgtccctgagagggagccacatgggccccatggagatctacaaaaccgtgagcgcctggaagcggcagcctgtgcgcgtgctgagcctgtttcggaatatcgataaagtcctgaaaagcctgggattcctggagagcggctctggctccggcggtggcaccctgaagtacgtggaggatgtgacaaacgtggtcagacgggatgtggagaagtggggccccttcgatctggtgtacggcagcacccaacccctgggcagctcttgtgaccggtgccctggctggtacatgtttcagttccaccggatcctgcagtacgccctgccgagacaggagtcccagcggccattcttttggattttcatggacaacttgctgctgaccgaggatgaccaggaaactaccactcggttcctgcagaccgaagccgtgaccctgcaggacgtgagaggccgggactaccagaacgccatgcgggtgtggtccaacatccctggactgaaaagcaagcacgcacctctgacccctaaagaagaggagtacctgcaggcccaggtgcggagcagaagcaagctggacgcccctaaggtggatctgctggtgaagaattgcctcctgcccctgagagagtacttcaagtatttcagccagaatagtctgcccctgggcggcccaagcagcggcgcccctcctcccagcggcggcagcccagccggctccccaacctctaccgaggagggcacctctgagtccgccacccccgagagcggccctggcacctccaccgagcccagcgagggcagcgcacccggcagccctgccggcagccccacctccacagaggagggaaccagcaccgagcccagcgaaggcagcgccccaggcaccagcaccgagcctagtgagggcggctctggcggcggcagcgcccaggagattaaacggatcaacaagatcagaagaagacttgtgaaagacagcaacaccaagaaggccggcaagacaggccccatgaaaaccctgctggttagagtgatgacacccgatctgagagagcggctggaaaacctgagaaagaagcctgaaaatatcccccagcccatcagcaatacatctagagccaacctgaataagctgctgaccgattacaccgaaatgaagaaggcgatcctgcatgtgtactgggaagagttccagaaggaccctgtgggcctgatgagccgggtggcccagcctgccagcaagaagatcgatcagaacaagctgaaacctgagatggacgagaagggcaacctgaccaccgccggctttgcctgctctcagtgtggccagcccctgttcgtgtacaagctggagcaggtgtctgagaagggcaaggcttacaccaactacttcggacggtgcaatgtggccgagcacgaaaagctgatcctgctggcccagctgaagcccgagaaggatagcgacgaagccgtgacatatagcctgggaaagtttgggcagagggccctggatttctacagcattcatgtgaccaaggagtccacccaccccgtgaagcccctggcccagatcgccggaaacagatacgcctccggacctgtgggaaaggccctgagcgacgcatgtatgggcacaatcgcctccttcctgtctaagtaccaggacatcatcatcgaacaccagaaggtggtgaagggcaaccagaagagactggagagcctgcgggagctggccggcaaggaaaacctggaataccctagcgtgaccctgccacctcagcctcacaccaaggagggcgttgatgcctacaacgaagtgatcgcccgggtgcgaatgtgggtgaacctgaacctgtggcagaagctgaagctaagcagagatgatgccaagcctctgctgagactgaagggattcccttcctttcctctggtcgagagacaggccaacgaagtggactggtgggacatggtgtgtaacgtgaagaagctgatcaacgagaaaaaggaggatggcaaggtgttttggcagaatctggctggctacaagagacaggaagccctgagaccatacctgagcagcgaggaagatcggaagaagggaaagaaattcgctcggtaccagctgggcgacctgctgctgcacctggaaaagaagcacggcgaggactggggaaaggtgtacgacgaggcctgggagcggattgacaagaaagtggaaggcctgagcaagcacatcaagctggaagaggaacggagaagcgaggacgcccagagcaaggccgccctgaccgactggctgcgggctaaggccagcttcgtgatcgagggcctgaaggaggccgacaaggacgagttctgcagatgcgagctgaagctgcagaagtggtacggggacctgcggggaaagcccttcgccatcgaagccgagaacagcatcctggacatcagcggcttcagcaagcagtacaactgtgccttcatctggcagaaggacggcgtgaagaagctgaacctgtacctgatcatcaactacttcaagggcggcaagctgcggttcaagaagatcaaacctgaagccttcgaagccaacagattctacaccgtgatcaacaaaaagagcggcgagatcgtgcccatggaggtgaacttcaacttcgacgaccccaacctgatcatcctgcctctggcctttggcaagagacagggcagagaattcatctggaacgacctgctgtccctggaaaccggcagcctgaagctggccaacggaagagtgatcgagaagacactgtacaacagaagaacccggcaggatgagcctgccctgttcgtggccctgaccttcgagcggcgggaggtcctggactcctccaatatcaaaccaatgaacctgatcggcgtggcaagaggcgaaaacatccccgccgtgatcgccctgaccgaccccgagggctgcccactgagccggtttaaggatagcctgggaaacccaacccacatcctgagaatcggcgagagctataaggagaagcagcggaccatccaggccaagaaggaggtggagcagcggagagccggcggctacagccggaagtacgccagcaaagccaagaatctggcagacgatatggtgagaaacaccgctagagatctgctgtactacgccgtgacccaggatgccatgctgatcttcgccaacctgagccggggcttcggccggcagggcaagcggaccttcatggccgagagacagtacacacggatggaggactggctgaccgccaagctggcctacgagggcctgagcaagacctacctgtccaagacactggcccagtacacctccaagacatgcagcaactgtgggtttaccatcaccagcgccgactacgacagggtgctggagaagctgaagaagacagcaacaggctggatgaccacaattaacggcaaggagctgaaggtggagggccagattacctactacaacagatacaagagacagaacgtagtcaaggacctgtccgtcgagctggatagactgagcgaagaatctgtgaacaacgacatctcctcctggacaaagggcagaagcggagaagctctgagcctcctgaagaaaagattctcccatagacccgtgcaggagaagttcgtgtgcctgaactgcggcttcgagacacacgcagccgagcaagccgccctgaacatcgccagatcctggctgttcctgcggagccaggagtacaagaaataccagacaaacaagacaaccggcaacaccgataagagagccttcgtcgagacctggcagtccttttaccggaagaagcttaaggaggtgtggaaacctgccgtgcggtctggcggatctggcggaggctccacaagcgagcagggcctggtgagcttcgaggacgtggccgtggacttcacctggcaggagtggcaggagctggacgccgcccagaggaccctgtacagggacgtgatgctggagaactacagcagcctggtgagcctgggccactgcgtgaccaagcccgagctgatcttcaggctggagcacggcttcggcccctggagcatcggcgagaccagcctgtggaacctgcccggcgtgctggaggtgcccaccagccccaagaaaaagagaaaagtctaagctgccttctgcggggcttgccttctggccatgcccttcttctctcccttgcacctgtacctcttggtctttgaataaagcctgagtaggaaggctagcaaaaaaaaaaaaaaaaaaaaaaaaaaaaaaaaaaaaaaaaaaaaaaaaaaaaaaaaaaaaaaaaaaaaaaaaaaaaaaaa

SEQ ID NO: 3645 - RNA, 5419 nt, synthetic construct
  source 1..5419: mol_type = other RNA
aggaaataagagagaaaagaagagtaagaagaaatataagagccaccatggcccctaagaagaagcgtaaagtgagccgggtgaacggcagcggcagcggcggcggcatgaaccacgaccaggagttcgacccccctaaggtgtaccctcccgtccccgccgagaagagaaagcccatccgggtcctgagcctgttcgatggcatcgccaccggtctgctggtgctgaaggacctgggcatccaggtggataggtacattgcctccgaggtgtgcgaggactccatcaccgtgggaatggtgcgtcatcagggcaagatcatgtacgtgggcgacgtgcggagcgtgacacagaagcatatccaggagtggggccctttcgacctggtgatcggcggcagcccttgcaatgacctgagcatcgtgaacccagcccggaagggcctgtacgagggaaccggcagactgttcttcgagttttacagactgctgcacgacgcccggcctaaggaaggcgacgaccggcccttcttttggctgttcgagaatgtggtggccatgggagtcagcgacaagcgggatattagccggttcctggagagcaaccccgtgatgatcgatgccaaggaagtgagcgccgcccaccgggccagatacttctggggcaatctgcctggcatgaacagacccctggccagcaccgtgaacgacaagctggagctgcaggagtgcctggagcacggccggatcgccaagttcagcaaggtgagaaccatcaccacccgaagcaacagcatcaaacaaggcaaggaccagcactttcctgtgttcatgaacgagaaggaggacatcctgtggtgtaccgagatggagagagtgttcgggttcccagtccactacacagatgtcagcaacatgtctagactggccagacagagactgctgggaagaagctggtccgtccctgtgatcagacacctgttcgcccctctgaaggagtacttcgcctgcgtgagcagcggcaacagcaacgccaacagccggggccccagcttctctagcggcctggtgccactgtccctgagagggagccacatgggccccatggagatctacaaaaccgtgagcgcctggaagcggcagcctgtgcgcgtgctgagcctgtttcggaatatcgataaagtcctgaaaagcctgggattcctggagagcggctctggctccggcggtggcaccctgaagtacgtggaggatgtgacaaacgtggtcagacgggatgtggagaagtggggccccttcgatctggtgtacggcagcacccaacccctgggcagctcttgtgaccggtgccctggctggtacatgtttcagttccaccggatcctgcagtacgccctgccgagacaggagtcccagcggccattcttttggattttcatggacaacttgctgctgaccgaggatgaccaggaaactaccactcggttcctgcagaccgaagccgtgaccctgcaggacgtgagaggccgggactaccagaacgccatgcgggtgtggtccaacatccctggactgaaaagcaagcacgcacctctgacccctaaagaagaggagtacctgcaggcccaggtgcggagcagaagcaagctggacgcccctaaggtggatctgctggtgaagaattgcctcctgcccctgagagagtacttcaagtatttcagccagaatagtctgcccctgggcggcccaagcagcggcgcccctcctcccagcggcggcagcccagccggctccccaacctctaccgaggagggcacctctgagtccgccacccccgagagcggccctggcacctccaccgagcccagcgagggcagcgcacccggcagccctgccggcagccccacctccacagaggagggaaccagcaccgagcccagcgaaggcagcgccccaggcaccagcaccgagcctagtgagggcggctctggcggcggcagcgcccaggagattaaacggatcaacaagatcagaagaagacttgtgaaagacagcaacaccaagaaggccggcaagacaggccccatgaaaaccctgctggttagagtgatgacacccgatctgagagagcggctggaaaacctgagaaagaagcctgaaaatatcccccagcccatcagcaatacatctagagccaacctgaataagctgctgaccgattacaccgaaatgaagaaggcgatcctgcatgtgtactgggaagagttccagaaggaccctgtgggcctgatgagccgggtggcccagcctgccagcaagaagatcgatcagaacaagctgaaacctgagatggacgagaagggcaacctgaccaccgccggctttgcctgctctcagtgtggccagcccctgttcgtgtacaagctggagcaggtgtctgagaagggcaaggcttacaccaactacttcggacggtgcaatgtggccgagcacgaaaagctgatcctgctggcccagctgaagcccgagaaggatagcgacgaagccgtgacatatagcctgggaaagtttgggcagagggccctggatttctacagcattcatgtgaccaaggagtccacccaccccgtgaagcccctggcccagatcgccggaaacagatacgcctccggacctgtgggaaaggccctgagcgacgcatgtatgggcacaatcgcctccttcctgtctaagtaccaggacatcatcatcgaacaccagaaggtggtgaagggcaaccagaagagactggagagcctgcgggagctggccggcaaggaaaacctggaataccctagcgtgaccctgccacctcagcctcacaccaaggagggcgttgatgcctacaacgaagtgatcgcccgggtgcgaatgtgggtgaacctgaacctgtggcagaagctgaagctaagcagagatgatgccaagcctctgctgagactgaagggattcccttcctttcctctggtcgagagacaggccaacgaagtggactggtgggacatggtgtgtaacgtgaagaagctgatcaacgagaaaaaggaggatggcaaggtgttttggcagaatctggctggctacaagagacaggaagccctgagaccatacctgagcagcgaggaagatcggaagaagggaaagaaattcgctcggtaccagctgggcgacctgctgctgcacctggaaaagaagcacggcgaggactggggaaaggtgtacgacgaggcctgggagcggattgacaagaaagtggaaggcctgagcaagcacatcaagctggaagaggaacggagaagcgaggacgcccagagcaaggccgccctgaccgactggctgcgggctaaggccagcttcgtgatcgagggcctgaaggaggccgacaaggacgagttctgcagatgcgagctgaagctgcagaagtggtacggggacctgcggggaaagcccttcgccatcgaagccgagaacagcatcctggacatcagcggcttcagcaagcagtacaactgtgccttcatctggcagaaggacggcgtgaagaagctgaacctgtacctgatcatcaactacttcaagggcggcaagctgcggttcaagaagatcaaacctgaagccttcgaagccaacagattctacaccgtgatcaacaaaaagagcggcgagatcgtgcccatggaggtgaacttcaacttcgacgaccccaacctgatcatcctgcctctggcctttggcaagagacagggcagagaattcatctggaacgacctgctgtccctggaaaccggcagcctgaagctggccaacggaagagtgatcgagaagacactgtacaacagaagaacccggcaggatgagcctgccctgttcgtggccctgaccttcgagcggcgggaggtcctggactcctccaatatcaaaccaatgaacctgatcggcgtggcaagaggcgaaaacatccccgccgtgatcgccctgaccgaccccgagggctgcccactgagccggtttaaggatagcctgggaaacccaacccacatcctgagaatcggcgagagctataaggagaagcagcggaccatccaggccaagaaggaggtggagcagcggagagccggcggctacagccggaagtacgccagcaaagccaagaatctggcagacgatatggtgagaaacaccgctagagatctgctgtactacgccgtgacccaggatgccatgctgatcttcgccaacctgagccggggcttcggccggcagggcaagcggaccttcatggccgagagacagtacacacggatggaggactggctgaccgccaagctggcctacgagggcctgagcaagacctacctgtccaagacactggcccagtacacctccaagacatgcagcaactgtgggtttaccatcaccagcgccgactacgacagggtgctggagaagctgaagaagacagcaacaggctggatgaccacaattaacggcaaggagctgaaggtggagggccagattacctactacaacagatacaagagacagaacgtagtcaaggacctgtccgtcgagctggatagactgagcgaagaatctgtgaacaacgacatctcctcctggacaaagggcagaagcggagaagctctgagcctcctgaagaaaagattctcccatagacccgtgcaggagaagttcgtgtgcctgaactgcggcttcgagacacacgcagccgagcaagccgccctgaacatcgccagatcctggctgttcctgcggagccaggagtacaagaaataccagacaaacaagacaaccggcaacaccgataagagagccttcgtcgagacctggcagtccttttaccggaagaagcttaaggaggtgtggaaacctgccgtgcggtctggcggatctggcggaggctccacaagcgcccacggcagcgtgatgttcagcgacgtgagcatcgtgttcagccaggaggagtgggagtacctggacctgaagcagagggacctgtacagggacgtgatgctggagaactacagcaacctggtgagcctgggctgcttcatcagcaagcccgacgtgatcagcctgctggagcagggcaaggagccctggaaggtgatgaggaagggcaggggcaggtaccccgacctggagaccaggtacaccagccccaagaaaaagagaaaagtctaagctgccttctgcggggcttgccttctggccatgcccttcttctctcccttgcacctgtacctcttggtctttgaataaagcctgagtaggaaggctagcaaaaaaaaaaaaaaaaaaaaaaaaaaaaaaaaaaaaaaaaaaaaaaaaaaaaaaaaaaaaaaaaaaaaaaaaaaaaaaaa

SEQ ID NO: 3646 - RNA, 5419 nt, synthetic construct
  source 1..5419: mol_type = other RNA
aggaaataagagagaaaagaagagtaagaagaaatataagagccaccatggcccctaagaagaagcgtaaagtgagccgggtgaacggcagcggcagcggcggcggcatgaaccacgaccaggagttcgacccccctaaggtgtaccctcccgtccccgccgagaagagaaagcccatccgggtcctgagcctgttcgatggcatcgccaccggtctgctggtgctgaaggacctgggcatccaggtggataggtacattgcctccgaggtgtgcgaggactccatcaccgtgggaatggtgcgtcatcagggcaagatcatgtacgtgggcgacgtgcggagcgtgacacagaagcatatccaggagtggggccctttcgacctggtgatcggcggcagcccttgcaatgacctgagcatcgtgaacccagcccggaagggcctgtacgagggaaccggcagactgttcttcgagttttacagactgctgcacgacgcccggcctaaggaaggcgacgaccggcccttcttttggctgttcgagaatgtggtggccatgggagtcagcgacaagcgggatattagccggttcctggagagcaaccccgtgatgatcgatgccaaggaagtgagcgccgcccaccgggccagatacttctggggcaatctgcctggcatgaacagacccctggccagcaccgtgaacgacaagctggagctgcaggagtgcctggagcacggccggatcgccaagttcagcaaggtgagaaccatcaccacccgaagcaacagcatcaaacaaggcaaggaccagcactttcctgtgttcatgaacgagaaggaggacatcctgtggtgtaccgagatggagagagtgttcgggttcccagtccactacacagatgtcagcaacatgtctagactggccagacagagactgctgggaagaagctggtccgtccctgtgatcagacacctgttcgcccctctgaaggagtacttcgcctgcgtgagcagcggcaacagcaacgccaacagccggggccccagcttctctagcggcctggtgccactgtccctgagagggagccacatgggccccatggagatctacaaaaccgtgagcgcctggaagcggcagcctgtgcgcgtgctgagcctgtttcggaatatcgataaagtcctgaaaagcctgggattcctggagagcggctctggctccggcggtggcaccctgaagtacgtggaggatgtgacaaacgtggtcagacgggatgtggagaagtggggccccttcgatctggtgtacggcagcacccaacccctgggcagctcttgtgaccggtgccctggctggtacatgtttcagttccaccggatcctgcagtacgccctgccgagacaggagtcccagcggccattcttttggattttcatggacaacttgctgctgaccgaggatgaccaggaaactaccactcggttcctgcagaccgaagccgtgaccctgcaggacgtgagaggccgggactaccagaacgccatgcgggtgtggtccaacatccctggactgaaaagcaagcacgcacctctgacccctaaagaagaggagtacctgcaggcccaggtgcggagcagaagcaagctggacgcccctaaggtggatctgctggtgaagaattgcctcctgcccctgagagagtacttcaagtatttcagccagaatagtctgcccctgggcggcccaagcagcggcgcccctcctcccagcggcggcagcccagccggctccccaacctctaccgaggagggcacctctgagtccgccacccccgagagcggccctggcacctccaccgagcccagcgagggcagcgcacccggcagccctgccggcagccccacctccacagaggagggaaccagcaccgagcccagcgaaggcagcgccccaggcaccagcaccgagcctagtgagggcggctctggcggcggcagcgcccaggagattaaacggatcaacaagatcagaagaagacttgtgaaagacagcaacaccaagaaggccggcaagacaggccccatgaaaaccctgctggttagagtgatgacacccgatctgagagagcggctggaaaacctgagaaagaagcctgaaaatatcccccagcccatcagcaatacatctagagccaacctgaataagctgctgaccgattacaccgaaatgaagaaggcgatcctgcatgtgtactgggaagagttccagaaggaccctgtgggcctgatgagccgggtggcccagcctgccagcaagaagatcgatcagaacaagctgaaacctgagatggacgagaagggcaacctgaccaccgccggctttgcctgctctcagtgtggccagcccctgttcgtgtacaagctggagcaggtgtctgagaagggcaaggcttacaccaactacttcggacggtgcaatgtggccgagcacgaaaagctgatcctgctggcccagctgaagcccgagaaggatagcgacgaagccgtgacatatagcctgggaaagtttgggcagagggccctggatttctacagcattcatgtgaccaaggagtccacccaccccgtgaagcccctggcccagatcgccggaaacagatacgcctccggacctgtgggaaaggccctgagcgacgcatgtatgggcacaatcgcctccttcctgtctaagtaccaggacatcatcatcgaacaccagaaggtggtgaagggcaaccagaagagactggagagcctgcgggagctggccggcaaggaaaacctggaataccctagcgtgaccctgccacctcagcctcacaccaaggagggcgttgatgcctacaacgaagtgatcgcccgggtgcgaatgtgggtgaacctgaacctgtggcagaagctgaagctaagcagagatgatgccaagcctctgctgagactgaagggattcccttcctttcctctggtcgagagacaggccaacgaagtggactggtgggacatggtgtgtaacgtgaagaagctgatcaacgagaaaaaggaggatggcaaggtgttttggcagaatctggctggctacaagagacaggaagccctgagaccatacctgagcagcgaggaagatcggaagaagggaaagaaattcgctcggtaccagctgggcgacctgctgctgcacctggaaaagaagcacggcgaggactggggaaaggtgtacgacgaggcctgggagcggattgacaagaaagtggaaggcctgagcaagcacatcaagctggaagaggaacggagaagcgaggacgcccagagcaaggccgccctgaccgactggctgcgggctaaggccagcttcgtgatcgagggcctgaaggaggccgacaaggacgagttctgcagatgcgagctgaagctgcagaagtggtacggggacctgcggggaaagcccttcgccatcgaagccgagaacagcatcctggacatcagcggcttcagcaagcagtacaactgtgccttcatctggcagaaggacggcgtgaagaagctgaacctgtacctgatcatcaactacttcaagggcggcaagctgcggttcaagaagatcaaacctgaagccttcgaagccaacagattctacaccgtgatcaacaaaaagagcggcgagatcgtgcccatggaggtgaacttcaacttcgacgaccccaacctgatcatcctgcctctggcctttggcaagagacagggcagagaattcatctggaacgacctgctgtccctggaaaccggcagcctgaagctggccaacggaagagtgatcgagaagacactgtacaacagaagaacccggcaggatgagcctgccctgttcgtggccctgaccttcgagcggcgggaggtcctggactcctccaatatcaaaccaatgaacctgatcggcgtggcaagaggcgaaaacatccccgccgtgatcgccctgaccgaccccgagggctgcccactgagccggtttaaggatagcctgggaaacccaacccacatcctgagaatcggcgagagctataaggagaagcagcggaccatccaggccaagaaggaggtggagcagcggagagccggcggctacagccggaagtacgccagcaaagccaagaatctggcagacgatatggtgagaaacaccgctagagatctgctgtactacgccgtgacccaggatgccatgctgatcttcgccaacctgagccggggcttcggccggcagggcaagcggaccttcatggccgagagacagtacacacggatggaggactggctgaccgccaagctggcctacgagggcctgagcaagacctacctgtccaagacactggcccagtacacctccaagacatgcagcaactgtgggtttaccatcaccagcgccgactacgacagggtgctggagaagctgaagaagacagcaacaggctggatgaccacaattaacggcaaggagctgaaggtggagggccagattacctactacaacagatacaagagacagaacgtagtcaaggacctgtccgtcgagctggatagactgagcgaagaatctgtgaacaacgacatctcctcctggacaaagggcagaagcggagaagctctgagcctcctgaagaaaagattctcccatagacccgtgcaggagaagttcgtgtgcctgaactgcggcttcgagacacacgcagccgagcaagccgccctgaacatcgccagatcctggctgttcctgcggagccaggagtacaagaaataccagacaaacaagacaaccggcaacaccgataagagagccttcgtcgagacctggcagtccttttaccggaagaagcttaaggaggtgtggaaacctgccgtgcggtctggcggatctggcggaggctccacaagcccccaggagagcgtggccttcgaggacgtggccgtgtacttcaccaccaaggagtgggccatcatgatgcccgccgagagggccctgtacagggacgtgatgctggagaactacgaggccgtggccttcgtggtgccccccaccagcaagcccgccctggtgagccacctggagcagggcaaggagagctgcttcatccagccccagggcgtgctgagcaggagcgactggagggccggcctgaccagccccaagaaaaagagaaaagtctaagctgccttctgcggggcttgccttctggccatgcccttcttctctcccttgcacctgtacctcttggtctttgaataaagcctgagtaggaaggctagcaaaaaaaaaaaaaaaaaaaaaaaaaaaaaaaaaaaaaaaaaaaaaaaaaaaaaaaaaaaaaaaaaaaaaaaaaaaaaaaa

SEQ ID NO: 3647 - RNA, 5419 nt, synthetic construct
  source 1..5419: mol_type = other RNA
aggaaataagagagaaaagaagagtaagaagaaatataagagccaccatggcccctaagaagaagcgtaaagtgagccgggtgaacggcagcggcagcggcggcggcatgaaccacgaccaggagttcgacccccctaaggtgtaccctcccgtccccgccgagaagagaaagcccatccgggtcctgagcctgttcgatggcatcgccaccggtctgctggtgctgaaggacctgggcatccaggtggataggtacattgcctccgaggtgtgcgaggactccatcaccgtgggaatggtgcgtcatcagggcaagatcatgtacgtgggcgacgtgcggagcgtgacacagaagcatatccaggagtggggccctttcgacctggtgatcggcggcagcccttgcaatgacctgagcatcgtgaacccagcccggaagggcctgtacgagggaaccggcagactgttcttcgagttttacagactgctgcacgacgcccggcctaaggaaggcgacgaccggcccttcttttggctgttcgagaatgtggtggccatgggagtcagcgacaagcgggatattagccggttcctggagagcaaccccgtgatgatcgatgccaaggaagtgagcgccgcccaccgggccagatacttctggggcaatctgcctggcatgaacagacccctggccagcaccgtgaacgacaagctggagctgcaggagtgcctggagcacggccggatcgccaagttcagcaaggtgagaaccatcaccacccgaagcaacagcatcaaacaaggcaaggaccagcactttcctgtgttcatgaacgagaaggaggacatcctgtggtgtaccgagatggagagagtgttcgggttcccagtccactacacagatgtcagcaacatgtctagactggccagacagagactgctgggaagaagctggtccgtccctgtgatcagacacctgttcgcccctctgaaggagtacttcgcctgcgtgagcagcggcaacagcaacgccaacagccggggccccagcttctctagcggcctggtgccactgtccctgagagggagccacatgggccccatggagatctacaaaaccgtgagcgcctggaagcggcagcctgtgcgcgtgctgagcctgtttcggaatatcgataaagtcctgaaaagcctgggattcctggagagcggctctggctccggcggtggcaccctgaagtacgtggaggatgtgacaaacgtggtcagacgggatgtggagaagtggggccccttcgatctggtgtacggcagcacccaacccctgggcagctcttgtgaccggtgccctggctggtacatgtttcagttccaccggatcctgcagtacgccctgccgagacaggagtcccagcggccattcttttggattttcatggacaacttgctgctgaccgaggatgaccaggaaactaccactcggttcctgcagaccgaagccgtgaccctgcaggacgtgagaggccgggactaccagaacgccatgcgggtgtggtccaacatccctggactgaaaagcaagcacgcacctctgacccctaaagaagaggagtacctgcaggcccaggtgcggagcagaagcaagctggacgcccctaaggtggatctgctggtgaagaattgcctcctgcccctgagagagtacttcaagtatttcagccagaatagtctgcccctgggcggcccaagcagcggcgcccctcctcccagcggcggcagcccagccggctccccaacctctaccgaggagggcacctctgagtccgccacccccgagagcggccctggcacctccaccgagcccagcgagggcagcgcacccggcagccctgccggcagccccacctccacagaggagggaaccagcaccgagcccagcgaaggcagcgccccaggcaccagcaccgagcctagtgagggcggctctggcggcggcagcgcccaggagattaaacggatcaacaagatcagaagaagacttgtgaaagacagcaacaccaagaaggccggcaagacaggccccatgaaaaccctgctggttagagtgatgacacccgatctgagagagcggctggaaaacctgagaaagaagcctgaaaatatcccccagcccatcagcaatacatctagagccaacctgaataagctgctgaccgattacaccgaaatgaagaaggcgatcctgcatgtgtactgggaagagttccagaaggaccctgtgggcctgatgagccgggtggcccagcctgccagcaagaagatcgatcagaacaagctgaaacctgagatggacgagaagggcaacctgaccaccgccggctttgcctgctctcagtgtggccagcccctgttcgtgtacaagctggagcaggtgtctgagaagggcaaggcttacaccaactacttcggacggtgcaatgtggccgagcacgaaaagctgatcctgctggcccagctgaagcccgagaaggatagcgacgaagccgtgacatatagcctgggaaagtttgggcagagggccctggatttctacagcattcatgtgaccaaggagtccacccaccccgtgaagcccctggcccagatcgccggaaacagatacgcctccggacctgtgggaaaggccctgagcgacgcatgtatgggcacaatcgcctccttcctgtctaagtaccaggacatcatcatcgaacaccagaaggtggtgaagggcaaccagaagagactggagagcctgcgggagctggccggcaaggaaaacctggaataccctagcgtgaccctgccacctcagcctcacaccaaggagggcgttgatgcctacaacgaagtgatcgcccgggtgcgaatgtgggtgaacctgaacctgtggcagaagctgaagctaagcagagatgatgccaagcctctgctgagactgaagggattcccttcctttcctctggtcgagagacaggccaacgaagtggactggtgggacatggtgtgtaacgtgaagaagctgatcaacgagaaaaaggaggatggcaaggtgttttggcagaatctggctggctacaagagacaggaagccctgagaccatacctgagcagcgaggaagatcggaagaagggaaagaaattcgctcggtaccagctgggcgacctgctgctgcacctggaaaagaagcacggcgaggactggggaaaggtgtacgacgaggcctgggagcggattgacaagaaagtggaaggcctgagcaagcacatcaagctggaagaggaacggagaagcgaggacgcccagagcaaggccgccctgaccgactggctgcgggctaaggccagcttcgtgatcgagggcctgaaggaggccgacaaggacgagttctgcagatgcgagctgaagctgcagaagtggtacggggacctgcggggaaagcccttcgccatcgaagccgagaacagcatcctggacatcagcggcttcagcaagcagtacaactgtgccttcatctggcagaaggacggcgtgaagaagctgaacctgtacctgatcatcaactacttcaagggcggcaagctgcggttcaagaagatcaaacctgaagccttcgaagccaacagattctacaccgtgatcaacaaaaagagcggcgagatcgtgcccatggaggtgaacttcaacttcgacgaccccaacctgatcatcctgcctctggcctttggcaagagacagggcagagaattcatctggaacgacctgctgtccctggaaaccggcagcctgaagctggccaacggaagagtgatcgagaagacactgtacaacagaagaacccggcaggatgagcctgccctgttcgtggccctgaccttcgagcggcgggaggtcctggactcctccaatatcaaaccaatgaacctgatcggcgtggcaagaggcgaaaacatccccgccgtgatcgccctgaccgaccccgagggctgcccactgagccggtttaaggatagcctgggaaacccaacccacatcctgagaatcggcgagagctataaggagaagcagcggaccatccaggccaagaaggaggtggagcagcggagagccggcggctacagccggaagtacgccagcaaagccaagaatctggcagacgatatggtgagaaacaccgctagagatctgctgtactacgccgtgacccaggatgccatgctgatcttcgccaacctgagccggggcttcggccggcagggcaagcggaccttcatggccgagagacagtacacacggatggaggactggctgaccgccaagctggcctacgagggcctgagcaagacctacctgtccaagacactggcccagtacacctccaagacatgcagcaactgtgggtttaccatcaccagcgccgactacgacagggtgctggagaagctgaagaagacagcaacaggctggatgaccacaattaacggcaaggagctgaaggtggagggccagattacctactacaacagatacaagagacagaacgtagtcaaggacctgtccgtcgagctggatagactgagcgaagaatctgtgaacaacgacatctcctcctggacaaagggcagaagcggagaagctctgagcctcctgaagaaaagattctcccatagacccgtgcaggagaagttcgtgtgcctgaactgcggcttcgagacacacgcagccgagcaagccgccctgaacatcgccagatcctggctgttcctgcggagccaggagtacaagaaataccagacaaacaagacaaccggcaacaccgataagagagccttcgtcgagacctggcagtccttttaccggaagaagcttaaggaggtgtggaaacctgccgtgcggtctggcggatctggcggaggctccacaagcacccaggacagcgtgaccttcaaggacgtggccgtggacttcaccagggaggagtgggagaggctgaacagcacccagagggacctgtacagggacgtgatgctggagaactacaggaacctggtgagcctgggcctggccgtgagcaagcccgacatcatcttccagctggagcaggagaaggagctgtggatgctgaagaggaaggtgctgaggagcaccaggcccgcccagaagaccgagaccagccccaagaaaaagagaaaagtctaagctgccttctgcggggcttgccttctggccatgcccttcttctctcccttgcacctgtacctcttggtctttgaataaagcctgagtaggaaggctagcaaaaaaaaaaaaaaaaaaaaaaaaaaaaaaaaaaaaaaaaaaaaaaaaaaaaaaaaaaaaaaaaaaaaaaaaaaaaaaaa

SEQ ID NO: 3648 - RNA, 5419 nt, synthetic construct
  source 1..5419: mol_type = other RNA
aggaaataagagagaaaagaagagtaagaagaaatataagagccaccatggcccctaagaagaagcgtaaagtgagccgggtgaacggcagcggcagcggcggcggcatgaaccacgaccaggagttcgacccccctaaggtgtaccctcccgtccccgccgagaagagaaagcccatccgggtcctgagcctgttcgatggcatcgccaccggtctgctggtgctgaaggacctgggcatccaggtggataggtacattgcctccgaggtgtgcgaggactccatcaccgtgggaatggtgcgtcatcagggcaagatcatgtacgtgggcgacgtgcggagcgtgacacagaagcatatccaggagtggggccctttcgacctggtgatcggcggcagcccttgcaatgacctgagcatcgtgaacccagcccggaagggcctgtacgagggaaccggcagactgttcttcgagttttacagactgctgcacgacgcccggcctaaggaaggcgacgaccggcccttcttttggctgttcgagaatgtggtggccatgggagtcagcgacaagcgggatattagccggttcctggagagcaaccccgtgatgatcgatgccaaggaagtgagcgccgcccaccgggccagatacttctggggcaatctgcctggcatgaacagacccctggccagcaccgtgaacgacaagctggagctgcaggagtgcctggagcacggccggatcgccaagttcagcaaggtgagaaccatcaccacccgaagcaacagcatcaaacaaggcaaggaccagcactttcctgtgttcatgaacgagaaggaggacatcctgtggtgtaccgagatggagagagtgttcgggttcccagtccactacacagatgtcagcaacatgtctagactggccagacagagactgctgggaagaagctggtccgtccctgtgatcagacacctgttcgcccctctgaaggagtacttcgcctgcgtgagcagcggcaacagcaacgccaacagccggggccccagcttctctagcggcctggtgccactgtccctgagagggagccacatgggccccatggagatctacaaaaccgtgagcgcctggaagcggcagcctgtgcgcgtgctgagcctgtttcggaatatcgataaagtcctgaaaagcctgggattcctggagagcggctctggctccggcggtggcaccctgaagtacgtggaggatgtgacaaacgtggtcagacgggatgtggagaagtggggccccttcgatctggtgtacggcagcacccaacccctgggcagctcttgtgaccggtgccctggctggtacatgtttcagttccaccggatcctgcagtacgccctgccgagacaggagtcccagcggccattcttttggattttcatggacaacttgctgctgaccgaggatgaccaggaaactaccactcggttcctgcagaccgaagccgtgaccctgcaggacgtgagaggccgggactaccagaacgccatgcgggtgtggtccaacatccctggactgaaaagcaagcacgcacctctgacccctaaagaagaggagtacctgcaggcccaggtgcggagcagaagcaagctggacgcccctaaggtggatctgctggtgaagaattgcctcctgcccctgagagagtacttcaagtatttcagccagaatagtctgcccctgggcggcccaagcagcggcgcccctcctcccagcggcggcagcccagccggctccccaacctctaccgaggagggcacctctgagtccgccacccccgagagcggccctggcacctccaccgagcccagcgagggcagcgcacccggcagccctgccggcagccccacctccacagaggagggaaccagcaccgagcccagcgaaggcagcgccccaggcaccagcaccgagcctagtgagggcggctctggcggcggcagcgcccaggagattaaacggatcaacaagatcagaagaagacttgtgaaagacagcaacaccaagaaggccggcaagacaggccccatgaaaaccctgctggttagagtgatgacacccgatctgagagagcggctggaaaacctgagaaagaagcctgaaaatatcccccagcccatcagcaatacatctagagccaacctgaataagctgctgaccgattacaccgaaatgaagaaggcgatcctgcatgtgtactgggaagagttccagaaggaccctgtgggcctgatgagccgggtggcccagcctgccagcaagaagatcgatcagaacaagctgaaacctgagatggacgagaagggcaacctgaccaccgccggctttgcctgctctcagtgtggccagcccctgttcgtgtacaagctggagcaggtgtctgagaagggcaaggcttacaccaactacttcggacggtgcaatgtggccgagcacgaaaagctgatcctgctggcccagctgaagcccgagaaggatagcgacgaagccgtgacatatagcctgggaaagtttgggcagagggccctggatttctacagcattcatgtgaccaaggagtccacccaccccgtgaagcccctggcccagatcgccggaaacagatacgcctccggacctgtgggaaaggccctgagcgacgcatgtatgggcacaatcgcctccttcctgtctaagtaccaggacatcatcatcgaacaccagaaggtggtgaagggcaaccagaagagactggagagcctgcgggagctggccggcaaggaaaacctggaataccctagcgtgaccctgccacctcagcctcacaccaaggagggcgttgatgcctacaacgaagtgatcgcccgggtgcgaatgtgggtgaacctgaacctgtggcagaagctgaagctaagcagagatgatgccaagcctctgctgagactgaagggattcccttcctttcctctggtcgagagacaggccaacgaagtggactggtgggacatggtgtgtaacgtgaagaagctgatcaacgagaaaaaggaggatggcaaggtgttttggcagaatctggctggctacaagagacaggaagccctgagaccatacctgagcagcgaggaagatcggaagaagggaaagaaattcgctcggtaccagctgggcgacctgctgctgcacctggaaaagaagcacggcgaggactggggaaaggtgtacgacgaggcctgggagcggattgacaagaaagtggaaggcctgagcaagcacatcaagctggaagaggaacggagaagcgaggacgcccagagcaaggccgccctgaccgactggctgcgggctaaggccagcttcgtgatcgagggcctgaaggaggccgacaaggacgagttctgcagatgcgagctgaagctgcagaagtggtacggggacctgcggggaaagcccttcgccatcgaagccgagaacagcatcctggacatcagcggcttcagcaagcagtacaactgtgccttcatctggcagaaggacggcgtgaagaagctgaacctgtacctgatcatcaactacttcaagggcggcaagctgcggttcaagaagatcaaacctgaagccttcgaagccaacagattctacaccgtgatcaacaaaaagagcggcgagatcgtgcccatggaggtgaacttcaacttcgacgaccccaacctgatcatcctgcctctggcctttggcaagagacagggcagagaattcatctggaacgacctgctgtccctggaaaccggcagcctgaagctggccaacggaagagtgatcgagaagacactgtacaacagaagaacccggcaggatgagcctgccctgttcgtggccctgaccttcgagcggcgggaggtcctggactcctccaatatcaaaccaatgaacctgatcggcgtggcaagaggcgaaaacatccccgccgtgatcgccctgaccgaccccgagggctgcccactgagccggtttaaggatagcctgggaaacccaacccacatcctgagaatcggcgagagctataaggagaagcagcggaccatccaggccaagaaggaggtggagcagcggagagccggcggctacagccggaagtacgccagcaaagccaagaatctggcagacgatatggtgagaaacaccgctagagatctgctgtactacgccgtgacccaggatgccatgctgatcttcgccaacctgagccggggcttcggccggcagggcaagcggaccttcatggccgagagacagtacacacggatggaggactggctgaccgccaagctggcctacgagggcctgagcaagacctacctgtccaagacactggcccagtacacctccaagacatgcagcaactgtgggtttaccatcaccagcgccgactacgacagggtgctggagaagctgaagaagacagcaacaggctggatgaccacaattaacggcaaggagctgaaggtggagggccagattacctactacaacagatacaagagacagaacgtagtcaaggacctgtccgtcgagctggatagactgagcgaagaatctgtgaacaacgacatctcctcctggacaaagggcagaagcggagaagctctgagcctcctgaagaaaagattctcccatagacccgtgcaggagaagttcgtgtgcctgaactgcggcttcgagacacacgcagccgagcaagccgccctgaacatcgccagatcctggctgttcctgcggagccaggagtacaagaaataccagacaaacaagacaaccggcaacaccgataagagagccttcgtcgagacctggcagtccttttaccggaagaagcttaaggaggtgtggaaacctgccgtgcggtctggcggatctggcggaggctccacaagcaggcaggagcccgtgaccttcgaggacgtggccgtgtacttcacccagaacgagtgggtgatcctggaccccgcccagagggccctgtacagggaggtgatgctggagaactacgccaacgtggccagcctggccttcagcttcaccaggcccgtgctggtgagccagctggagaggggcgagctgccccccggcctggacccctgggagagggccagccccgaggccctgaggggcatctgcaccagccccaagaaaaagagaaaagtctaagctgccttctgcggggcttgccttctggccatgcccttcttctctcccttgcacctgtacctcttggtctttgaataaagcctgagtaggaaggctagcaaaaaaaaaaaaaaaaaaaaaaaaaaaaaaaaaaaaaaaaaaaaaaaaaaaaaaaaaaaaaaaaaaaaaaaaaaaaaaaa

SEQ ID NO: 3649 - RNA, 5419 nt, synthetic construct
  source 1..5419: mol_type = other RNA
aggaaataagagagaaaagaagagtaagaagaaatataagagccaccatggcccctaagaagaagcgtaaagtgagccgggtgaacggcagcggcagcggcggcggcatgaaccacgaccaggagttcgacccccctaaggtgtaccctcccgtccccgccgagaagagaaagcccatccgggtcctgagcctgttcgatggcatcgccaccggtctgctggtgctgaaggacctgggcatccaggtggataggtacattgcctccgaggtgtgcgaggactccatcaccgtgggaatggtgcgtcatcagggcaagatcatgtacgtgggcgacgtgcggagcgtgacacagaagcatatccaggagtggggccctttcgacctggtgatcggcggcagcccttgcaatgacctgagcatcgtgaacccagcccggaagggcctgtacgagggaaccggcagactgttcttcgagttttacagactgctgcacgacgcccggcctaaggaaggcgacgaccggcccttcttttggctgttcgagaatgtggtggccatgggagtcagcgacaagcgggatattagccggttcctggagagcaaccccgtgatgatcgatgccaaggaagtgagcgccgcccaccgggccagatacttctggggcaatctgcctggcatgaacagacccctggccagcaccgtgaacgacaagctggagctgcaggagtgcctggagcacggccggatcgccaagttcagcaaggtgagaaccatcaccacccgaagcaacagcatcaaacaaggcaaggaccagcactttcctgtgttcatgaacgagaaggaggacatcctgtggtgtaccgagatggagagagtgttcgggttcccagtccactacacagatgtcagcaacatgtctagactggccagacagagactgctgggaagaagctggtccgtccctgtgatcagacacctgttcgcccctctgaaggagtacttcgcctgcgtgagcagcggcaacagcaacgccaacagccggggccccagcttctctagcggcctggtgccactgtccctgagagggagccacatgggccccatggagatctacaaaaccgtgagcgcctggaagcggcagcctgtgcgcgtgctgagcctgtttcggaatatcgataaagtcctgaaaagcctgggattcctggagagcggctctggctccggcggtggcaccctgaagtacgtggaggatgtgacaaacgtggtcagacgggatgtggagaagtggggccccttcgatctggtgtacggcagcacccaacccctgggcagctcttgtgaccggtgccctggctggtacatgtttcagttccaccggatcctgcagtacgccctgccgagacaggagtcccagcggccattcttttggattttcatggacaacttgctgctgaccgaggatgaccaggaaactaccactcggttcctgcagaccgaagccgtgaccctgcaggacgtgagaggccgggactaccagaacgccatgcgggtgtggtccaacatccctggactgaaaagcaagcacgcacctctgacccctaaagaagaggagtacctgcaggcccaggtgcggagcagaagcaagctggacgcccctaaggtggatctgctggtgaagaattgcctcctgcccctgagagagtacttcaagtatttcagccagaatagtctgcccctgggcggcccaagcagcggcgcccctcctcccagcggcggcagcccagccggctccccaacctctaccgaggagggcacctctgagtccgccacccccgagagcggccctggcacctccaccgagcccagcgagggcagcgcacccggcagccctgccggcagccccacctccacagaggagggaaccagcaccgagcccagcgaaggcagcgccccaggcaccagcaccgagcctagtgagggcggctctggcggcggcagcgcccaggagattaaacggatcaacaagatcagaagaagacttgtgaaagacagcaacaccaagaaggccggcaagacaggccccatgaaaaccctgctggttagagtgatgacacccgatctgagagagcggctggaaaacctgagaaagaagcctgaaaatatcccccagcccatcagcaatacatctagagccaacctgaataagctgctgaccgattacaccgaaatgaagaaggcgatcctgcatgtgtactgggaagagttccagaaggaccctgtgggcctgatgagccgggtggcccagcctgccagcaagaagatcgatcagaacaagctgaaacctgagatggacgagaagggcaacctgaccaccgccggctttgcctgctctcagtgtggccagcccctgttcgtgtacaagctggagcaggtgtctgagaagggcaaggcttacaccaactacttcggacggtgcaatgtggccgagcacgaaaagctgatcctgctggcccagctgaagcccgagaaggatagcgacgaagccgtgacatatagcctgggaaagtttgggcagagggccctggatttctacagcattcatgtgaccaaggagtccacccaccccgtgaagcccctggcccagatcgccggaaacagatacgcctccggacctgtgggaaaggccctgagcgacgcatgtatgggcacaatcgcctccttcctgtctaagtaccaggacatcatcatcgaacaccagaaggtggtgaagggcaaccagaagagactggagagcctgcgggagctggccggcaaggaaaacctggaataccctagcgtgaccctgccacctcagcctcacaccaaggagggcgttgatgcctacaacgaagtgatcgcccgggtgcgaatgtgggtgaacctgaacctgtggcagaagctgaagctaagcagagatgatgccaagcctctgctgagactgaagggattcccttcctttcctctggtcgagagacaggccaacgaagtggactggtgggacatggtgtgtaacgtgaagaagctgatcaacgagaaaaaggaggatggcaaggtgttttggcagaatctggctggctacaagagacaggaagccctgagaccatacctgagcagcgaggaagatcggaagaagggaaagaaattcgctcggtaccagctgggcgacctgctgctgcacctggaaaagaagcacggcgaggactggggaaaggtgtacgacgaggcctgggagcggattgacaagaaagtggaaggcctgagcaagcacatcaagctggaagaggaacggagaagcgaggacgcccagagcaaggccgccctgaccgactggctgcgggctaaggccagcttcgtgatcgagggcctgaaggaggccgacaaggacgagttctgcagatgcgagctgaagctgcagaagtggtacggggacctgcggggaaagcccttcgccatcgaagccgagaacagcatcctggacatcagcggcttcagcaagcagtacaactgtgccttcatctggcagaaggacggcgtgaagaagctgaacctgtacctgatcatcaactacttcaagggcggcaagctgcggttcaagaagatcaaacctgaagccttcgaagccaacagattctacaccgtgatcaacaaaaagagcggcgagatcgtgcccatggaggtgaacttcaacttcgacgaccccaacctgatcatcctgcctctggcctttggcaagagacagggcagagaattcatctggaacgacctgctgtccctggaaaccggcagcctgaagctggccaacggaagagtgatcgagaagacactgtacaacagaagaacccggcaggatgagcctgccctgttcgtggccctgaccttcgagcggcgggaggtcctggactcctccaatatcaaaccaatgaacctgatcggcgtggcaagaggcgaaaacatccccgccgtgatcgccctgaccgaccccgagggctgcccactgagccggtttaaggatagcctgggaaacccaacccacatcctgagaatcggcgagagctataaggagaagcagcggaccatccaggccaagaaggaggtggagcagcggagagccggcggctacagccggaagtacgccagcaaagccaagaatctggcagacgatatggtgagaaacaccgctagagatctgctgtactacgccgtgacccaggatgccatgctgatcttcgccaacctgagccggggcttcggccggcagggcaagcggaccttcatggccgagagacagtacacacggatggaggactggctgaccgccaagctggcctacgagggcctgagcaagacctacctgtccaagacactggcccagtacacctccaagacatgcagcaactgtgggtttaccatcaccagcgccgactacgacagggtgctggagaagctgaagaagacagcaacaggctggatgaccacaattaacggcaaggagctgaaggtggagggccagattacctactacaacagatacaagagacagaacgtagtcaaggacctgtccgtcgagctggatagactgagcgaagaatctgtgaacaacgacatctcctcctggacaaagggcagaagcggagaagctctgagcctcctgaagaaaagattctcccatagacccgtgcaggagaagttcgtgtgcctgaactgcggcttcgagacacacgcagccgagcaagccgccctgaacatcgccagatcctggctgttcctgcggagccaggagtacaagaaataccagacaaacaagacaaccggcaacaccgataagagagccttcgtcgagacctggcagtccttttaccggaagaagcttaaggaggtgtggaaacctgccgtgcggtctggcggatctggcggaggctccacaagcaagcccgagctggtgagcttcgccgacgtggccgtgtacttcagcccccaggagtggggctgcctgaggcccgcccagagggccctgtacagggaggtgatgagggagacctacggcctgctgggcgccctgggcttccccggccccaagcccgccctgatcagctggatggagcaggagagcgaggcctggagccccgccgcccaggaccccgaggagggcgagagcctgggcggcgcccccaccagccccaagaaaaagagaaaagtctaagctgccttctgcggggcttgccttctggccatgcccttcttctctcccttgcacctgtacctcttggtctttgaataaagcctgagtaggaaggctagcaaaaaaaaaaaaaaaaaaaaaaaaaaaaaaaaaaaaaaaaaaaaaaaaaaaaaaaaaaaaaaaaaaaaaaaaaaaaaaaa

SEQ ID NO: 3650 - RNA, 5419 nt, synthetic construct
  source 1..5419: mol_type = other RNA
aggaaataagagagaaaagaagagtaagaagaaatataagagccaccatggcccctaagaagaagcgtaaagtgagccgggtgaacggcagcggcagcggcggcggcatgaaccacgaccaggagttcgacccccctaaggtgtaccctcccgtccccgccgagaagagaaagcccatccgggtcctgagcctgttcgatggcatcgccaccggtctgctggtgctgaaggacctgggcatccaggtggataggtacattgcctccgaggtgtgcgaggactccatcaccgtgggaatggtgcgtcatcagggcaagatcatgtacgtgggcgacgtgcggagcgtgacacagaagcatatccaggagtggggccctttcgacctggtgatcggcggcagcccttgcaatgacctgagcatcgtgaacccagcccggaagggcctgtacgagggaaccggcagactgttcttcgagttttacagactgctgcacgacgcccggcctaaggaaggcgacgaccggcccttcttttggctgttcgagaatgtggtggccatgggagtcagcgacaagcgggatattagccggttcctggagagcaaccccgtgatgatcgatgccaaggaagtgagcgccgcccaccgggccagatacttctggggcaatctgcctggcatgaacagacccctggccagcaccgtgaacgacaagctggagctgcaggagtgcctggagcacggccggatcgccaagttcagcaaggtgagaaccatcaccacccgaagcaacagcatcaaacaaggcaaggaccagcactttcctgtgttcatgaacgagaaggaggacatcctgtggtgtaccgagatggagagagtgttcgggttcccagtccactacacagatgtcagcaacatgtctagactggccagacagagactgctgggaagaagctggtccgtccctgtgatcagacacctgttcgcccctctgaaggagtacttcgcctgcgtgagcagcggcaacagcaacgccaacagccggggccccagcttctctagcggcctggtgccactgtccctgagagggagccacatgggccccatggagatctacaaaaccgtgagcgcctggaagcggcagcctgtgcgcgtgctgagcctgtttcggaatatcgataaagtcctgaaaagcctgggattcctggagagcggctctggctccggcggtggcaccctgaagtacgtggaggatgtgacaaacgtggtcagacgggatgtggagaagtggggccccttcgatctggtgtacggcagcacccaacccctgggcagctcttgtgaccggtgccctggctggtacatgtttcagttccaccggatcctgcagtacgccctgccgagacaggagtcccagcggccattcttttggattttcatggacaacttgctgctgaccgaggatgaccaggaaactaccactcggttcctgcagaccgaagccgtgaccctgcaggacgtgagaggccgggactaccagaacgccatgcgggtgtggtccaacatccctggactgaaaagcaagcacgcacctctgacccctaaagaagaggagtacctgcaggcccaggtgcggagcagaagcaagctggacgcccctaaggtggatctgctggtgaagaattgcctcctgcccctgagagagtacttcaagtatttcagccagaatagtctgcccctgggcggcccaagcagcggcgcccctcctcccagcggcggcagcccagccggctccccaacctctaccgaggagggcacctctgagtccgccacccccgagagcggccctggcacctccaccgagcccagcgagggcagcgcacccggcagccctgccggcagccccacctccacagaggagggaaccagcaccgagcccagcgaaggcagcgccccaggcaccagcaccgagcctagtgagggcggctctggcggcggcagcgcccaggagattaaacggatcaacaagatcagaagaagacttgtgaaagacagcaacaccaagaaggccggcaagacaggccccatgaaaaccctgctggttagagtgatgacacccgatctgagagagcggctggaaaacctgagaaagaagcctgaaaatatcccccagcccatcagcaatacatctagagccaacctgaataagctgctgaccgattacaccgaaatgaagaaggcgatcctgcatgtgtactgggaagagttccagaaggaccctgtgggcctgatgagccgggtggcccagcctgccagcaagaagatcgatcagaacaagctgaaacctgagatggacgagaagggcaacctgaccaccgccggctttgcctgctctcagtgtggccagcccctgttcgtgtacaagctggagcaggtgtctgagaagggcaaggcttacaccaactacttcggacggtgcaatgtggccgagcacgaaaagctgatcctgctggcccagctgaagcccgagaaggatagcgacgaagccgtgacatatagcctgggaaagtttgggcagagggccctggatttctacagcattcatgtgaccaaggagtccacccaccccgtgaagcccctggcccagatcgccggaaacagatacgcctccggacctgtgggaaaggccctgagcgacgcatgtatgggcacaatcgcctccttcctgtctaagtaccaggacatcatcatcgaacaccagaaggtggtgaagggcaaccagaagagactggagagcctgcgggagctggccggcaaggaaaacctggaataccctagcgtgaccctgccacctcagcctcacaccaaggagggcgttgatgcctacaacgaagtgatcgcccgggtgcgaatgtgggtgaacctgaacctgtggcagaagctgaagctaagcagagatgatgccaagcctctgctgagactgaagggattcccttcctttcctctggtcgagagacaggccaacgaagtggactggtgggacatggtgtgtaacgtgaagaagctgatcaacgagaaaaaggaggatggcaaggtgttttggcagaatctggctggctacaagagacaggaagccctgagaccatacctgagcagcgaggaagatcggaagaagggaaagaaattcgctcggtaccagctgggcgacctgctgctgcacctggaaaagaagcacggcgaggactggggaaaggtgtacgacgaggcctgggagcggattgacaagaaagtggaaggcctgagcaagcacatcaagctggaagaggaacggagaagcgaggacgcccagagcaaggccgccctgaccgactggctgcgggctaaggccagcttcgtgatcgagggcctgaaggaggccgacaaggacgagttctgcagatgcgagctgaagctgcagaagtggtacggggacctgcggggaaagcccttcgccatcgaagccgagaacagcatcctggacatcagcggcttcagcaagcagtacaactgtgccttcatctggcagaaggacggcgtgaagaagctgaacctgtacctgatcatcaactacttcaagggcggcaagctgcggttcaagaagatcaaacctgaagccttcgaagccaacagattctacaccgtgatcaacaaaaagagcggcgagatcgtgcccatggaggtgaacttcaacttcgacgaccccaacctgatcatcctgcctctggcctttggcaagagacagggcagagaattcatctggaacgacctgctgtccctggaaaccggcagcctgaagctggccaacggaagagtgatcgagaagacactgtacaacagaagaacccggcaggatgagcctgccctgttcgtggccctgaccttcgagcggcgggaggtcctggactcctccaatatcaaaccaatgaacctgatcggcgtggcaagaggcgaaaacatccccgccgtgatcgccctgaccgaccccgagggctgcccactgagccggtttaaggatagcctgggaaacccaacccacatcctgagaatcggcgagagctataaggagaagcagcggaccatccaggccaagaaggaggtggagcagcggagagccggcggctacagccggaagtacgccagcaaagccaagaatctggcagacgatatggtgagaaacaccgctagagatctgctgtactacgccgtgacccaggatgccatgctgatcttcgccaacctgagccggggcttcggccggcagggcaagcggaccttcatggccgagagacagtacacacggatggaggactggctgaccgccaagctggcctacgagggcctgagcaagacctacctgtccaagacactggcccagtacacctccaagacatgcagcaactgtgggtttaccatcaccagcgccgactacgacagggtgctggagaagctgaagaagacagcaacaggctggatgaccacaattaacggcaaggagctgaaggtggagggccagattacctactacaacagatacaagagacagaacgtagtcaaggacctgtccgtcgagctggatagactgagcgaagaatctgtgaacaacgacatctcctcctggacaaagggcagaagcggagaagctctgagcctcctgaagaaaagattctcccatagacccgtgcaggagaagttcgtgtgcctgaactgcggcttcgagacacacgcagccgagcaagccgccctgaacatcgccagatcctggctgttcctgcggagccaggagtacaagaaataccagacaaacaagacaaccggcaacaccgataagagagccttcgtcgagacctggcagtccttttaccggaagaagcttaaggaggtgtggaaacctgccgtgcggtctggcggatctggcggaggctccacaagcatccagggccaggtgaacttcgaggacgtgttcgtgtacttcagccaggaggagtgggtgctgctggacgaggcccagaggctgctgtacagggacgtgatgctggagaacttcgccctgatggccagcctgggccacaccagcttcaccagccacaccgtggccagcctggtgatgggccccgactgggtggacgtgacccccgccgtggccaccggcaccctgagcggcagcggccccggcaccagccccaagaaaaagagaaaagtctaagctgccttctgcggggcttgccttctggccatgcccttcttctctcccttgcacctgtacctcttggtctttgaataaagcctgagtaggaaggctagcaaaaaaaaaaaaaaaaaaaaaaaaaaaaaaaaaaaaaaaaaaaaaaaaaaaaaaaaaaaaaaaaaaaaaaaaaaaaaaaa

SEQ ID NO: 3651 - RNA, 5419 nt, synthetic construct
  source 1..5419: mol_type = other RNA
aggaaataagagagaaaagaagagtaagaagaaatataagagccaccatggcccctaagaagaagcgtaaagtgagccgggtgaacggcagcggcagcggcggcggcatgaaccacgaccaggagttcgacccccctaaggtgtaccctcccgtccccgccgagaagagaaagcccatccgggtcctgagcctgttcgatggcatcgccaccggtctgctggtgctgaaggacctgggcatccaggtggataggtacattgcctccgaggtgtgcgaggactccatcaccgtgggaatggtgcgtcatcagggcaagatcatgtacgtgggcgacgtgcggagcgtgacacagaagcatatccaggagtggggccctttcgacctggtgatcggcggcagcccttgcaatgacctgagcatcgtgaacccagcccggaagggcctgtacgagggaaccggcagactgttcttcgagttttacagactgctgcacgacgcccggcctaaggaaggcgacgaccggcccttcttttggctgttcgagaatgtggtggccatgggagtcagcgacaagcgggatattagccggttcctggagagcaaccccgtgatgatcgatgccaaggaagtgagcgccgcccaccgggccagatacttctggggcaatctgcctggcatgaacagacccctggccagcaccgtgaacgacaagctggagctgcaggagtgcctggagcacggccggatcgccaagttcagcaaggtgagaaccatcaccacccgaagcaacagcatcaaacaaggcaaggaccagcactttcctgtgttcatgaacgagaaggaggacatcctgtggtgtaccgagatggagagagtgttcgggttcccagtccactacacagatgtcagcaacatgtctagactggccagacagagactgctgggaagaagctggtccgtccctgtgatcagacacctgttcgcccctctgaaggagtacttcgcctgcgtgagcagcggcaacagcaacgccaacagccggggccccagcttctctagcggcctggtgccactgtccctgagagggagccacatgggccccatggagatctacaaaaccgtgagcgcctggaagcggcagcctgtgcgcgtgctgagcctgtttcggaatatcgataaagtcctgaaaagcctgggattcctggagagcggctctggctccggcggtggcaccctgaagtacgtggaggatgtgacaaacgtggtcagacgggatgtggagaagtggggccccttcgatctggtgtacggcagcacccaacccctgggcagctcttgtgaccggtgccctggctggtacatgtttcagttccaccggatcctgcagtacgccctgccgagacaggagtcccagcggccattcttttggattttcatggacaacttgctgctgaccgaggatgaccaggaaactaccactcggttcctgcagaccgaagccgtgaccctgcaggacgtgagaggccgggactaccagaacgccatgcgggtgtggtccaacatccctggactgaaaagcaagcacgcacctctgacccctaaagaagaggagtacctgcaggcccaggtgcggagcagaagcaagctggacgcccctaaggtggatctgctggtgaagaattgcctcctgcccctgagagagtacttcaagtatttcagccagaatagtctgcccctgggcggcccaagcagcggcgcccctcctcccagcggcggcagcccagccggctccccaacctctaccgaggagggcacctctgagtccgccacccccgagagcggccctggcacctccaccgagcccagcgagggcagcgcacccggcagccctgccggcagccccacctccacagaggagggaaccagcaccgagcccagcgaaggcagcgccccaggcaccagcaccgagcctagtgagggcggctctggcggcggcagcgcccaggagattaaacggatcaacaagatcagaagaagacttgtgaaagacagcaacaccaagaaggccggcaagacaggccccatgaaaaccctgctggttagagtgatgacacccgatctgagagagcggctggaaaacctgagaaagaagcctgaaaatatcccccagcccatcagcaatacatctagagccaacctgaataagctgctgaccgattacaccgaaatgaagaaggcgatcctgcatgtgtactgggaagagttccagaaggaccctgtgggcctgatgagccgggtggcccagcctgccagcaagaagatcgatcagaacaagctgaaacctgagatggacgagaagggcaacctgaccaccgccggctttgcctgctctcagtgtggccagcccctgttcgtgtacaagctggagcaggtgtctgagaagggcaaggcttacaccaactacttcggacggtgcaatgtggccgagcacgaaaagctgatcctgctggcccagctgaagcccgagaaggatagcgacgaagccgtgacatatagcctgggaaagtttgggcagagggccctggatttctacagcattcatgtgaccaaggagtccacccaccccgtgaagcccctggcccagatcgccggaaacagatacgcctccggacctgtgggaaaggccctgagcgacgcatgtatgggcacaatcgcctccttcctgtctaagtaccaggacatcatcatcgaacaccagaaggtggtgaagggcaaccagaagagactggagagcctgcgggagctggccggcaaggaaaacctggaataccctagcgtgaccctgccacctcagcctcacaccaaggagggcgttgatgcctacaacgaagtgatcgcccgggtgcgaatgtgggtgaacctgaacctgtggcagaagctgaagctaagcagagatgatgccaagcctctgctgagactgaagggattcccttcctttcctctggtcgagagacaggccaacgaagtggactggtgggacatggtgtgtaacgtgaagaagctgatcaacgagaaaaaggaggatggcaaggtgttttggcagaatctggctggctacaagagacaggaagccctgagaccatacctgagcagcgaggaagatcggaagaagggaaagaaattcgctcggtaccagctgggcgacctgctgctgcacctggaaaagaagcacggcgaggactggggaaaggtgtacgacgaggcctgggagcggattgacaagaaagtggaaggcctgagcaagcacatcaagctggaagaggaacggagaagcgaggacgcccagagcaaggccgccctgaccgactggctgcgggctaaggccagcttcgtgatcgagggcctgaaggaggccgacaaggacgagttctgcagatgcgagctgaagctgcagaagtggtacggggacctgcggggaaagcccttcgccatcgaagccgagaacagcatcctggacatcagcggcttcagcaagcagtacaactgtgccttcatctggcagaaggacggcgtgaagaagctgaacctgtacctgatcatcaactacttcaagggcggcaagctgcggttcaagaagatcaaacctgaagccttcgaagccaacagattctacaccgtgatcaacaaaaagagcggcgagatcgtgcccatggaggtgaacttcaacttcgacgaccccaacctgatcatcctgcctctggcctttggcaagagacagggcagagaattcatctggaacgacctgctgtccctggaaaccggcagcctgaagctggccaacggaagagtgatcgagaagacactgtacaacagaagaacccggcaggatgagcctgccctgttcgtggccctgaccttcgagcggcgggaggtcctggactcctccaatatcaaaccaatgaacctgatcggcgtggcaagaggcgaaaacatccccgccgtgatcgccctgaccgaccccgagggctgcccactgagccggtttaaggatagcctgggaaacccaacccacatcctgagaatcggcgagagctataaggagaagcagcggaccatccaggccaagaaggaggtggagcagcggagagccggcggctacagccggaagtacgccagcaaagccaagaatctggcagacgatatggtgagaaacaccgctagagatctgctgtactacgccgtgacccaggatgccatgctgatcttcgccaacctgagccggggcttcggccggcagggcaagcggaccttcatggccgagagacagtacacacggatggaggactggctgaccgccaagctggcctacgagggcctgagcaagacctacctgtccaagacactggcccagtacacctccaagacatgcagcaactgtgggtttaccatcaccagcgccgactacgacagggtgctggagaagctgaagaagacagcaacaggctggatgaccacaattaacggcaaggagctgaaggtggagggccagattacctactacaacagatacaagagacagaacgtagtcaaggacctgtccgtcgagctggatagactgagcgaagaatctgtgaacaacgacatctcctcctggacaaagggcagaagcggagaagctctgagcctcctgaagaaaagattctcccatagacccgtgcaggagaagttcgtgtgcctgaactgcggcttcgagacacacgcagccgagcaagccgccctgaacatcgccagatcctggctgttcctgcggagccaggagtacaagaaataccagacaaacaagacaaccggcaacaccgataagagagccttcgtcgagacctggcagtccttttaccggaagaagcttaaggaggtgtggaaacctgccgtgcggtctggcggatctggcggaggctccacaagcgaggccctgcccgtggtgttcgaggacgtggccgtgtacttcaccagggaggagtggggcatgctggacaagaggcagaaggagctgtacagggacgtgatgaggatgaactacgagctgctggccagcctgggccccgccgccgccaagcccgacctgatcagcaagctggagaggaggaccgccccctggatcaaggaccccaacggccccaagctgggcaagggctgcccccccggcaagaccagccccaagaaaaagagaaaagtctaagctgccttctgcggggcttgccttctggccatgcccttcttctctcccttgcacctgtacctcttggtctttgaataaagcctgagtaggaaggctagcaaaaaaaaaaaaaaaaaaaaaaaaaaaaaaaaaaaaaaaaaaaaaaaaaaaaaaaaaaaaaaaaaaaaaaaaaaaaaaaa

SEQ ID NO: 3652 - RNA, 5419 nt, synthetic construct
  source 1..5419: mol_type = other RNA
aggaaataagagagaaaagaagagtaagaagaaatataagagccaccatggcccctaagaagaagcgtaaagtgagccgggtgaacggcagcggcagcggcggcggcatgaaccacgaccaggagttcgacccccctaaggtgtaccctcccgtccccgccgagaagagaaagcccatccgggtcctgagcctgttcgatggcatcgccaccggtctgctggtgctgaaggacctgggcatccaggtggataggtacattgcctccgaggtgtgcgaggactccatcaccgtgggaatggtgcgtcatcagggcaagatcatgtacgtgggcgacgtgcggagcgtgacacagaagcatatccaggagtggggccctttcgacctggtgatcggcggcagcccttgcaatgacctgagcatcgtgaacccagcccggaagggcctgtacgagggaaccggcagactgttcttcgagttttacagactgctgcacgacgcccggcctaaggaaggcgacgaccggcccttcttttggctgttcgagaatgtggtggccatgggagtcagcgacaagcgggatattagccggttcctggagagcaaccccgtgatgatcgatgccaaggaagtgagcgccgcccaccgggccagatacttctggggcaatctgcctggcatgaacagacccctggccagcaccgtgaacgacaagctggagctgcaggagtgcctggagcacggccggatcgccaagttcagcaaggtgagaaccatcaccacccgaagcaacagcatcaaacaaggcaaggaccagcactttcctgtgttcatgaacgagaaggaggacatcctgtggtgtaccgagatggagagagtgttcgggttcccagtccactacacagatgtcagcaacatgtctagactggccagacagagactgctgggaagaagctggtccgtccctgtgatcagacacctgttcgcccctctgaaggagtacttcgcctgcgtgagcagcggcaacagcaacgccaacagccggggccccagcttctctagcggcctggtgccactgtccctgagagggagccacatgggccccatggagatctacaaaaccgtgagcgcctggaagcggcagcctgtgcgcgtgctgagcctgtttcggaatatcgataaagtcctgaaaagcctgggattcctggagagcggctctggctccggcggtggcaccctgaagtacgtggaggatgtgacaaacgtggtcagacgggatgtggagaagtggggccccttcgatctggtgtacggcagcacccaacccctgggcagctcttgtgaccggtgccctggctggtacatgtttcagttccaccggatcctgcagtacgccctgccgagacaggagtcccagcggccattcttttggattttcatggacaacttgctgctgaccgaggatgaccaggaaactaccactcggttcctgcagaccgaagccgtgaccctgcaggacgtgagaggccgggactaccagaacgccatgcgggtgtggtccaacatccctggactgaaaagcaagcacgcacctctgacccctaaagaagaggagtacctgcaggcccaggtgcggagcagaagcaagctggacgcccctaaggtggatctgctggtgaagaattgcctcctgcccctgagagagtacttcaagtatttcagccagaatagtctgcccctgggcggcccaagcagcggcgcccctcctcccagcggcggcagcccagccggctccccaacctctaccgaggagggcacctctgagtccgccacccccgagagcggccctggcacctccaccgagcccagcgagggcagcgcacccggcagccctgccggcagccccacctccacagaggagggaaccagcaccgagcccagcgaaggcagcgccccaggcaccagcaccgagcctagtgagggcggctctggcggcggcagcgcccaggagattaaacggatcaacaagatcagaagaagacttgtgaaagacagcaacaccaagaaggccggcaagacaggccccatgaaaaccctgctggttagagtgatgacacccgatctgagagagcggctggaaaacctgagaaagaagcctgaaaatatcccccagcccatcagcaatacatctagagccaacctgaataagctgctgaccgattacaccgaaatgaagaaggcgatcctgcatgtgtactgggaagagttccagaaggaccctgtgggcctgatgagccgggtggcccagcctgccagcaagaagatcgatcagaacaagctgaaacctgagatggacgagaagggcaacctgaccaccgccggctttgcctgctctcagtgtggccagcccctgttcgtgtacaagctggagcaggtgtctgagaagggcaaggcttacaccaactacttcggacggtgcaatgtggccgagcacgaaaagctgatcctgctggcccagctgaagcccgagaaggatagcgacgaagccgtgacatatagcctgggaaagtttgggcagagggccctggatttctacagcattcatgtgaccaaggagtccacccaccccgtgaagcccctggcccagatcgccggaaacagatacgcctccggacctgtgggaaaggccctgagcgacgcatgtatgggcacaatcgcctccttcctgtctaagtaccaggacatcatcatcgaacaccagaaggtggtgaagggcaaccagaagagactggagagcctgcgggagctggccggcaaggaaaacctggaataccctagcgtgaccctgccacctcagcctcacaccaaggagggcgttgatgcctacaacgaagtgatcgcccgggtgcgaatgtgggtgaacctgaacctgtggcagaagctgaagctaagcagagatgatgccaagcctctgctgagactgaagggattcccttcctttcctctggtcgagagacaggccaacgaagtggactggtgggacatggtgtgtaacgtgaagaagctgatcaacgagaaaaaggaggatggcaaggtgttttggcagaatctggctggctacaagagacaggaagccctgagaccatacctgagcagcgaggaagatcggaagaagggaaagaaattcgctcggtaccagctgggcgacctgctgctgcacctggaaaagaagcacggcgaggactggggaaaggtgtacgacgaggcctgggagcggattgacaagaaagtggaaggcctgagcaagcacatcaagctggaagaggaacggagaagcgaggacgcccagagcaaggccgccctgaccgactggctgcgggctaaggccagcttcgtgatcgagggcctgaaggaggccgacaaggacgagttctgcagatgcgagctgaagctgcagaagtggtacggggacctgcggggaaagcccttcgccatcgaagccgagaacagcatcctggacatcagcggcttcagcaagcagtacaactgtgccttcatctggcagaaggacggcgtgaagaagctgaacctgtacctgatcatcaactacttcaagggcggcaagctgcggttcaagaagatcaaacctgaagccttcgaagccaacagattctacaccgtgatcaacaaaaagagcggcgagatcgtgcccatggaggtgaacttcaacttcgacgaccccaacctgatcatcctgcctctggcctttggcaagagacagggcagagaattcatctggaacgacctgctgtccctggaaaccggcagcctgaagctggccaacggaagagtgatcgagaagacactgtacaacagaagaacccggcaggatgagcctgccctgttcgtggccctgaccttcgagcggcgggaggtcctggactcctccaatatcaaaccaatgaacctgatcggcgtggcaagaggcgaaaacatccccgccgtgatcgccctgaccgaccccgagggctgcccactgagccggtttaaggatagcctgggaaacccaacccacatcctgagaatcggcgagagctataaggagaagcagcggaccatccaggccaagaaggaggtggagcagcggagagccggcggctacagccggaagtacgccagcaaagccaagaatctggcagacgatatggtgagaaacaccgctagagatctgctgtactacgccgtgacccaggatgccatgctgatcttcgccaacctgagccggggcttcggccggcagggcaagcggaccttcatggccgagagacagtacacacggatggaggactggctgaccgccaagctggcctacgagggcctgagcaagacctacctgtccaagacactggcccagtacacctccaagacatgcagcaactgtgggtttaccatcaccagcgccgactacgacagggtgctggagaagctgaagaagacagcaacaggctggatgaccacaattaacggcaaggagctgaaggtggagggccagattacctactacaacagatacaagagacagaacgtagtcaaggacctgtccgtcgagctggatagactgagcgaagaatctgtgaacaacgacatctcctcctggacaaagggcagaagcggagaagctctgagcctcctgaagaaaagattctcccatagacccgtgcaggagaagttcgtgtgcctgaactgcggcttcgagacacacgcagccgagcaagccgccctgaacatcgccagatcctggctgttcctgcggagccaggagtacaagaaataccagacaaacaagacaaccggcaacaccgataagagagccttcgtcgagacctggcagtccttttaccggaagaagcttaaggaggtgtggaaacctgccgtgcggtctggcggatctggcggaggctccacaagcaagcaggtgagcatcagcttcgaggacgtgaccgtggacttcagcagggaggagtggcagcacctggaccccgcccagaggtgcctgtacagggacgtgaccctggagaactacagccacctgctgagcgtgggctaccaggtgcccaagcccgagatcatcttccagctggagcagggcgagggcccctggatgctggagagggagaccccccaccagagctgcagcgacgaggacatcggcaccagccccaagaaaaagagaaaagtctaagctgccttctgcggggcttgccttctggccatgcccttcttctctcccttgcacctgtacctcttggtctttgaataaagcctgagtaggaaggctagcaaaaaaaaaaaaaaaaaaaaaaaaaaaaaaaaaaaaaaaaaaaaaaaaaaaaaaaaaaaaaaaaaaaaaaaaaaaaaaaa

SEQ ID NO: 3653 - RNA, 5419 nt, synthetic construct
  source 1..5419: mol_type = other RNA
aggaaataagagagaaaagaagagtaagaagaaatataagagccaccatggcccctaagaagaagcgtaaagtgagccgggtgaacggcagcggcagcggcggcggcatgaaccacgaccaggagttcgacccccctaaggtgtaccctcccgtccccgccgagaagagaaagcccatccgggtcctgagcctgttcgatggcatcgccaccggtctgctggtgctgaaggacctgggcatccaggtggataggtacattgcctccgaggtgtgcgaggactccatcaccgtgggaatggtgcgtcatcagggcaagatcatgtacgtgggcgacgtgcggagcgtgacacagaagcatatccaggagtggggccctttcgacctggtgatcggcggcagcccttgcaatgacctgagcatcgtgaacccagcccggaagggcctgtacgagggaaccggcagactgttcttcgagttttacagactgctgcacgacgcccggcctaaggaaggcgacgaccggcccttcttttggctgttcgagaatgtggtggccatgggagtcagcgacaagcgggatattagccggttcctggagagcaaccccgtgatgatcgatgccaaggaagtgagcgccgcccaccgggccagatacttctggggcaatctgcctggcatgaacagacccctggccagcaccgtgaacgacaagctggagctgcaggagtgcctggagcacggccggatcgccaagttcagcaaggtgagaaccatcaccacccgaagcaacagcatcaaacaaggcaaggaccagcactttcctgtgttcatgaacgagaaggaggacatcctgtggtgtaccgagatggagagagtgttcgggttcccagtccactacacagatgtcagcaacatgtctagactggccagacagagactgctgggaagaagctggtccgtccctgtgatcagacacctgttcgcccctctgaaggagtacttcgcctgcgtgagcagcggcaacagcaacgccaacagccggggccccagcttctctagcggcctggtgccactgtccctgagagggagccacatgggccccatggagatctacaaaaccgtgagcgcctggaagcggcagcctgtgcgcgtgctgagcctgtttcggaatatcgataaagtcctgaaaagcctgggattcctggagagcggctctggctccggcggtggcaccctgaagtacgtggaggatgtgacaaacgtggtcagacgggatgtggagaagtggggccccttcgatctggtgtacggcagcacccaacccctgggcagctcttgtgaccggtgccctggctggtacatgtttcagttccaccggatcctgcagtacgccctgccgagacaggagtcccagcggccattcttttggattttcatggacaacttgctgctgaccgaggatgaccaggaaactaccactcggttcctgcagaccgaagccgtgaccctgcaggacgtgagaggccgggactaccagaacgccatgcgggtgtggtccaacatccctggactgaaaagcaagcacgcacctctgacccctaaagaagaggagtacctgcaggcccaggtgcggagcagaagcaagctggacgcccctaaggtggatctgctggtgaagaattgcctcctgcccctgagagagtacttcaagtatttcagccagaatagtctgcccctgggcggcccaagcagcggcgcccctcctcccagcggcggcagcccagccggctccccaacctctaccgaggagggcacctctgagtccgccacccccgagagcggccctggcacctccaccgagcccagcgagggcagcgcacccggcagccctgccggcagccccacctccacagaggagggaaccagcaccgagcccagcgaaggcagcgccccaggcaccagcaccgagcctagtgagggcggctctggcggcggcagcgcccaggagattaaacggatcaacaagatcagaagaagacttgtgaaagacagcaacaccaagaaggccggcaagacaggccccatgaaaaccctgctggttagagtgatgacacccgatctgagagagcggctggaaaacctgagaaagaagcctgaaaatatcccccagcccatcagcaatacatctagagccaacctgaataagctgctgaccgattacaccgaaatgaagaaggcgatcctgcatgtgtactgggaagagttccagaaggaccctgtgggcctgatgagccgggtggcccagcctgccagcaagaagatcgatcagaacaagctgaaacctgagatggacgagaagggcaacctgaccaccgccggctttgcctgctctcagtgtggccagcccctgttcgtgtacaagctggagcaggtgtctgagaagggcaaggcttacaccaactacttcggacggtgcaatgtggccgagcacgaaaagctgatcctgctggcccagctgaagcccgagaaggatagcgacgaagccgtgacatatagcctgggaaagtttgggcagagggccctggatttctacagcattcatgtgaccaaggagtccacccaccccgtgaagcccctggcccagatcgccggaaacagatacgcctccggacctgtgggaaaggccctgagcgacgcatgtatgggcacaatcgcctccttcctgtctaagtaccaggacatcatcatcgaacaccagaaggtggtgaagggcaaccagaagagactggagagcctgcgggagctggccggcaaggaaaacctggaataccctagcgtgaccctgccacctcagcctcacaccaaggagggcgttgatgcctacaacgaagtgatcgcccgggtgcgaatgtgggtgaacctgaacctgtggcagaagctgaagctaagcagagatgatgccaagcctctgctgagactgaagggattcccttcctttcctctggtcgagagacaggccaacgaagtggactggtgggacatggtgtgtaacgtgaagaagctgatcaacgagaaaaaggaggatggcaaggtgttttggcagaatctggctggctacaagagacaggaagccctgagaccatacctgagcagcgaggaagatcggaagaagggaaagaaattcgctcggtaccagctgggcgacctgctgctgcacctggaaaagaagcacggcgaggactggggaaaggtgtacgacgaggcctgggagcggattgacaagaaagtggaaggcctgagcaagcacatcaagctggaagaggaacggagaagcgaggacgcccagagcaaggccgccctgaccgactggctgcgggctaaggccagcttcgtgatcgagggcctgaaggaggccgacaaggacgagttctgcagatgcgagctgaagctgcagaagtggtacggggacctgcggggaaagcccttcgccatcgaagccgagaacagcatcctggacatcagcggcttcagcaagcagtacaactgtgccttcatctggcagaaggacggcgtgaagaagctgaacctgtacctgatcatcaactacttcaagggcggcaagctgcggttcaagaagatcaaacctgaagccttcgaagccaacagattctacaccgtgatcaacaaaaagagcggcgagatcgtgcccatggaggtgaacttcaacttcgacgaccccaacctgatcatcctgcctctggcctttggcaagagacagggcagagaattcatctggaacgacctgctgtccctggaaaccggcagcctgaagctggccaacggaagagtgatcgagaagacactgtacaacagaagaacccggcaggatgagcctgccctgttcgtggccctgaccttcgagcggcgggaggtcctggactcctccaatatcaaaccaatgaacctgatcggcgtggcaagaggcgaaaacatccccgccgtgatcgccctgaccgaccccgagggctgcccactgagccggtttaaggatagcctgggaaacccaacccacatcctgagaatcggcgagagctataaggagaagcagcggaccatccaggccaagaaggaggtggagcagcggagagccggcggctacagccggaagtacgccagcaaagccaagaatctggcagacgatatggtgagaaacaccgctagagatctgctgtactacgccgtgacccaggatgccatgctgatcttcgccaacctgagccggggcttcggccggcagggcaagcggaccttcatggccgagagacagtacacacggatggaggactggctgaccgccaagctggcctacgagggcctgagcaagacctacctgtccaagacactggcccagtacacctccaagacatgcagcaactgtgggtttaccatcaccagcgccgactacgacagggtgctggagaagctgaagaagacagcaacaggctggatgaccacaattaacggcaaggagctgaaggtggagggccagattacctactacaacagatacaagagacagaacgtagtcaaggacctgtccgtcgagctggatagactgagcgaagaatctgtgaacaacgacatctcctcctggacaaagggcagaagcggagaagctctgagcctcctgaagaaaagattctcccatagacccgtgcaggagaagttcgtgtgcctgaactgcggcttcgagacacacgcagccgagcaagccgccctgaacatcgccagatcctggctgttcctgcggagccaggagtacaagaaataccagacaaacaagacaaccggcaacaccgataagagagccttcgtcgagacctggcagtccttttaccggaagaagcttaaggaggtgtggaaacctgccgtgcggtctggcggatctggcggaggctccacaagcagccagtgcctgctgaccttcggcgacgtgagcgtggacttcagccaggaggagtgggagtgcctggacagcgcccagagggccctgtacatcgacgtgatgctggagaactacagcaacctggtgagcgtggagaactacagcacctgcgacaccgtgcaccagcacgtgaacaccggcaaggagagctgccagaggaacaacctgggcgagatgctgaggaaccccagccacgacgccctgaccagccccaagaaaaagagaaaagtctaagctgccttctgcggggcttgccttctggccatgcccttcttctctcccttgcacctgtacctcttggtctttgaataaagcctgagtaggaaggctagcaaaaaaaaaaaaaaaaaaaaaaaaaaaaaaaaaaaaaaaaaaaaaaaaaaaaaaaaaaaaaaaaaaaaaaaaaaaaaaaa

SEQ ID NO: 3654 - RNA, 5419 nt, synthetic construct
  source 1..5419: mol_type = other RNA
aggaaataagagagaaaagaagagtaagaagaaatataagagccaccatggcccctaagaagaagcgtaaagtgagccgggtgaacggcagcggcagcggcggcggcatgaaccacgaccaggagttcgacccccctaaggtgtaccctcccgtccccgccgagaagagaaagcccatccgggtcctgagcctgttcgatggcatcgccaccggtctgctggtgctgaaggacctgggcatccaggtggataggtacattgcctccgaggtgtgcgaggactccatcaccgtgggaatggtgcgtcatcagggcaagatcatgtacgtgggcgacgtgcggagcgtgacacagaagcatatccaggagtggggccctttcgacctggtgatcggcggcagcccttgcaatgacctgagcatcgtgaacccagcccggaagggcctgtacgagggaaccggcagactgttcttcgagttttacagactgctgcacgacgcccggcctaaggaaggcgacgaccggcccttcttttggctgttcgagaatgtggtggccatgggagtcagcgacaagcgggatattagccggttcctggagagcaaccccgtgatgatcgatgccaaggaagtgagcgccgcccaccgggccagatacttctggggcaatctgcctggcatgaacagacccctggccagcaccgtgaacgacaagctggagctgcaggagtgcctggagcacggccggatcgccaagttcagcaaggtgagaaccatcaccacccgaagcaacagcatcaaacaaggcaaggaccagcactttcctgtgttcatgaacgagaaggaggacatcctgtggtgtaccgagatggagagagtgttcgggttcccagtccactacacagatgtcagcaacatgtctagactggccagacagagactgctgggaagaagctggtccgtccctgtgatcagacacctgttcgcccctctgaaggagtacttcgcctgcgtgagcagcggcaacagcaacgccaacagccggggccccagcttctctagcggcctggtgccactgtccctgagagggagccacatgggccccatggagatctacaaaaccgtgagcgcctggaagcggcagcctgtgcgcgtgctgagcctgtttcggaatatcgataaagtcctgaaaagcctgggattcctggagagcggctctggctccggcggtggcaccctgaagtacgtggaggatgtgacaaacgtggtcagacgggatgtggagaagtggggccccttcgatctggtgtacggcagcacccaacccctgggcagctcttgtgaccggtgccctggctggtacatgtttcagttccaccggatcctgcagtacgccctgccgagacaggagtcccagcggccattcttttggattttcatggacaacttgctgctgaccgaggatgaccaggaaactaccactcggttcctgcagaccgaagccgtgaccctgcaggacgtgagaggccgggactaccagaacgccatgcgggtgtggtccaacatccctggactgaaaagcaagcacgcacctctgacccctaaagaagaggagtacctgcaggcccaggtgcggagcagaagcaagctggacgcccctaaggtggatctgctggtgaagaattgcctcctgcccctgagagagtacttcaagtatttcagccagaatagtctgcccctgggcggcccaagcagcggcgcccctcctcccagcggcggcagcccagccggctccccaacctctaccgaggagggcacctctgagtccgccacccccgagagcggccctggcacctccaccgagcccagcgagggcagcgcacccggcagccctgccggcagccccacctccacagaggagggaaccagcaccgagcccagcgaaggcagcgccccaggcaccagcaccgagcctagtgagggcggctctggcggcggcagcgcccaggagattaaacggatcaacaagatcagaagaagacttgtgaaagacagcaacaccaagaaggccggcaagacaggccccatgaaaaccctgctggttagagtgatgacacccgatctgagagagcggctggaaaacctgagaaagaagcctgaaaatatcccccagcccatcagcaatacatctagagccaacctgaataagctgctgaccgattacaccgaaatgaagaaggcgatcctgcatgtgtactgggaagagttccagaaggaccctgtgggcctgatgagccgggtggcccagcctgccagcaagaagatcgatcagaacaagctgaaacctgagatggacgagaagggcaacctgaccaccgccggctttgcctgctctcagtgtggccagcccctgttcgtgtacaagctggagcaggtgtctgagaagggcaaggcttacaccaactacttcggacggtgcaatgtggccgagcacgaaaagctgatcctgctggcccagctgaagcccgagaaggatagcgacgaagccgtgacatatagcctgggaaagtttgggcagagggccctggatttctacagcattcatgtgaccaaggagtccacccaccccgtgaagcccctggcccagatcgccggaaacagatacgcctccggacctgtgggaaaggccctgagcgacgcatgtatgggcacaatcgcctccttcctgtctaagtaccaggacatcatcatcgaacaccagaaggtggtgaagggcaaccagaagagactggagagcctgcgggagctggccggcaaggaaaacctggaataccctagcgtgaccctgccacctcagcctcacaccaaggagggcgttgatgcctacaacgaagtgatcgcccgggtgcgaatgtgggtgaacctgaacctgtggcagaagctgaagctaagcagagatgatgccaagcctctgctgagactgaagggattcccttcctttcctctggtcgagagacaggccaacgaagtggactggtgggacatggtgtgtaacgtgaagaagctgatcaacgagaaaaaggaggatggcaaggtgttttggcagaatctggctggctacaagagacaggaagccctgagaccatacctgagcagcgaggaagatcggaagaagggaaagaaattcgctcggtaccagctgggcgacctgctgctgcacctggaaaagaagcacggcgaggactggggaaaggtgtacgacgaggcctgggagcggattgacaagaaagtggaaggcctgagcaagcacatcaagctggaagaggaacggagaagcgaggacgcccagagcaaggccgccctgaccgactggctgcgggctaaggccagcttcgtgatcgagggcctgaaggaggccgacaaggacgagttctgcagatgcgagctgaagctgcagaagtggtacggggacctgcggggaaagcccttcgccatcgaagccgagaacagcatcctggacatcagcggcttcagcaagcagtacaactgtgccttcatctggcagaaggacggcgtgaagaagctgaacctgtacctgatcatcaactacttcaagggcggcaagctgcggttcaagaagatcaaacctgaagccttcgaagccaacagattctacaccgtgatcaacaaaaagagcggcgagatcgtgcccatggaggtgaacttcaacttcgacgaccccaacctgatcatcctgcctctggcctttggcaagagacagggcagagaattcatctggaacgacctgctgtccctggaaaccggcagcctgaagctggccaacggaagagtgatcgagaagacactgtacaacagaagaacccggcaggatgagcctgccctgttcgtggccctgaccttcgagcggcgggaggtcctggactcctccaatatcaaaccaatgaacctgatcggcgtggcaagaggcgaaaacatccccgccgtgatcgccctgaccgaccccgagggctgcccactgagccggtttaaggatagcctgggaaacccaacccacatcctgagaatcggcgagagctataaggagaagcagcggaccatccaggccaagaaggaggtggagcagcggagagccggcggctacagccggaagtacgccagcaaagccaagaatctggcagacgatatggtgagaaacaccgctagagatctgctgtactacgccgtgacccaggatgccatgctgatcttcgccaacctgagccggggcttcggccggcagggcaagcggaccttcatggccgagagacagtacacacggatggaggactggctgaccgccaagctggcctacgagggcctgagcaagacctacctgtccaagacactggcccagtacacctccaagacatgcagcaactgtgggtttaccatcaccagcgccgactacgacagggtgctggagaagctgaagaagacagcaacaggctggatgaccacaattaacggcaaggagctgaaggtggagggccagattacctactacaacagatacaagagacagaacgtagtcaaggacctgtccgtcgagctggatagactgagcgaagaatctgtgaacaacgacatctcctcctggacaaagggcagaagcggagaagctctgagcctcctgaagaaaagattctcccatagacccgtgcaggagaagttcgtgtgcctgaactgcggcttcgagacacacgcagccgagcaagccgccctgaacatcgccagatcctggctgttcctgcggagccaggagtacaagaaataccagacaaacaagacaaccggcaacaccgataagagagccttcgtcgagacctggcagtccttttaccggaagaagcttaaggaggtgtggaaacctgccgtgcggtctggcggatctggcggaggctccacaagccagcagggcagcgtgaccttccaggacgtggccgtggacttcagctgggaggagtggggccacctgggccccacccagaaggagctgtacagggaggtgatgctggagaactacggcaacctggtgtgcctgggcctggccgtgagcagccccgacgtggtgtgccagctggagaggggcgagggcccctggatgcccgagggcgacgcccccggcagcagcagggccggcagcagcaagcacaccagccccaagaaaaagagaaaagtctaagctgccttctgcggggcttgccttctggccatgcccttcttctctcccttgcacctgtacctcttggtctttgaataaagcctgagtaggaaggctagcaaaaaaaaaaaaaaaaaaaaaaaaaaaaaaaaaaaaaaaaaaaaaaaaaaaaaaaaaaaaaaaaaaaaaaaaaaaaaaaa

SEQ ID NO: 3655 - RNA, 5419 nt, synthetic construct
  source 1..5419: mol_type = other RNA
aggaaataagagagaaaagaagagtaagaagaaatataagagccaccatggcccctaagaagaagcgtaaagtgagccgggtgaacggcagcggcagcggcggcggcatgaaccacgaccaggagttcgacccccctaaggtgtaccctcccgtccccgccgagaagagaaagcccatccgggtcctgagcctgttcgatggcatcgccaccggtctgctggtgctgaaggacctgggcatccaggtggataggtacattgcctccgaggtgtgcgaggactccatcaccgtgggaatggtgcgtcatcagggcaagatcatgtacgtgggcgacgtgcggagcgtgacacagaagcatatccaggagtggggccctttcgacctggtgatcggcggcagcccttgcaatgacctgagcatcgtgaacccagcccggaagggcctgtacgagggaaccggcagactgttcttcgagttttacagactgctgcacgacgcccggcctaaggaaggcgacgaccggcccttcttttggctgttcgagaatgtggtggccatgggagtcagcgacaagcgggatattagccggttcctggagagcaaccccgtgatgatcgatgccaaggaagtgagcgccgcccaccgggccagatacttctggggcaatctgcctggcatgaacagacccctggccagcaccgtgaacgacaagctggagctgcaggagtgcctggagcacggccggatcgccaagttcagcaaggtgagaaccatcaccacccgaagcaacagcatcaaacaaggcaaggaccagcactttcctgtgttcatgaacgagaaggaggacatcctgtggtgtaccgagatggagagagtgttcgggttcccagtccactacacagatgtcagcaacatgtctagactggccagacagagactgctgggaagaagctggtccgtccctgtgatcagacacctgttcgcccctctgaaggagtacttcgcctgcgtgagcagcggcaacagcaacgccaacagccggggccccagcttctctagcggcctggtgccactgtccctgagagggagccacatgggccccatggagatctacaaaaccgtgagcgcctggaagcggcagcctgtgcgcgtgctgagcctgtttcggaatatcgataaagtcctgaaaagcctgggattcctggagagcggctctggctccggcggtggcaccctgaagtacgtggaggatgtgacaaacgtggtcagacgggatgtggagaagtggggccccttcgatctggtgtacggcagcacccaacccctgggcagctcttgtgaccggtgccctggctggtacatgtttcagttccaccggatcctgcagtacgccctgccgagacaggagtcccagcggccattcttttggattttcatggacaacttgctgctgaccgaggatgaccaggaaactaccactcggttcctgcagaccgaagccgtgaccctgcaggacgtgagaggccgggactaccagaacgccatgcgggtgtggtccaacatccctggactgaaaagcaagcacgcacctctgacccctaaagaagaggagtacctgcaggcccaggtgcggagcagaagcaagctggacgcccctaaggtggatctgctggtgaagaattgcctcctgcccctgagagagtacttcaagtatttcagccagaatagtctgcccctgggcggcccaagcagcggcgcccctcctcccagcggcggcagcccagccggctccccaacctctaccgaggagggcacctctgagtccgccacccccgagagcggccctggcacctccaccgagcccagcgagggcagcgcacccggcagccctgccggcagccccacctccacagaggagggaaccagcaccgagcccagcgaaggcagcgccccaggcaccagcaccgagcctagtgagggcggctctggcggcggcagcgcccaggagattaaacggatcaacaagatcagaagaagacttgtgaaagacagcaacaccaagaaggccggcaagacaggccccatgaaaaccctgctggttagagtgatgacacccgatctgagagagcggctggaaaacctgagaaagaagcctgaaaatatcccccagcccatcagcaatacatctagagccaacctgaataagctgctgaccgattacaccgaaatgaagaaggcgatcctgcatgtgtactgggaagagttccagaaggaccctgtgggcctgatgagccgggtggcccagcctgccagcaagaagatcgatcagaacaagctgaaacctgagatggacgagaagggcaacctgaccaccgccggctttgcctgctctcagtgtggccagcccctgttcgtgtacaagctggagcaggtgtctgagaagggcaaggcttacaccaactacttcggacggtgcaatgtggccgagcacgaaaagctgatcctgctggcccagctgaagcccgagaaggatagcgacgaagccgtgacatatagcctgggaaagtttgggcagagggccctggatttctacagcattcatgtgaccaaggagtccacccaccccgtgaagcccctggcccagatcgccggaaacagatacgcctccggacctgtgggaaaggccctgagcgacgcatgtatgggcacaatcgcctccttcctgtctaagtaccaggacatcatcatcgaacaccagaaggtggtgaagggcaaccagaagagactggagagcctgcgggagctggccggcaaggaaaacctggaataccctagcgtgaccctgccacctcagcctcacaccaaggagggcgttgatgcctacaacgaagtgatcgcccgggtgcgaatgtgggtgaacctgaacctgtggcagaagctgaagctaagcagagatgatgccaagcctctgctgagactgaagggattcccttcctttcctctggtcgagagacaggccaacgaagtggactggtgggacatggtgtgtaacgtgaagaagctgatcaacgagaaaaaggaggatggcaaggtgttttggcagaatctggctggctacaagagacaggaagccctgagaccatacctgagcagcgaggaagatcggaagaagggaaagaaattcgctcggtaccagctgggcgacctgctgctgcacctggaaaagaagcacggcgaggactggggaaaggtgtacgacgaggcctgggagcggattgacaagaaagtggaaggcctgagcaagcacatcaagctggaagaggaacggagaagcgaggacgcccagagcaaggccgccctgaccgactggctgcgggctaaggccagcttcgtgatcgagggcctgaaggaggccgacaaggacgagttctgcagatgcgagctgaagctgcagaagtggtacggggacctgcggggaaagcccttcgccatcgaagccgagaacagcatcctggacatcagcggcttcagcaagcagtacaactgtgccttcatctggcagaaggacggcgtgaagaagctgaacctgtacctgatcatcaactacttcaagggcggcaagctgcggttcaagaagatcaaacctgaagccttcgaagccaacagattctacaccgtgatcaacaaaaagagcggcgagatcgtgcccatggaggtgaacttcaacttcgacgaccccaacctgatcatcctgcctctggcctttggcaagagacagggcagagaattcatctggaacgacctgctgtccctggaaaccggcagcctgaagctggccaacggaagagtgatcgagaagacactgtacaacagaagaacccggcaggatgagcctgccctgttcgtggccctgaccttcgagcggcgggaggtcctggactcctccaatatcaaaccaatgaacctgatcggcgtggcaagaggcgaaaacatccccgccgtgatcgccctgaccgaccccgagggctgcccactgagccggtttaaggatagcctgggaaacccaacccacatcctgagaatcggcgagagctataaggagaagcagcggaccatccaggccaagaaggaggtggagcagcggagagccggcggctacagccggaagtacgccagcaaagccaagaatctggcagacgatatggtgagaaacaccgctagagatctgctgtactacgccgtgacccaggatgccatgctgatcttcgccaacctgagccggggcttcggccggcagggcaagcggaccttcatggccgagagacagtacacacggatggaggactggctgaccgccaagctggcctacgagggcctgagcaagacctacctgtccaagacactggcccagtacacctccaagacatgcagcaactgtgggtttaccatcaccagcgccgactacgacagggtgctggagaagctgaagaagacagcaacaggctggatgaccacaattaacggcaaggagctgaaggtggagggccagattacctactacaacagatacaagagacagaacgtagtcaaggacctgtccgtcgagctggatagactgagcgaagaatctgtgaacaacgacatctcctcctggacaaagggcagaagcggagaagctctgagcctcctgaagaaaagattctcccatagacccgtgcaggagaagttcgtgtgcctgaactgcggcttcgagacacacgcagccgagcaagccgccctgaacatcgccagatcctggctgttcctgcggagccaggagtacaagaaataccagacaaacaagacaaccggcaacaccgataagagagccttcgtcgagacctggcagtccttttaccggaagaagcttaaggaggtgtggaaacctgccgtgcggtctggcggatctggcggaggctccacaagcgccctggagagcgtgaccttcagggacgtggccgtgttcttcagcagggacgagtggctgcacctgaaccccgcccagagggccctgtacagggaggtgatgctggacaactacagcgccctgctgagcctgggcatcctgttcagcaagcccaaggtgatcctgcagctggagcagggcgaggacccctggatggtggagaacggcgtgagccagagcgcctgcctgggctgggagagcctgaccagccccaagaaaaagagaaaagtctaagctgccttctgcggggcttgccttctggccatgcccttcttctctcccttgcacctgtacctcttggtctttgaataaagcctgagtaggaaggctagcaaaaaaaaaaaaaaaaaaaaaaaaaaaaaaaaaaaaaaaaaaaaaaaaaaaaaaaaaaaaaaaaaaaaaaaaaaaaaaaa

SEQ ID NO: 3656 - RNA, 5419 nt, synthetic construct
  source 1..5419: mol_type = other RNA
aggaaataagagagaaaagaagagtaagaagaaatataagagccaccatggcccctaagaagaagcgtaaagtgagccgggtgaacggcagcggcagcggcggcggcatgaaccacgaccaggagttcgacccccctaaggtgtaccctcccgtccccgccgagaagagaaagcccatccgggtcctgagcctgttcgatggcatcgccaccggtctgctggtgctgaaggacctgggcatccaggtggataggtacattgcctccgaggtgtgcgaggactccatcaccgtgggaatggtgcgtcatcagggcaagatcatgtacgtgggcgacgtgcggagcgtgacacagaagcatatccaggagtggggccctttcgacctggtgatcggcggcagcccttgcaatgacctgagcatcgtgaacccagcccggaagggcctgtacgagggaaccggcagactgttcttcgagttttacagactgctgcacgacgcccggcctaaggaaggcgacgaccggcccttcttttggctgttcgagaatgtggtggccatgggagtcagcgacaagcgggatattagccggttcctggagagcaaccccgtgatgatcgatgccaaggaagtgagcgccgcccaccgggccagatacttctggggcaatctgcctggcatgaacagacccctggccagcaccgtgaacgacaagctggagctgcaggagtgcctggagcacggccggatcgccaagttcagcaaggtgagaaccatcaccacccgaagcaacagcatcaaacaaggcaaggaccagcactttcctgtgttcatgaacgagaaggaggacatcctgtggtgtaccgagatggagagagtgttcgggttcccagtccactacacagatgtcagcaacatgtctagactggccagacagagactgctgggaagaagctggtccgtccctgtgatcagacacctgttcgcccctctgaaggagtacttcgcctgcgtgagcagcggcaacagcaacgccaacagccggggccccagcttctctagcggcctggtgccactgtccctgagagggagccacatgggccccatggagatctacaaaaccgtgagcgcctggaagcggcagcctgtgcgcgtgctgagcctgtttcggaatatcgataaagtcctgaaaagcctgggattcctggagagcggctctggctccggcggtggcaccctgaagtacgtggaggatgtgacaaacgtggtcagacgggatgtggagaagtggggccccttcgatctggtgtacggcagcacccaacccctgggcagctcttgtgaccggtgccctggctggtacatgtttcagttccaccggatcctgcagtacgccctgccgagacaggagtcccagcggccattcttttggattttcatggacaacttgctgctgaccgaggatgaccaggaaactaccactcggttcctgcagaccgaagccgtgaccctgcaggacgtgagaggccgggactaccagaacgccatgcgggtgtggtccaacatccctggactgaaaagcaagcacgcacctctgacccctaaagaagaggagtacctgcaggcccaggtgcggagcagaagcaagctggacgcccctaaggtggatctgctggtgaagaattgcctcctgcccctgagagagtacttcaagtatttcagccagaatagtctgcccctgggcggcccaagcagcggcgcccctcctcccagcggcggcagcccagccggctccccaacctctaccgaggagggcacctctgagtccgccacccccgagagcggccctggcacctccaccgagcccagcgagggcagcgcacccggcagccctgccggcagccccacctccacagaggagggaaccagcaccgagcccagcgaaggcagcgccccaggcaccagcaccgagcctagtgagggcggctctggcggcggcagcgcccaggagattaaacggatcaacaagatcagaagaagacttgtgaaagacagcaacaccaagaaggccggcaagacaggccccatgaaaaccctgctggttagagtgatgacacccgatctgagagagcggctggaaaacctgagaaagaagcctgaaaatatcccccagcccatcagcaatacatctagagccaacctgaataagctgctgaccgattacaccgaaatgaagaaggcgatcctgcatgtgtactgggaagagttccagaaggaccctgtgggcctgatgagccgggtggcccagcctgccagcaagaagatcgatcagaacaagctgaaacctgagatggacgagaagggcaacctgaccaccgccggctttgcctgctctcagtgtggccagcccctgttcgtgtacaagctggagcaggtgtctgagaagggcaaggcttacaccaactacttcggacggtgcaatgtggccgagcacgaaaagctgatcctgctggcccagctgaagcccgagaaggatagcgacgaagccgtgacatatagcctgggaaagtttgggcagagggccctggatttctacagcattcatgtgaccaaggagtccacccaccccgtgaagcccctggcccagatcgccggaaacagatacgcctccggacctgtgggaaaggccctgagcgacgcatgtatgggcacaatcgcctccttcctgtctaagtaccaggacatcatcatcgaacaccagaaggtggtgaagggcaaccagaagagactggagagcctgcgggagctggccggcaaggaaaacctggaataccctagcgtgaccctgccacctcagcctcacaccaaggagggcgttgatgcctacaacgaagtgatcgcccgggtgcgaatgtgggtgaacctgaacctgtggcagaagctgaagctaagcagagatgatgccaagcctctgctgagactgaagggattcccttcctttcctctggtcgagagacaggccaacgaagtggactggtgggacatggtgtgtaacgtgaagaagctgatcaacgagaaaaaggaggatggcaaggtgttttggcagaatctggctggctacaagagacaggaagccctgagaccatacctgagcagcgaggaagatcggaagaagggaaagaaattcgctcggtaccagctgggcgacctgctgctgcacctggaaaagaagcacggcgaggactggggaaaggtgtacgacgaggcctgggagcggattgacaagaaagtggaaggcctgagcaagcacatcaagctggaagaggaacggagaagcgaggacgcccagagcaaggccgccctgaccgactggctgcgggctaaggccagcttcgtgatcgagggcctgaaggaggccgacaaggacgagttctgcagatgcgagctgaagctgcagaagtggtacggggacctgcggggaaagcccttcgccatcgaagccgagaacagcatcctggacatcagcggcttcagcaagcagtacaactgtgccttcatctggcagaaggacggcgtgaagaagctgaacctgtacctgatcatcaactacttcaagggcggcaagctgcggttcaagaagatcaaacctgaagccttcgaagccaacagattctacaccgtgatcaacaaaaagagcggcgagatcgtgcccatggaggtgaacttcaacttcgacgaccccaacctgatcatcctgcctctggcctttggcaagagacagggcagagaattcatctggaacgacctgctgtccctggaaaccggcagcctgaagctggccaacggaagagtgatcgagaagacactgtacaacagaagaacccggcaggatgagcctgccctgttcgtggccctgaccttcgagcggcgggaggtcctggactcctccaatatcaaaccaatgaacctgatcggcgtggcaagaggcgaaaacatccccgccgtgatcgccctgaccgaccccgagggctgcccactgagccggtttaaggatagcctgggaaacccaacccacatcctgagaatcggcgagagctataaggagaagcagcggaccatccaggccaagaaggaggtggagcagcggagagccggcggctacagccggaagtacgccagcaaagccaagaatctggcagacgatatggtgagaaacaccgctagagatctgctgtactacgccgtgacccaggatgccatgctgatcttcgccaacctgagccggggcttcggccggcagggcaagcggaccttcatggccgagagacagtacacacggatggaggactggctgaccgccaagctggcctacgagggcctgagcaagacctacctgtccaagacactggcccagtacacctccaagacatgcagcaactgtgggtttaccatcaccagcgccgactacgacagggtgctggagaagctgaagaagacagcaacaggctggatgaccacaattaacggcaaggagctgaaggtggagggccagattacctactacaacagatacaagagacagaacgtagtcaaggacctgtccgtcgagctggatagactgagcgaagaatctgtgaacaacgacatctcctcctggacaaagggcagaagcggagaagctctgagcctcctgaagaaaagattctcccatagacccgtgcaggagaagttcgtgtgcctgaactgcggcttcgagacacacgcagccgagcaagccgccctgaacatcgccagatcctggctgttcctgcggagccaggagtacaagaaataccagacaaacaagacaaccggcaacaccgataagagagccttcgtcgagacctggcagtccttttaccggaagaagcttaaggaggtgtggaaacctgccgtgcggtctggcggatctggcggaggctccacaagcagccaggacctggtgaccttcaaggacgtggccatcgacttcagccaggaggagtgggagtggctgaaccccgcccagaggaacctgtacaagaacatgatgctggagaactaccagaacctggtgagcctgggcctgtgcatcagcaagccctacgtgatcagcctgctggagcagggcaagggcccctgggagatgaagaccgagatgaccaggagccccttccccgacagcggcagcgtgaccagccccaagaaaaagagaaaagtctaagctgccttctgcggggcttgccttctggccatgcccttcttctctcccttgcacctgtacctcttggtctttgaataaagcctgagtaggaaggctagcaaaaaaaaaaaaaaaaaaaaaaaaaaaaaaaaaaaaaaaaaaaaaaaaaaaaaaaaaaaaaaaaaaaaaaaaaaaaaaaa

SEQ ID NO: 3657 - RNA, 5419 nt, synthetic construct
  source 1..5419: mol_type = other RNA
aggaaataagagagaaaagaagagtaagaagaaatataagagccaccatggcccctaagaagaagcgtaaagtgagccgggtgaacggcagcggcagcggcggcggcatgaaccacgaccaggagttcgacccccctaaggtgtaccctcccgtccccgccgagaagagaaagcccatccgggtcctgagcctgttcgatggcatcgccaccggtctgctggtgctgaaggacctgggcatccaggtggataggtacattgcctccgaggtgtgcgaggactccatcaccgtgggaatggtgcgtcatcagggcaagatcatgtacgtgggcgacgtgcggagcgtgacacagaagcatatccaggagtggggccctttcgacctggtgatcggcggcagcccttgcaatgacctgagcatcgtgaacccagcccggaagggcctgtacgagggaaccggcagactgttcttcgagttttacagactgctgcacgacgcccggcctaaggaaggcgacgaccggcccttcttttggctgttcgagaatgtggtggccatgggagtcagcgacaagcgggatattagccggttcctggagagcaaccccgtgatgatcgatgccaaggaagtgagcgccgcccaccgggccagatacttctggggcaatctgcctggcatgaacagacccctggccagcaccgtgaacgacaagctggagctgcaggagtgcctggagcacggccggatcgccaagttcagcaaggtgagaaccatcaccacccgaagcaacagcatcaaacaaggcaaggaccagcactttcctgtgttcatgaacgagaaggaggacatcctgtggtgtaccgagatggagagagtgttcgggttcccagtccactacacagatgtcagcaacatgtctagactggccagacagagactgctgggaagaagctggtccgtccctgtgatcagacacctgttcgcccctctgaaggagtacttcgcctgcgtgagcagcggcaacagcaacgccaacagccggggccccagcttctctagcggcctggtgccactgtccctgagagggagccacatgggccccatggagatctacaaaaccgtgagcgcctggaagcggcagcctgtgcgcgtgctgagcctgtttcggaatatcgataaagtcctgaaaagcctgggattcctggagagcggctctggctccggcggtggcaccctgaagtacgtggaggatgtgacaaacgtggtcagacgggatgtggagaagtggggccccttcgatctggtgtacggcagcacccaacccctgggcagctcttgtgaccggtgccctggctggtacatgtttcagttccaccggatcctgcagtacgccctgccgagacaggagtcccagcggccattcttttggattttcatggacaacttgctgctgaccgaggatgaccaggaaactaccactcggttcctgcagaccgaagccgtgaccctgcaggacgtgagaggccgggactaccagaacgccatgcgggtgtggtccaacatccctggactgaaaagcaagcacgcacctctgacccctaaagaagaggagtacctgcaggcccaggtgcggagcagaagcaagctggacgcccctaaggtggatctgctggtgaagaattgcctcctgcccctgagagagtacttcaagtatttcagccagaatagtctgcccctgggcggcccaagcagcggcgcccctcctcccagcggcggcagcccagccggctccccaacctctaccgaggagggcacctctgagtccgccacccccgagagcggccctggcacctccaccgagcccagcgagggcagcgcacccggcagccctgccggcagccccacctccacagaggagggaaccagcaccgagcccagcgaaggcagcgccccaggcaccagcaccgagcctagtgagggcggctctggcggcggcagcgcccaggagattaaacggatcaacaagatcagaagaagacttgtgaaagacagcaacaccaagaaggccggcaagacaggccccatgaaaaccctgctggttagagtgatgacacccgatctgagagagcggctggaaaacctgagaaagaagcctgaaaatatcccccagcccatcagcaatacatctagagccaacctgaataagctgctgaccgattacaccgaaatgaagaaggcgatcctgcatgtgtactgggaagagttccagaaggaccctgtgggcctgatgagccgggtggcccagcctgccagcaagaagatcgatcagaacaagctgaaacctgagatggacgagaagggcaacctgaccaccgccggctttgcctgctctcagtgtggccagcccctgttcgtgtacaagctggagcaggtgtctgagaagggcaaggcttacaccaactacttcggacggtgcaatgtggccgagcacgaaaagctgatcctgctggcccagctgaagcccgagaaggatagcgacgaagccgtgacatatagcctgggaaagtttgggcagagggccctggatttctacagcattcatgtgaccaaggagtccacccaccccgtgaagcccctggcccagatcgccggaaacagatacgcctccggacctgtgggaaaggccctgagcgacgcatgtatgggcacaatcgcctccttcctgtctaagtaccaggacatcatcatcgaacaccagaaggtggtgaagggcaaccagaagagactggagagcctgcgggagctggccggcaaggaaaacctggaataccctagcgtgaccctgccacctcagcctcacaccaaggagggcgttgatgcctacaacgaagtgatcgcccgggtgcgaatgtgggtgaacctgaacctgtggcagaagctgaagctaagcagagatgatgccaagcctctgctgagactgaagggattcccttcctttcctctggtcgagagacaggccaacgaagtggactggtgggacatggtgtgtaacgtgaagaagctgatcaacgagaaaaaggaggatggcaaggtgttttggcagaatctggctggctacaagagacaggaagccctgagaccatacctgagcagcgaggaagatcggaagaagggaaagaaattcgctcggtaccagctgggcgacctgctgctgcacctggaaaagaagcacggcgaggactggggaaaggtgtacgacgaggcctgggagcggattgacaagaaagtggaaggcctgagcaagcacatcaagctggaagaggaacggagaagcgaggacgcccagagcaaggccgccctgaccgactggctgcgggctaaggccagcttcgtgatcgagggcctgaaggaggccgacaaggacgagttctgcagatgcgagctgaagctgcagaagtggtacggggacctgcggggaaagcccttcgccatcgaagccgagaacagcatcctggacatcagcggcttcagcaagcagtacaactgtgccttcatctggcagaaggacggcgtgaagaagctgaacctgtacctgatcatcaactacttcaagggcggcaagctgcggttcaagaagatcaaacctgaagccttcgaagccaacagattctacaccgtgatcaacaaaaagagcggcgagatcgtgcccatggaggtgaacttcaacttcgacgaccccaacctgatcatcctgcctctggcctttggcaagagacagggcagagaattcatctggaacgacctgctgtccctggaaaccggcagcctgaagctggccaacggaagagtgatcgagaagacactgtacaacagaagaacccggcaggatgagcctgccctgttcgtggccctgaccttcgagcggcgggaggtcctggactcctccaatatcaaaccaatgaacctgatcggcgtggcaagaggcgaaaacatccccgccgtgatcgccctgaccgaccccgagggctgcccactgagccggtttaaggatagcctgggaaacccaacccacatcctgagaatcggcgagagctataaggagaagcagcggaccatccaggccaagaaggaggtggagcagcggagagccggcggctacagccggaagtacgccagcaaagccaagaatctggcagacgatatggtgagaaacaccgctagagatctgctgtactacgccgtgacccaggatgccatgctgatcttcgccaacctgagccggggcttcggccggcagggcaagcggaccttcatggccgagagacagtacacacggatggaggactggctgaccgccaagctggcctacgagggcctgagcaagacctacctgtccaagacactggcccagtacacctccaagacatgcagcaactgtgggtttaccatcaccagcgccgactacgacagggtgctggagaagctgaagaagacagcaacaggctggatgaccacaattaacggcaaggagctgaaggtggagggccagattacctactacaacagatacaagagacagaacgtagtcaaggacctgtccgtcgagctggatagactgagcgaagaatctgtgaacaacgacatctcctcctggacaaagggcagaagcggagaagctctgagcctcctgaagaaaagattctcccatagacccgtgcaggagaagttcgtgtgcctgaactgcggcttcgagacacacgcagccgagcaagccgccctgaacatcgccagatcctggctgttcctgcggagccaggagtacaagaaataccagacaaacaagacaaccggcaacaccgataagagagccttcgtcgagacctggcagtccttttaccggaagaagcttaaggaggtgtggaaacctgccgtgcggtctggcggatctggcggaggctccacaagccagcaggtgcccgtgaccttcgaggacgtggccgtgagcttcagccaggaggagtggaagtacctggacgaggcccagaagaacctgtactgggaggtgatgaaggagaactacgagaccctgatcagcctggacagcgaggtgcaccaggaggaggagagggagaagaaccaggaggagtaccccatgctgtggggcctgatcagcaggcagagcaggaagaaccacgagaaggtgtactggaccagccccaagaaaaagagaaaagtctaagctgccttctgcggggcttgccttctggccatgcccttcttctctcccttgcacctgtacctcttggtctttgaataaagcctgagtaggaaggctagcaaaaaaaaaaaaaaaaaaaaaaaaaaaaaaaaaaaaaaaaaaaaaaaaaaaaaaaaaaaaaaaaaaaaaaaaaaaaaaaa

SEQ ID NO: 3658 - RNA, 5419 nt, synthetic construct
  source 1..5419: mol_type = other RNA
aggaaataagagagaaaagaagagtaagaagaaatataagagccaccatggcccctaagaagaagcgtaaagtgagccgggtgaacggcagcggcagcggcggcggcatgaaccacgaccaggagttcgacccccctaaggtgtaccctcccgtccccgccgagaagagaaagcccatccgggtcctgagcctgttcgatggcatcgccaccggtctgctggtgctgaaggacctgggcatccaggtggataggtacattgcctccgaggtgtgcgaggactccatcaccgtgggaatggtgcgtcatcagggcaagatcatgtacgtgggcgacgtgcggagcgtgacacagaagcatatccaggagtggggccctttcgacctggtgatcggcggcagcccttgcaatgacctgagcatcgtgaacccagcccggaagggcctgtacgagggaaccggcagactgttcttcgagttttacagactgctgcacgacgcccggcctaaggaaggcgacgaccggcccttcttttggctgttcgagaatgtggtggccatgggagtcagcgacaagcgggatattagccggttcctggagagcaaccccgtgatgatcgatgccaaggaagtgagcgccgcccaccgggccagatacttctggggcaatctgcctggcatgaacagacccctggccagcaccgtgaacgacaagctggagctgcaggagtgcctggagcacggccggatcgccaagttcagcaaggtgagaaccatcaccacccgaagcaacagcatcaaacaaggcaaggaccagcactttcctgtgttcatgaacgagaaggaggacatcctgtggtgtaccgagatggagagagtgttcgggttcccagtccactacacagatgtcagcaacatgtctagactggccagacagagactgctgggaagaagctggtccgtccctgtgatcagacacctgttcgcccctctgaaggagtacttcgcctgcgtgagcagcggcaacagcaacgccaacagccggggccccagcttctctagcggcctggtgccactgtccctgagagggagccacatgggccccatggagatctacaaaaccgtgagcgcctggaagcggcagcctgtgcgcgtgctgagcctgtttcggaatatcgataaagtcctgaaaagcctgggattcctggagagcggctctggctccggcggtggcaccctgaagtacgtggaggatgtgacaaacgtggtcagacgggatgtggagaagtggggccccttcgatctggtgtacggcagcacccaacccctgggcagctcttgtgaccggtgccctggctggtacatgtttcagttccaccggatcctgcagtacgccctgccgagacaggagtcccagcggccattcttttggattttcatggacaacttgctgctgaccgaggatgaccaggaaactaccactcggttcctgcagaccgaagccgtgaccctgcaggacgtgagaggccgggactaccagaacgccatgcgggtgtggtccaacatccctggactgaaaagcaagcacgcacctctgacccctaaagaagaggagtacctgcaggcccaggtgcggagcagaagcaagctggacgcccctaaggtggatctgctggtgaagaattgcctcctgcccctgagagagtacttcaagtatttcagccagaatagtctgcccctgggcggcccaagcagcggcgcccctcctcccagcggcggcagcccagccggctccccaacctctaccgaggagggcacctctgagtccgccacccccgagagcggccctggcacctccaccgagcccagcgagggcagcgcacccggcagccctgccggcagccccacctccacagaggagggaaccagcaccgagcccagcgaaggcagcgccccaggcaccagcaccgagcctagtgagggcggctctggcggcggcagcgcccaggagattaaacggatcaacaagatcagaagaagacttgtgaaagacagcaacaccaagaaggccggcaagacaggccccatgaaaaccctgctggttagagtgatgacacccgatctgagagagcggctggaaaacctgagaaagaagcctgaaaatatcccccagcccatcagcaatacatctagagccaacctgaataagctgctgaccgattacaccgaaatgaagaaggcgatcctgcatgtgtactgggaagagttccagaaggaccctgtgggcctgatgagccgggtggcccagcctgccagcaagaagatcgatcagaacaagctgaaacctgagatggacgagaagggcaacctgaccaccgccggctttgcctgctctcagtgtggccagcccctgttcgtgtacaagctggagcaggtgtctgagaagggcaaggcttacaccaactacttcggacggtgcaatgtggccgagcacgaaaagctgatcctgctggcccagctgaagcccgagaaggatagcgacgaagccgtgacatatagcctgggaaagtttgggcagagggccctggatttctacagcattcatgtgaccaaggagtccacccaccccgtgaagcccctggcccagatcgccggaaacagatacgcctccggacctgtgggaaaggccctgagcgacgcatgtatgggcacaatcgcctccttcctgtctaagtaccaggacatcatcatcgaacaccagaaggtggtgaagggcaaccagaagagactggagagcctgcgggagctggccggcaaggaaaacctggaataccctagcgtgaccctgccacctcagcctcacaccaaggagggcgttgatgcctacaacgaagtgatcgcccgggtgcgaatgtgggtgaacctgaacctgtggcagaagctgaagctaagcagagatgatgccaagcctctgctgagactgaagggattcccttcctttcctctggtcgagagacaggccaacgaagtggactggtgggacatggtgtgtaacgtgaagaagctgatcaacgagaaaaaggaggatggcaaggtgttttggcagaatctggctggctacaagagacaggaagccctgagaccatacctgagcagcgaggaagatcggaagaagggaaagaaattcgctcggtaccagctgggcgacctgctgctgcacctggaaaagaagcacggcgaggactggggaaaggtgtacgacgaggcctgggagcggattgacaagaaagtggaaggcctgagcaagcacatcaagctggaagaggaacggagaagcgaggacgcccagagcaaggccgccctgaccgactggctgcgggctaaggccagcttcgtgatcgagggcctgaaggaggccgacaaggacgagttctgcagatgcgagctgaagctgcagaagtggtacggggacctgcggggaaagcccttcgccatcgaagccgagaacagcatcctggacatcagcggcttcagcaagcagtacaactgtgccttcatctggcagaaggacggcgtgaagaagctgaacctgtacctgatcatcaactacttcaagggcggcaagctgcggttcaagaagatcaaacctgaagccttcgaagccaacagattctacaccgtgatcaacaaaaagagcggcgagatcgtgcccatggaggtgaacttcaacttcgacgaccccaacctgatcatcctgcctctggcctttggcaagagacagggcagagaattcatctggaacgacctgctgtccctggaaaccggcagcctgaagctggccaacggaagagtgatcgagaagacactgtacaacagaagaacccggcaggatgagcctgccctgttcgtggccctgaccttcgagcggcgggaggtcctggactcctccaatatcaaaccaatgaacctgatcggcgtggcaagaggcgaaaacatccccgccgtgatcgccctgaccgaccccgagggctgcccactgagccggtttaaggatagcctgggaaacccaacccacatcctgagaatcggcgagagctataaggagaagcagcggaccatccaggccaagaaggaggtggagcagcggagagccggcggctacagccggaagtacgccagcaaagccaagaatctggcagacgatatggtgagaaacaccgctagagatctgctgtactacgccgtgacccaggatgccatgctgatcttcgccaacctgagccggggcttcggccggcagggcaagcggaccttcatggccgagagacagtacacacggatggaggactggctgaccgccaagctggcctacgagggcctgagcaagacctacctgtccaagacactggcccagtacacctccaagacatgcagcaactgtgggtttaccatcaccagcgccgactacgacagggtgctggagaagctgaagaagacagcaacaggctggatgaccacaattaacggcaaggagctgaaggtggagggccagattacctactacaacagatacaagagacagaacgtagtcaaggacctgtccgtcgagctggatagactgagcgaagaatctgtgaacaacgacatctcctcctggacaaagggcagaagcggagaagctctgagcctcctgaagaaaagattctcccatagacccgtgcaggagaagttcgtgtgcctgaactgcggcttcgagacacacgcagccgagcaagccgccctgaacatcgccagatcctggctgttcctgcggagccaggagtacaagaaataccagacaaacaagacaaccggcaacaccgataagagagccttcgtcgagacctggcagtccttttaccggaagaagcttaaggaggtgtggaaacctgccgtgcggtctggcggatctggcggaggctccacaagccccagggagagcgtgaccttcgaggacgtggccgtgaacttcagccacgaggagtggcagtgcctgacccacagccagaggcacctgtacaaggacgtgatgctggagaactacggcaacatggtgagcctgggcttcagcttcagcaagccccccctgatcagctgcctggagcagggcgccgagagctacgtgcaggaccagcaggactgggagttcctgagctgcagctaccccgtgagcaccagccccaagaaaaagagaaaagtctaagctgccttctgcggggcttgccttctggccatgcccttcttctctcccttgcacctgtacctcttggtctttgaataaagcctgagtaggaaggctagcaaaaaaaaaaaaaaaaaaaaaaaaaaaaaaaaaaaaaaaaaaaaaaaaaaaaaaaaaaaaaaaaaaaaaaaaaaaaaaaa

SEQ ID NO: 3659 - RNA, 5419 nt, synthetic construct
  source 1..5419: mol_type = other RNA
aggaaataagagagaaaagaagagtaagaagaaatataagagccaccatggcccctaagaagaagcgtaaagtgagccgggtgaacggcagcggcagcggcggcggcatgaaccacgaccaggagttcgacccccctaaggtgtaccctcccgtccccgccgagaagagaaagcccatccgggtcctgagcctgttcgatggcatcgccaccggtctgctggtgctgaaggacctgggcatccaggtggataggtacattgcctccgaggtgtgcgaggactccatcaccgtgggaatggtgcgtcatcagggcaagatcatgtacgtgggcgacgtgcggagcgtgacacagaagcatatccaggagtggggccctttcgacctggtgatcggcggcagcccttgcaatgacctgagcatcgtgaacccagcccggaagggcctgtacgagggaaccggcagactgttcttcgagttttacagactgctgcacgacgcccggcctaaggaaggcgacgaccggcccttcttttggctgttcgagaatgtggtggccatgggagtcagcgacaagcgggatattagccggttcctggagagcaaccccgtgatgatcgatgccaaggaagtgagcgccgcccaccgggccagatacttctggggcaatctgcctggcatgaacagacccctggccagcaccgtgaacgacaagctggagctgcaggagtgcctggagcacggccggatcgccaagttcagcaaggtgagaaccatcaccacccgaagcaacagcatcaaacaaggcaaggaccagcactttcctgtgttcatgaacgagaaggaggacatcctgtggtgtaccgagatggagagagtgttcgggttcccagtccactacacagatgtcagcaacatgtctagactggccagacagagactgctgggaagaagctggtccgtccctgtgatcagacacctgttcgcccctctgaaggagtacttcgcctgcgtgagcagcggcaacagcaacgccaacagccggggccccagcttctctagcggcctggtgccactgtccctgagagggagccacatgggccccatggagatctacaaaaccgtgagcgcctggaagcggcagcctgtgcgcgtgctgagcctgtttcggaatatcgataaagtcctgaaaagcctgggattcctggagagcggctctggctccggcggtggcaccctgaagtacgtggaggatgtgacaaacgtggtcagacgggatgtggagaagtggggccccttcgatctggtgtacggcagcacccaacccctgggcagctcttgtgaccggtgccctggctggtacatgtttcagttccaccggatcctgcagtacgccctgccgagacaggagtcccagcggccattcttttggattttcatggacaacttgctgctgaccgaggatgaccaggaaactaccactcggttcctgcagaccgaagccgtgaccctgcaggacgtgagaggccgggactaccagaacgccatgcgggtgtggtccaacatccctggactgaaaagcaagcacgcacctctgacccctaaagaagaggagtacctgcaggcccaggtgcggagcagaagcaagctggacgcccctaaggtggatctgctggtgaagaattgcctcctgcccctgagagagtacttcaagtatttcagccagaatagtctgcccctgggcggcccaagcagcggcgcccctcctcccagcggcggcagcccagccggctccccaacctctaccgaggagggcacctctgagtccgccacccccgagagcggccctggcacctccaccgagcccagcgagggcagcgcacccggcagccctgccggcagccccacctccacagaggagggaaccagcaccgagcccagcgaaggcagcgccccaggcaccagcaccgagcctagtgagggcggctctggcggcggcagcgcccaggagattaaacggatcaacaagatcagaagaagacttgtgaaagacagcaacaccaagaaggccggcaagacaggccccatgaaaaccctgctggttagagtgatgacacccgatctgagagagcggctggaaaacctgagaaagaagcctgaaaatatcccccagcccatcagcaatacatctagagccaacctgaataagctgctgaccgattacaccgaaatgaagaaggcgatcctgcatgtgtactgggaagagttccagaaggaccctgtgggcctgatgagccgggtggcccagcctgccagcaagaagatcgatcagaacaagctgaaacctgagatggacgagaagggcaacctgaccaccgccggctttgcctgctctcagtgtggccagcccctgttcgtgtacaagctggagcaggtgtctgagaagggcaaggcttacaccaactacttcggacggtgcaatgtggccgagcacgaaaagctgatcctgctggcccagctgaagcccgagaaggatagcgacgaagccgtgacatatagcctgggaaagtttgggcagagggccctggatttctacagcattcatgtgaccaaggagtccacccaccccgtgaagcccctggcccagatcgccggaaacagatacgcctccggacctgtgggaaaggccctgagcgacgcatgtatgggcacaatcgcctccttcctgtctaagtaccaggacatcatcatcgaacaccagaaggtggtgaagggcaaccagaagagactggagagcctgcgggagctggccggcaaggaaaacctggaataccctagcgtgaccctgccacctcagcctcacaccaaggagggcgttgatgcctacaacgaagtgatcgcccgggtgcgaatgtgggtgaacctgaacctgtggcagaagctgaagctaagcagagatgatgccaagcctctgctgagactgaagggattcccttcctttcctctggtcgagagacaggccaacgaagtggactggtgggacatggtgtgtaacgtgaagaagctgatcaacgagaaaaaggaggatggcaaggtgttttggcagaatctggctggctacaagagacaggaagccctgagaccatacctgagcagcgaggaagatcggaagaagggaaagaaattcgctcggtaccagctgggcgacctgctgctgcacctggaaaagaagcacggcgaggactggggaaaggtgtacgacgaggcctgggagcggattgacaagaaagtggaaggcctgagcaagcacatcaagctggaagaggaacggagaagcgaggacgcccagagcaaggccgccctgaccgactggctgcgggctaaggccagcttcgtgatcgagggcctgaaggaggccgacaaggacgagttctgcagatgcgagctgaagctgcagaagtggtacggggacctgcggggaaagcccttcgccatcgaagccgagaacagcatcctggacatcagcggcttcagcaagcagtacaactgtgccttcatctggcagaaggacggcgtgaagaagctgaacctgtacctgatcatcaactacttcaagggcggcaagctgcggttcaagaagatcaaacctgaagccttcgaagccaacagattctacaccgtgatcaacaaaaagagcggcgagatcgtgcccatggaggtgaacttcaacttcgacgaccccaacctgatcatcctgcctctggcctttggcaagagacagggcagagaattcatctggaacgacctgctgtccctggaaaccggcagcctgaagctggccaacggaagagtgatcgagaagacactgtacaacagaagaacccggcaggatgagcctgccctgttcgtggccctgaccttcgagcggcgggaggtcctggactcctccaatatcaaaccaatgaacctgatcggcgtggcaagaggcgaaaacatccccgccgtgatcgccctgaccgaccccgagggctgcccactgagccggtttaaggatagcctgggaaacccaacccacatcctgagaatcggcgagagctataaggagaagcagcggaccatccaggccaagaaggaggtggagcagcggagagccggcggctacagccggaagtacgccagcaaagccaagaatctggcagacgatatggtgagaaacaccgctagagatctgctgtactacgccgtgacccaggatgccatgctgatcttcgccaacctgagccggggcttcggccggcagggcaagcggaccttcatggccgagagacagtacacacggatggaggactggctgaccgccaagctggcctacgagggcctgagcaagacctacctgtccaagacactggcccagtacacctccaagacatgcagcaactgtgggtttaccatcaccagcgccgactacgacagggtgctggagaagctgaagaagacagcaacaggctggatgaccacaattaacggcaaggagctgaaggtggagggccagattacctactacaacagatacaagagacagaacgtagtcaaggacctgtccgtcgagctggatagactgagcgaagaatctgtgaacaacgacatctcctcctggacaaagggcagaagcggagaagctctgagcctcctgaagaaaagattctcccatagacccgtgcaggagaagttcgtgtgcctgaactgcggcttcgagacacacgcagccgagcaagccgccctgaacatcgccagatcctggctgttcctgcggagccaggagtacaagaaataccagacaaacaagacaaccggcaacaccgataagagagccttcgtcgagacctggcagtccttttaccggaagaagcttaaggaggtgtggaaacctgccgtgcggtctggcggatctggcggaggctccacaagcagcagccagggcctgctgaccttcagggacgtggccatcgagttcagccaggaggagtggggctgcctgaaccacacccagagggagctgtacagggacgtgatgctggagaactacggccacctgctgttcctgggcctgatcgtgagcaagcccgacctggtgagcttcctggagcagaagaaggacccctgggacgtgaagaggaagaagaccgtggccttccaccccggcaggtgggagaccagccccaagaaaaagagaaaagtctaagctgccttctgcggggcttgccttctggccatgcccttcttctctcccttgcacctgtacctcttggtctttgaataaagcctgagtaggaaggctagcaaaaaaaaaaaaaaaaaaaaaaaaaaaaaaaaaaaaaaaaaaaaaaaaaaaaaaaaaaaaaaaaaaaaaaaaaaaaaaaa

SEQ ID NO: 3660 - RNA, 5419 nt, synthetic construct
  source 1..5419: mol_type = other RNA
aggaaataagagagaaaagaagagtaagaagaaatataagagccaccatggcccctaagaagaagcgtaaagtgagccgggtgaacggcagcggcagcggcggcggcatgaaccacgaccaggagttcgacccccctaaggtgtaccctcccgtccccgccgagaagagaaagcccatccgggtcctgagcctgttcgatggcatcgccaccggtctgctggtgctgaaggacctgggcatccaggtggataggtacattgcctccgaggtgtgcgaggactccatcaccgtgggaatggtgcgtcatcagggcaagatcatgtacgtgggcgacgtgcggagcgtgacacagaagcatatccaggagtggggccctttcgacctggtgatcggcggcagcccttgcaatgacctgagcatcgtgaacccagcccggaagggcctgtacgagggaaccggcagactgttcttcgagttttacagactgctgcacgacgcccggcctaaggaaggcgacgaccggcccttcttttggctgttcgagaatgtggtggccatgggagtcagcgacaagcgggatattagccggttcctggagagcaaccccgtgatgatcgatgccaaggaagtgagcgccgcccaccgggccagatacttctggggcaatctgcctggcatgaacagacccctggccagcaccgtgaacgacaagctggagctgcaggagtgcctggagcacggccggatcgccaagttcagcaaggtgagaaccatcaccacccgaagcaacagcatcaaacaaggcaaggaccagcactttcctgtgttcatgaacgagaaggaggacatcctgtggtgtaccgagatggagagagtgttcgggttcccagtccactacacagatgtcagcaacatgtctagactggccagacagagactgctgggaagaagctggtccgtccctgtgatcagacacctgttcgcccctctgaaggagtacttcgcctgcgtgagcagcggcaacagcaacgccaacagccggggccccagcttctctagcggcctggtgccactgtccctgagagggagccacatgggccccatggagatctacaaaaccgtgagcgcctggaagcggcagcctgtgcgcgtgctgagcctgtttcggaatatcgataaagtcctgaaaagcctgggattcctggagagcggctctggctccggcggtggcaccctgaagtacgtggaggatgtgacaaacgtggtcagacgggatgtggagaagtggggccccttcgatctggtgtacggcagcacccaacccctgggcagctcttgtgaccggtgccctggctggtacatgtttcagttccaccggatcctgcagtacgccctgccgagacaggagtcccagcggccattcttttggattttcatggacaacttgctgctgaccgaggatgaccaggaaactaccactcggttcctgcagaccgaagccgtgaccctgcaggacgtgagaggccgggactaccagaacgccatgcgggtgtggtccaacatccctggactgaaaagcaagcacgcacctctgacccctaaagaagaggagtacctgcaggcccaggtgcggagcagaagcaagctggacgcccctaaggtggatctgctggtgaagaattgcctcctgcccctgagagagtacttcaagtatttcagccagaatagtctgcccctgggcggcccaagcagcggcgcccctcctcccagcggcggcagcccagccggctccccaacctctaccgaggagggcacctctgagtccgccacccccgagagcggccctggcacctccaccgagcccagcgagggcagcgcacccggcagccctgccggcagccccacctccacagaggagggaaccagcaccgagcccagcgaaggcagcgccccaggcaccagcaccgagcctagtgagggcggctctggcggcggcagcgcccaggagattaaacggatcaacaagatcagaagaagacttgtgaaagacagcaacaccaagaaggccggcaagacaggccccatgaaaaccctgctggttagagtgatgacacccgatctgagagagcggctggaaaacctgagaaagaagcctgaaaatatcccccagcccatcagcaatacatctagagccaacctgaataagctgctgaccgattacaccgaaatgaagaaggcgatcctgcatgtgtactgggaagagttccagaaggaccctgtgggcctgatgagccgggtggcccagcctgccagcaagaagatcgatcagaacaagctgaaacctgagatggacgagaagggcaacctgaccaccgccggctttgcctgctctcagtgtggccagcccctgttcgtgtacaagctggagcaggtgtctgagaagggcaaggcttacaccaactacttcggacggtgcaatgtggccgagcacgaaaagctgatcctgctggcccagctgaagcccgagaaggatagcgacgaagccgtgacatatagcctgggaaagtttgggcagagggccctggatttctacagcattcatgtgaccaaggagtccacccaccccgtgaagcccctggcccagatcgccggaaacagatacgcctccggacctgtgggaaaggccctgagcgacgcatgtatgggcacaatcgcctccttcctgtctaagtaccaggacatcatcatcgaacaccagaaggtggtgaagggcaaccagaagagactggagagcctgcgggagctggccggcaaggaaaacctggaataccctagcgtgaccctgccacctcagcctcacaccaaggagggcgttgatgcctacaacgaagtgatcgcccgggtgcgaatgtgggtgaacctgaacctgtggcagaagctgaagctaagcagagatgatgccaagcctctgctgagactgaagggattcccttcctttcctctggtcgagagacaggccaacgaagtggactggtgggacatggtgtgtaacgtgaagaagctgatcaacgagaaaaaggaggatggcaaggtgttttggcagaatctggctggctacaagagacaggaagccctgagaccatacctgagcagcgaggaagatcggaagaagggaaagaaattcgctcggtaccagctgggcgacctgctgctgcacctggaaaagaagcacggcgaggactggggaaaggtgtacgacgaggcctgggagcggattgacaagaaagtggaaggcctgagcaagcacatcaagctggaagaggaacggagaagcgaggacgcccagagcaaggccgccctgaccgactggctgcgggctaaggccagcttcgtgatcgagggcctgaaggaggccgacaaggacgagttctgcagatgcgagctgaagctgcagaagtggtacggggacctgcggggaaagcccttcgccatcgaagccgagaacagcatcctggacatcagcggcttcagcaagcagtacaactgtgccttcatctggcagaaggacggcgtgaagaagctgaacctgtacctgatcatcaactacttcaagggcggcaagctgcggttcaagaagatcaaacctgaagccttcgaagccaacagattctacaccgtgatcaacaaaaagagcggcgagatcgtgcccatggaggtgaacttcaacttcgacgaccccaacctgatcatcctgcctctggcctttggcaagagacagggcagagaattcatctggaacgacctgctgtccctggaaaccggcagcctgaagctggccaacggaagagtgatcgagaagacactgtacaacagaagaacccggcaggatgagcctgccctgttcgtggccctgaccttcgagcggcgggaggtcctggactcctccaatatcaaaccaatgaacctgatcggcgtggcaagaggcgaaaacatccccgccgtgatcgccctgaccgaccccgagggctgcccactgagccggtttaaggatagcctgggaaacccaacccacatcctgagaatcggcgagagctataaggagaagcagcggaccatccaggccaagaaggaggtggagcagcggagagccggcggctacagccggaagtacgccagcaaagccaagaatctggcagacgatatggtgagaaacaccgctagagatctgctgtactacgccgtgacccaggatgccatgctgatcttcgccaacctgagccggggcttcggccggcagggcaagcggaccttcatggccgagagacagtacacacggatggaggactggctgaccgccaagctggcctacgagggcctgagcaagacctacctgtccaagacactggcccagtacacctccaagacatgcagcaactgtgggtttaccatcaccagcgccgactacgacagggtgctggagaagctgaagaagacagcaacaggctggatgaccacaattaacggcaaggagctgaaggtggagggccagattacctactacaacagatacaagagacagaacgtagtcaaggacctgtccgtcgagctggatagactgagcgaagaatctgtgaacaacgacatctcctcctggacaaagggcagaagcggagaagctctgagcctcctgaagaaaagattctcccatagacccgtgcaggagaagttcgtgtgcctgaactgcggcttcgagacacacgcagccgagcaagccgccctgaacatcgccagatcctggctgttcctgcggagccaggagtacaagaaataccagacaaacaagacaaccggcaacaccgataagagagccttcgtcgagacctggcagtccttttaccggaagaagcttaaggaggtgtggaaacctgccgtgcggtctggcggatctggcggaggctccacaagcatgctggcccccgtgaccttcgaggacgtgaccgtggtgttcaccgaggccgagtgggtgaccctgagcaccgagcagaagaacctgtacaaggaggtgaccctggagacctacaggaacctgctgagcctggccgagcccacccccgagacctaccccggccccagctgcctgctgcccttcagctgccagcagttcctgagccagcacgtgctgcagatcttccccggcgtgtgcgccgagaccagccccaagaaaaagagaaaagtctaagctgccttctgcggggcttgccttctggccatgcccttcttctctcccttgcacctgtacctcttggtctttgaataaagcctgagtaggaaggctagcaaaaaaaaaaaaaaaaaaaaaaaaaaaaaaaaaaaaaaaaaaaaaaaaaaaaaaaaaaaaaaaaaaaaaaaaaaaaaaaa

SEQ ID NO: 3661 - RNA, 5419 nt, synthetic construct
  source 1..5419: mol_type = other RNA
aggaaataagagagaaaagaagagtaagaagaaatataagagccaccatggcccctaagaagaagcgtaaagtgagccgggtgaacggcagcggcagcggcggcggcatgaaccacgaccaggagttcgacccccctaaggtgtaccctcccgtccccgccgagaagagaaagcccatccgggtcctgagcctgttcgatggcatcgccaccggtctgctggtgctgaaggacctgggcatccaggtggataggtacattgcctccgaggtgtgcgaggactccatcaccgtgggaatggtgcgtcatcagggcaagatcatgtacgtgggcgacgtgcggagcgtgacacagaagcatatccaggagtggggccctttcgacctggtgatcggcggcagcccttgcaatgacctgagcatcgtgaacccagcccggaagggcctgtacgagggaaccggcagactgttcttcgagttttacagactgctgcacgacgcccggcctaaggaaggcgacgaccggcccttcttttggctgttcgagaatgtggtggccatgggagtcagcgacaagcgggatattagccggttcctggagagcaaccccgtgatgatcgatgccaaggaagtgagcgccgcccaccgggccagatacttctggggcaatctgcctggcatgaacagacccctggccagcaccgtgaacgacaagctggagctgcaggagtgcctggagcacggccggatcgccaagttcagcaaggtgagaaccatcaccacccgaagcaacagcatcaaacaaggcaaggaccagcactttcctgtgttcatgaacgagaaggaggacatcctgtggtgtaccgagatggagagagtgttcgggttcccagtccactacacagatgtcagcaacatgtctagactggccagacagagactgctgggaagaagctggtccgtccctgtgatcagacacctgttcgcccctctgaaggagtacttcgcctgcgtgagcagcggcaacagcaacgccaacagccggggccccagcttctctagcggcctggtgccactgtccctgagagggagccacatgggccccatggagatctacaaaaccgtgagcgcctggaagcggcagcctgtgcgcgtgctgagcctgtttcggaatatcgataaagtcctgaaaagcctgggattcctggagagcggctctggctccggcggtggcaccctgaagtacgtggaggatgtgacaaacgtggtcagacgggatgtggagaagtggggccccttcgatctggtgtacggcagcacccaacccctgggcagctcttgtgaccggtgccctggctggtacatgtttcagttccaccggatcctgcagtacgccctgccgagacaggagtcccagcggccattcttttggattttcatggacaacttgctgctgaccgaggatgaccaggaaactaccactcggttcctgcagaccgaagccgtgaccctgcaggacgtgagaggccgggactaccagaacgccatgcgggtgtggtccaacatccctggactgaaaagcaagcacgcacctctgacccctaaagaagaggagtacctgcaggcccaggtgcggagcagaagcaagctggacgcccctaaggtggatctgctggtgaagaattgcctcctgcccctgagagagtacttcaagtatttcagccagaatagtctgcccctgggcggcccaagcagcggcgcccctcctcccagcggcggcagcccagccggctccccaacctctaccgaggagggcacctctgagtccgccacccccgagagcggccctggcacctccaccgagcccagcgagggcagcgcacccggcagccctgccggcagccccacctccacagaggagggaaccagcaccgagcccagcgaaggcagcgccccaggcaccagcaccgagcctagtgagggcggctctggcggcggcagcgcccaggagattaaacggatcaacaagatcagaagaagacttgtgaaagacagcaacaccaagaaggccggcaagacaggccccatgaaaaccctgctggttagagtgatgacacccgatctgagagagcggctggaaaacctgagaaagaagcctgaaaatatcccccagcccatcagcaatacatctagagccaacctgaataagctgctgaccgattacaccgaaatgaagaaggcgatcctgcatgtgtactgggaagagttccagaaggaccctgtgggcctgatgagccgggtggcccagcctgccagcaagaagatcgatcagaacaagctgaaacctgagatggacgagaagggcaacctgaccaccgccggctttgcctgctctcagtgtggccagcccctgttcgtgtacaagctggagcaggtgtctgagaagggcaaggcttacaccaactacttcggacggtgcaatgtggccgagcacgaaaagctgatcctgctggcccagctgaagcccgagaaggatagcgacgaagccgtgacatatagcctgggaaagtttgggcagagggccctggatttctacagcattcatgtgaccaaggagtccacccaccccgtgaagcccctggcccagatcgccggaaacagatacgcctccggacctgtgggaaaggccctgagcgacgcatgtatgggcacaatcgcctccttcctgtctaagtaccaggacatcatcatcgaacaccagaaggtggtgaagggcaaccagaagagactggagagcctgcgggagctggccggcaaggaaaacctggaataccctagcgtgaccctgccacctcagcctcacaccaaggagggcgttgatgcctacaacgaagtgatcgcccgggtgcgaatgtgggtgaacctgaacctgtggcagaagctgaagctaagcagagatgatgccaagcctctgctgagactgaagggattcccttcctttcctctggtcgagagacaggccaacgaagtggactggtgggacatggtgtgtaacgtgaagaagctgatcaacgagaaaaaggaggatggcaaggtgttttggcagaatctggctggctacaagagacaggaagccctgagaccatacctgagcagcgaggaagatcggaagaagggaaagaaattcgctcggtaccagctgggcgacctgctgctgcacctggaaaagaagcacggcgaggactggggaaaggtgtacgacgaggcctgggagcggattgacaagaaagtggaaggcctgagcaagcacatcaagctggaagaggaacggagaagcgaggacgcccagagcaaggccgccctgaccgactggctgcgggctaaggccagcttcgtgatcgagggcctgaaggaggccgacaaggacgagttctgcagatgcgagctgaagctgcagaagtggtacggggacctgcggggaaagcccttcgccatcgaagccgagaacagcatcctggacatcagcggcttcagcaagcagtacaactgtgccttcatctggcagaaggacggcgtgaagaagctgaacctgtacctgatcatcaactacttcaagggcggcaagctgcggttcaagaagatcaaacctgaagccttcgaagccaacagattctacaccgtgatcaacaaaaagagcggcgagatcgtgcccatggaggtgaacttcaacttcgacgaccccaacctgatcatcctgcctctggcctttggcaagagacagggcagagaattcatctggaacgacctgctgtccctggaaaccggcagcctgaagctggccaacggaagagtgatcgagaagacactgtacaacagaagaacccggcaggatgagcctgccctgttcgtggccctgaccttcgagcggcgggaggtcctggactcctccaatatcaaaccaatgaacctgatcggcgtggcaagaggcgaaaacatccccgccgtgatcgccctgaccgaccccgagggctgcccactgagccggtttaaggatagcctgggaaacccaacccacatcctgagaatcggcgagagctataaggagaagcagcggaccatccaggccaagaaggaggtggagcagcggagagccggcggctacagccggaagtacgccagcaaagccaagaatctggcagacgatatggtgagaaacaccgctagagatctgctgtactacgccgtgacccaggatgccatgctgatcttcgccaacctgagccggggcttcggccggcagggcaagcggaccttcatggccgagagacagtacacacggatggaggactggctgaccgccaagctggcctacgagggcctgagcaagacctacctgtccaagacactggcccagtacacctccaagacatgcagcaactgtgggtttaccatcaccagcgccgactacgacagggtgctggagaagctgaagaagacagcaacaggctggatgaccacaattaacggcaaggagctgaaggtggagggccagattacctactacaacagatacaagagacagaacgtagtcaaggacctgtccgtcgagctggatagactgagcgaagaatctgtgaacaacgacatctcctcctggacaaagggcagaagcggagaagctctgagcctcctgaagaaaagattctcccatagacccgtgcaggagaagttcgtgtgcctgaactgcggcttcgagacacacgcagccgagcaagccgccctgaacatcgccagatcctggctgttcctgcggagccaggagtacaagaaataccagacaaacaagacaaccggcaacaccgataagagagccttcgtcgagacctggcagtccttttaccggaagaagcttaaggaggtgtggaaacctgccgtgcggtctggcggatctggcggaggctccacaagcatgagccagggcagcgtgaccttcagggacgtggccatcgacttcagccaggaggagtggaagtggctgcagcccgcccagagggacctgtacaggtgcgtgatgctggagaactacggccacctggtgagcctgggcctgagcatcagcaagcccgacgtggtgagcctgctggagcagggcaaggagccctggctgggcaagagagacgtgaagagggacctgttcagcgtgctgaaggagaccagccccaagaaaaagagaaaagtctaagctgccttctgcggggcttgccttctggccatgcccttcttctctcccttgcacctgtacctcttggtctttgaataaagcctgagtaggaaggctagcaaaaaaaaaaaaaaaaaaaaaaaaaaaaaaaaaaaaaaaaaaaaaaaaaaaaaaaaaaaaaaaaaaaaaaaaaaaaaaaa

SEQ ID NO: 3662 - RNA, 5419 nt, synthetic construct
  source 1..5419: mol_type = other RNA
aggaaataagagagaaaagaagagtaagaagaaatataagagccaccatggcccctaagaagaagcgtaaagtgagccgggtgaacggcagcggcagcggcggcggcatgaaccacgaccaggagttcgacccccctaaggtgtaccctcccgtccccgccgagaagagaaagcccatccgggtcctgagcctgttcgatggcatcgccaccggtctgctggtgctgaaggacctgggcatccaggtggataggtacattgcctccgaggtgtgcgaggactccatcaccgtgggaatggtgcgtcatcagggcaagatcatgtacgtgggcgacgtgcggagcgtgacacagaagcatatccaggagtggggccctttcgacctggtgatcggcggcagcccttgcaatgacctgagcatcgtgaacccagcccggaagggcctgtacgagggaaccggcagactgttcttcgagttttacagactgctgcacgacgcccggcctaaggaaggcgacgaccggcccttcttttggctgttcgagaatgtggtggccatgggagtcagcgacaagcgggatattagccggttcctggagagcaaccccgtgatgatcgatgccaaggaagtgagcgccgcccaccgggccagatacttctggggcaatctgcctggcatgaacagacccctggccagcaccgtgaacgacaagctggagctgcaggagtgcctggagcacggccggatcgccaagttcagcaaggtgagaaccatcaccacccgaagcaacagcatcaaacaaggcaaggaccagcactttcctgtgttcatgaacgagaaggaggacatcctgtggtgtaccgagatggagagagtgttcgggttcccagtccactacacagatgtcagcaacatgtctagactggccagacagagactgctgggaagaagctggtccgtccctgtgatcagacacctgttcgcccctctgaaggagtacttcgcctgcgtgagcagcggcaacagcaacgccaacagccggggccccagcttctctagcggcctggtgccactgtccctgagagggagccacatgggccccatggagatctacaaaaccgtgagcgcctggaagcggcagcctgtgcgcgtgctgagcctgtttcggaatatcgataaagtcctgaaaagcctgggattcctggagagcggctctggctccggcggtggcaccctgaagtacgtggaggatgtgacaaacgtggtcagacgggatgtggagaagtggggccccttcgatctggtgtacggcagcacccaacccctgggcagctcttgtgaccggtgccctggctggtacatgtttcagttccaccggatcctgcagtacgccctgccgagacaggagtcccagcggccattcttttggattttcatggacaacttgctgctgaccgaggatgaccaggaaactaccactcggttcctgcagaccgaagccgtgaccctgcaggacgtgagaggccgggactaccagaacgccatgcgggtgtggtccaacatccctggactgaaaagcaagcacgcacctctgacccctaaagaagaggagtacctgcaggcccaggtgcggagcagaagcaagctggacgcccctaaggtggatctgctggtgaagaattgcctcctgcccctgagagagtacttcaagtatttcagccagaatagtctgcccctgggcggcccaagcagcggcgcccctcctcccagcggcggcagcccagccggctccccaacctctaccgaggagggcacctctgagtccgccacccccgagagcggccctggcacctccaccgagcccagcgagggcagcgcacccggcagccctgccggcagccccacctccacagaggagggaaccagcaccgagcccagcgaaggcagcgccccaggcaccagcaccgagcctagtgagggcggctctggcggcggcagcgcccaggagattaaacggatcaacaagatcagaagaagacttgtgaaagacagcaacaccaagaaggccggcaagacaggccccatgaaaaccctgctggttagagtgatgacacccgatctgagagagcggctggaaaacctgagaaagaagcctgaaaatatcccccagcccatcagcaatacatctagagccaacctgaataagctgctgaccgattacaccgaaatgaagaaggcgatcctgcatgtgtactgggaagagttccagaaggaccctgtgggcctgatgagccgggtggcccagcctgccagcaagaagatcgatcagaacaagctgaaacctgagatggacgagaagggcaacctgaccaccgccggctttgcctgctctcagtgtggccagcccctgttcgtgtacaagctggagcaggtgtctgagaagggcaaggcttacaccaactacttcggacggtgcaatgtggccgagcacgaaaagctgatcctgctggcccagctgaagcccgagaaggatagcgacgaagccgtgacatatagcctgggaaagtttgggcagagggccctggatttctacagcattcatgtgaccaaggagtccacccaccccgtgaagcccctggcccagatcgccggaaacagatacgcctccggacctgtgggaaaggccctgagcgacgcatgtatgggcacaatcgcctccttcctgtctaagtaccaggacatcatcatcgaacaccagaaggtggtgaagggcaaccagaagagactggagagcctgcgggagctggccggcaaggaaaacctggaataccctagcgtgaccctgccacctcagcctcacaccaaggagggcgttgatgcctacaacgaagtgatcgcccgggtgcgaatgtgggtgaacctgaacctgtggcagaagctgaagctaagcagagatgatgccaagcctctgctgagactgaagggattcccttcctttcctctggtcgagagacaggccaacgaagtggactggtgggacatggtgtgtaacgtgaagaagctgatcaacgagaaaaaggaggatggcaaggtgttttggcagaatctggctggctacaagagacaggaagccctgagaccatacctgagcagcgaggaagatcggaagaagggaaagaaattcgctcggtaccagctgggcgacctgctgctgcacctggaaaagaagcacggcgaggactggggaaaggtgtacgacgaggcctgggagcggattgacaagaaagtggaaggcctgagcaagcacatcaagctggaagaggaacggagaagcgaggacgcccagagcaaggccgccctgaccgactggctgcgggctaaggccagcttcgtgatcgagggcctgaaggaggccgacaaggacgagttctgcagatgcgagctgaagctgcagaagtggtacggggacctgcggggaaagcccttcgccatcgaagccgagaacagcatcctggacatcagcggcttcagcaagcagtacaactgtgccttcatctggcagaaggacggcgtgaagaagctgaacctgtacctgatcatcaactacttcaagggcggcaagctgcggttcaagaagatcaaacctgaagccttcgaagccaacagattctacaccgtgatcaacaaaaagagcggcgagatcgtgcccatggaggtgaacttcaacttcgacgaccccaacctgatcatcctgcctctggcctttggcaagagacagggcagagaattcatctggaacgacctgctgtccctggaaaccggcagcctgaagctggccaacggaagagtgatcgagaagacactgtacaacagaagaacccggcaggatgagcctgccctgttcgtggccctgaccttcgagcggcgggaggtcctggactcctccaatatcaaaccaatgaacctgatcggcgtggcaagaggcgaaaacatccccgccgtgatcgccctgaccgaccccgagggctgcccactgagccggtttaaggatagcctgggaaacccaacccacatcctgagaatcggcgagagctataaggagaagcagcggaccatccaggccaagaaggaggtggagcagcggagagccggcggctacagccggaagtacgccagcaaagccaagaatctggcagacgatatggtgagaaacaccgctagagatctgctgtactacgccgtgacccaggatgccatgctgatcttcgccaacctgagccggggcttcggccggcagggcaagcggaccttcatggccgagagacagtacacacggatggaggactggctgaccgccaagctggcctacgagggcctgagcaagacctacctgtccaagacactggcccagtacacctccaagacatgcagcaactgtgggtttaccatcaccagcgccgactacgacagggtgctggagaagctgaagaagacagcaacaggctggatgaccacaattaacggcaaggagctgaaggtggagggccagattacctactacaacagatacaagagacagaacgtagtcaaggacctgtccgtcgagctggatagactgagcgaagaatctgtgaacaacgacatctcctcctggacaaagggcagaagcggagaagctctgagcctcctgaagaaaagattctcccatagacccgtgcaggagaagttcgtgtgcctgaactgcggcttcgagacacacgcagccgagcaagccgccctgaacatcgccagatcctggctgttcctgcggagccaggagtacaagaaataccagacaaacaagacaaccggcaacaccgataagagagccttcgtcgagacctggcagtccttttaccggaagaagcttaaggaggtgtggaaacctgccgtgcggtctggcggatctggcggaggctccacaagcatgggcaggctgatgttccaggacgtggccatcgacttcacccaggaggagtgggagtgcctggacctgagccagagggacctgtacagggacgtgatgctggagacctacggcaacctggccagcctgggcctggtggtgagcaagcccgacctggtgaccttcctggagcagatgaagaacccctgggacgtgaggaggaccgacaccaaggccacctaccccgccgtgagcagccacaacaccagccccaagaaaaagagaaaagtctaagctgccttctgcggggcttgccttctggccatgcccttcttctctcccttgcacctgtacctcttggtctttgaataaagcctgagtaggaaggctagcaaaaaaaaaaaaaaaaaaaaaaaaaaaaaaaaaaaaaaaaaaaaaaaaaaaaaaaaaaaaaaaaaaaaaaaaaaaaaaaa

SEQ ID NO: 3663 - RNA, 5419 nt, synthetic construct
  source 1..5419: mol_type = other RNA
aggaaataagagagaaaagaagagtaagaagaaatataagagccaccatggcccctaagaagaagcgtaaagtgagccgggtgaacggcagcggcagcggcggcggcatgaaccacgaccaggagttcgacccccctaaggtgtaccctcccgtccccgccgagaagagaaagcccatccgggtcctgagcctgttcgatggcatcgccaccggtctgctggtgctgaaggacctgggcatccaggtggataggtacattgcctccgaggtgtgcgaggactccatcaccgtgggaatggtgcgtcatcagggcaagatcatgtacgtgggcgacgtgcggagcgtgacacagaagcatatccaggagtggggccctttcgacctggtgatcggcggcagcccttgcaatgacctgagcatcgtgaacccagcccggaagggcctgtacgagggaaccggcagactgttcttcgagttttacagactgctgcacgacgcccggcctaaggaaggcgacgaccggcccttcttttggctgttcgagaatgtggtggccatgggagtcagcgacaagcgggatattagccggttcctggagagcaaccccgtgatgatcgatgccaaggaagtgagcgccgcccaccgggccagatacttctggggcaatctgcctggcatgaacagacccctggccagcaccgtgaacgacaagctggagctgcaggagtgcctggagcacggccggatcgccaagttcagcaaggtgagaaccatcaccacccgaagcaacagcatcaaacaaggcaaggaccagcactttcctgtgttcatgaacgagaaggaggacatcctgtggtgtaccgagatggagagagtgttcgggttcccagtccactacacagatgtcagcaacatgtctagactggccagacagagactgctgggaagaagctggtccgtccctgtgatcagacacctgttcgcccctctgaaggagtacttcgcctgcgtgagcagcggcaacagcaacgccaacagccggggccccagcttctctagcggcctggtgccactgtccctgagagggagccacatgggccccatggagatctacaaaaccgtgagcgcctggaagcggcagcctgtgcgcgtgctgagcctgtttcggaatatcgataaagtcctgaaaagcctgggattcctggagagcggctctggctccggcggtggcaccctgaagtacgtggaggatgtgacaaacgtggtcagacgggatgtggagaagtggggccccttcgatctggtgtacggcagcacccaacccctgggcagctcttgtgaccggtgccctggctggtacatgtttcagttccaccggatcctgcagtacgccctgccgagacaggagtcccagcggccattcttttggattttcatggacaacttgctgctgaccgaggatgaccaggaaactaccactcggttcctgcagaccgaagccgtgaccctgcaggacgtgagaggccgggactaccagaacgccatgcgggtgtggtccaacatccctggactgaaaagcaagcacgcacctctgacccctaaagaagaggagtacctgcaggcccaggtgcggagcagaagcaagctggacgcccctaaggtggatctgctggtgaagaattgcctcctgcccctgagagagtacttcaagtatttcagccagaatagtctgcccctgggcggcccaagcagcggcgcccctcctcccagcggcggcagcccagccggctccccaacctctaccgaggagggcacctctgagtccgccacccccgagagcggccctggcacctccaccgagcccagcgagggcagcgcacccggcagccctgccggcagccccacctccacagaggagggaaccagcaccgagcccagcgaaggcagcgccccaggcaccagcaccgagcctagtgagggcggctctggcggcggcagcgcccaggagattaaacggatcaacaagatcagaagaagacttgtgaaagacagcaacaccaagaaggccggcaagacaggccccatgaaaaccctgctggttagagtgatgacacccgatctgagagagcggctggaaaacctgagaaagaagcctgaaaatatcccccagcccatcagcaatacatctagagccaacctgaataagctgctgaccgattacaccgaaatgaagaaggcgatcctgcatgtgtactgggaagagttccagaaggaccctgtgggcctgatgagccgggtggcccagcctgccagcaagaagatcgatcagaacaagctgaaacctgagatggacgagaagggcaacctgaccaccgccggctttgcctgctctcagtgtggccagcccctgttcgtgtacaagctggagcaggtgtctgagaagggcaaggcttacaccaactacttcggacggtgcaatgtggccgagcacgaaaagctgatcctgctggcccagctgaagcccgagaaggatagcgacgaagccgtgacatatagcctgggaaagtttgggcagagggccctggatttctacagcattcatgtgaccaaggagtccacccaccccgtgaagcccctggcccagatcgccggaaacagatacgcctccggacctgtgggaaaggccctgagcgacgcatgtatgggcacaatcgcctccttcctgtctaagtaccaggacatcatcatcgaacaccagaaggtggtgaagggcaaccagaagagactggagagcctgcgggagctggccggcaaggaaaacctggaataccctagcgtgaccctgccacctcagcctcacaccaaggagggcgttgatgcctacaacgaagtgatcgcccgggtgcgaatgtgggtgaacctgaacctgtggcagaagctgaagctaagcagagatgatgccaagcctctgctgagactgaagggattcccttcctttcctctggtcgagagacaggccaacgaagtggactggtgggacatggtgtgtaacgtgaagaagctgatcaacgagaaaaaggaggatggcaaggtgttttggcagaatctggctggctacaagagacaggaagccctgagaccatacctgagcagcgaggaagatcggaagaagggaaagaaattcgctcggtaccagctgggcgacctgctgctgcacctggaaaagaagcacggcgaggactggggaaaggtgtacgacgaggcctgggagcggattgacaagaaagtggaaggcctgagcaagcacatcaagctggaagaggaacggagaagcgaggacgcccagagcaaggccgccctgaccgactggctgcgggctaaggccagcttcgtgatcgagggcctgaaggaggccgacaaggacgagttctgcagatgcgagctgaagctgcagaagtggtacggggacctgcggggaaagcccttcgccatcgaagccgagaacagcatcctggacatcagcggcttcagcaagcagtacaactgtgccttcatctggcagaaggacggcgtgaagaagctgaacctgtacctgatcatcaactacttcaagggcggcaagctgcggttcaagaagatcaaacctgaagccttcgaagccaacagattctacaccgtgatcaacaaaaagagcggcgagatcgtgcccatggaggtgaacttcaacttcgacgaccccaacctgatcatcctgcctctggcctttggcaagagacagggcagagaattcatctggaacgacctgctgtccctggaaaccggcagcctgaagctggccaacggaagagtgatcgagaagacactgtacaacagaagaacccggcaggatgagcctgccctgttcgtggccctgaccttcgagcggcgggaggtcctggactcctccaatatcaaaccaatgaacctgatcggcgtggcaagaggcgaaaacatccccgccgtgatcgccctgaccgaccccgagggctgcccactgagccggtttaaggatagcctgggaaacccaacccacatcctgagaatcggcgagagctataaggagaagcagcggaccatccaggccaagaaggaggtggagcagcggagagccggcggctacagccggaagtacgccagcaaagccaagaatctggcagacgatatggtgagaaacaccgctagagatctgctgtactacgccgtgacccaggatgccatgctgatcttcgccaacctgagccggggcttcggccggcagggcaagcggaccttcatggccgagagacagtacacacggatggaggactggctgaccgccaagctggcctacgagggcctgagcaagacctacctgtccaagacactggcccagtacacctccaagacatgcagcaactgtgggtttaccatcaccagcgccgactacgacagggtgctggagaagctgaagaagacagcaacaggctggatgaccacaattaacggcaaggagctgaaggtggagggccagattacctactacaacagatacaagagacagaacgtagtcaaggacctgtccgtcgagctggatagactgagcgaagaatctgtgaacaacgacatctcctcctggacaaagggcagaagcggagaagctctgagcctcctgaagaaaagattctcccatagacccgtgcaggagaagttcgtgtgcctgaactgcggcttcgagacacacgcagccgagcaagccgccctgaacatcgccagatcctggctgttcctgcggagccaggagtacaagaaataccagacaaacaagacaaccggcaacaccgataagagagccttcgtcgagacctggcagtccttttaccggaagaagcttaaggaggtgtggaaacctgccgtgcggtctggcggatctggcggaggctccacaagcttcctgatgcccgtgaccttcgaggaggtggccgtgtacttcacccccggccagggcgccctgctggaccccgcccagagggccctgtacagggacgtgatgcaggagaactacgagaccgtggccagcctgggcttcagcatccccaagcccgacctgatcgcccagctggagcagggcgaggagccctgggtgcccgacctgcagcccagcaaggagatggtgatcctgaggggcatctgcaccagccccaagaaaaagagaaaagtctaagctgccttctgcggggcttgccttctggccatgcccttcttctctcccttgcacctgtacctcttggtctttgaataaagcctgagtaggaaggctagcaaaaaaaaaaaaaaaaaaaaaaaaaaaaaaaaaaaaaaaaaaaaaaaaaaaaaaaaaaaaaaaaaaaaaaaaaaaaaaaa

SEQ ID NO: 3664 - RNA, 5419 nt, synthetic construct
  source 1..5419: mol_type = other RNA
aggaaataagagagaaaagaagagtaagaagaaatataagagccaccatggcccctaagaagaagcgtaaagtgagccgggtgaacggcagcggcagcggcggcggcatgaaccacgaccaggagttcgacccccctaaggtgtaccctcccgtccccgccgagaagagaaagcccatccgggtcctgagcctgttcgatggcatcgccaccggtctgctggtgctgaaggacctgggcatccaggtggataggtacattgcctccgaggtgtgcgaggactccatcaccgtgggaatggtgcgtcatcagggcaagatcatgtacgtgggcgacgtgcggagcgtgacacagaagcatatccaggagtggggccctttcgacctggtgatcggcggcagcccttgcaatgacctgagcatcgtgaacccagcccggaagggcctgtacgagggaaccggcagactgttcttcgagttttacagactgctgcacgacgcccggcctaaggaaggcgacgaccggcccttcttttggctgttcgagaatgtggtggccatgggagtcagcgacaagcgggatattagccggttcctggagagcaaccccgtgatgatcgatgccaaggaagtgagcgccgcccaccgggccagatacttctggggcaatctgcctggcatgaacagacccctggccagcaccgtgaacgacaagctggagctgcaggagtgcctggagcacggccggatcgccaagttcagcaaggtgagaaccatcaccacccgaagcaacagcatcaaacaaggcaaggaccagcactttcctgtgttcatgaacgagaaggaggacatcctgtggtgtaccgagatggagagagtgttcgggttcccagtccactacacagatgtcagcaacatgtctagactggccagacagagactgctgggaagaagctggtccgtccctgtgatcagacacctgttcgcccctctgaaggagtacttcgcctgcgtgagcagcggcaacagcaacgccaacagccggggccccagcttctctagcggcctggtgccactgtccctgagagggagccacatgggccccatggagatctacaaaaccgtgagcgcctggaagcggcagcctgtgcgcgtgctgagcctgtttcggaatatcgataaagtcctgaaaagcctgggattcctggagagcggctctggctccggcggtggcaccctgaagtacgtggaggatgtgacaaacgtggtcagacgggatgtggagaagtggggccccttcgatctggtgtacggcagcacccaacccctgggcagctcttgtgaccggtgccctggctggtacatgtttcagttccaccggatcctgcagtacgccctgccgagacaggagtcccagcggccattcttttggattttcatggacaacttgctgctgaccgaggatgaccaggaaactaccactcggttcctgcagaccgaagccgtgaccctgcaggacgtgagaggccgggactaccagaacgccatgcgggtgtggtccaacatccctggactgaaaagcaagcacgcacctctgacccctaaagaagaggagtacctgcaggcccaggtgcggagcagaagcaagctggacgcccctaaggtggatctgctggtgaagaattgcctcctgcccctgagagagtacttcaagtatttcagccagaatagtctgcccctgggcggcccaagcagcggcgcccctcctcccagcggcggcagcccagccggctccccaacctctaccgaggagggcacctctgagtccgccacccccgagagcggccctggcacctccaccgagcccagcgagggcagcgcacccggcagccctgccggcagccccacctccacagaggagggaaccagcaccgagcccagcgaaggcagcgccccaggcaccagcaccgagcctagtgagggcggctctggcggcggcagcgcccaggagattaaacggatcaacaagatcagaagaagacttgtgaaagacagcaacaccaagaaggccggcaagacaggccccatgaaaaccctgctggttagagtgatgacacccgatctgagagagcggctggaaaacctgagaaagaagcctgaaaatatcccccagcccatcagcaatacatctagagccaacctgaataagctgctgaccgattacaccgaaatgaagaaggcgatcctgcatgtgtactgggaagagttccagaaggaccctgtgggcctgatgagccgggtggcccagcctgccagcaagaagatcgatcagaacaagctgaaacctgagatggacgagaagggcaacctgaccaccgccggctttgcctgctctcagtgtggccagcccctgttcgtgtacaagctggagcaggtgtctgagaagggcaaggcttacaccaactacttcggacggtgcaatgtggccgagcacgaaaagctgatcctgctggcccagctgaagcccgagaaggatagcgacgaagccgtgacatatagcctgggaaagtttgggcagagggccctggatttctacagcattcatgtgaccaaggagtccacccaccccgtgaagcccctggcccagatcgccggaaacagatacgcctccggacctgtgggaaaggccctgagcgacgcatgtatgggcacaatcgcctccttcctgtctaagtaccaggacatcatcatcgaacaccagaaggtggtgaagggcaaccagaagagactggagagcctgcgggagctggccggcaaggaaaacctggaataccctagcgtgaccctgccacctcagcctcacaccaaggagggcgttgatgcctacaacgaagtgatcgcccgggtgcgaatgtgggtgaacctgaacctgtggcagaagctgaagctaagcagagatgatgccaagcctctgctgagactgaagggattcccttcctttcctctggtcgagagacaggccaacgaagtggactggtgggacatggtgtgtaacgtgaagaagctgatcaacgagaaaaaggaggatggcaaggtgttttggcagaatctggctggctacaagagacaggaagccctgagaccatacctgagcagcgaggaagatcggaagaagggaaagaaattcgctcggtaccagctgggcgacctgctgctgcacctggaaaagaagcacggcgaggactggggaaaggtgtacgacgaggcctgggagcggattgacaagaaagtggaaggcctgagcaagcacatcaagctggaagaggaacggagaagcgaggacgcccagagcaaggccgccctgaccgactggctgcgggctaaggccagcttcgtgatcgagggcctgaaggaggccgacaaggacgagttctgcagatgcgagctgaagctgcagaagtggtacggggacctgcggggaaagcccttcgccatcgaagccgagaacagcatcctggacatcagcggcttcagcaagcagtacaactgtgccttcatctggcagaaggacggcgtgaagaagctgaacctgtacctgatcatcaactacttcaagggcggcaagctgcggttcaagaagatcaaacctgaagccttcgaagccaacagattctacaccgtgatcaacaaaaagagcggcgagatcgtgcccatggaggtgaacttcaacttcgacgaccccaacctgatcatcctgcctctggcctttggcaagagacagggcagagaattcatctggaacgacctgctgtccctggaaaccggcagcctgaagctggccaacggaagagtgatcgagaagacactgtacaacagaagaacccggcaggatgagcctgccctgttcgtggccctgaccttcgagcggcgggaggtcctggactcctccaatatcaaaccaatgaacctgatcggcgtggcaagaggcgaaaacatccccgccgtgatcgccctgaccgaccccgagggctgcccactgagccggtttaaggatagcctgggaaacccaacccacatcctgagaatcggcgagagctataaggagaagcagcggaccatccaggccaagaaggaggtggagcagcggagagccggcggctacagccggaagtacgccagcaaagccaagaatctggcagacgatatggtgagaaacaccgctagagatctgctgtactacgccgtgacccaggatgccatgctgatcttcgccaacctgagccggggcttcggccggcagggcaagcggaccttcatggccgagagacagtacacacggatggaggactggctgaccgccaagctggcctacgagggcctgagcaagacctacctgtccaagacactggcccagtacacctccaagacatgcagcaactgtgggtttaccatcaccagcgccgactacgacagggtgctggagaagctgaagaagacagcaacaggctggatgaccacaattaacggcaaggagctgaaggtggagggccagattacctactacaacagatacaagagacagaacgtagtcaaggacctgtccgtcgagctggatagactgagcgaagaatctgtgaacaacgacatctcctcctggacaaagggcagaagcggagaagctctgagcctcctgaagaaaagattctcccatagacccgtgcaggagaagttcgtgtgcctgaactgcggcttcgagacacacgcagccgagcaagccgccctgaacatcgccagatcctggctgttcctgcggagccaggagtacaagaaataccagacaaacaagacaaccggcaacaccgataagagagccttcgtcgagacctggcagtccttttaccggaagaagcttaaggaggtgtggaaacctgccgtgcggtctggcggatctggcggaggctccacaagctgcgagggcagcgtgagcttcgaggacgtgaccatggacttcagcagggaggagtggcagcagctggaccccgcccagaggtgcctgtaccaggacgtgatgctggagatctacagccacctgctgttcgtgggctacaacatccccaaccccgagatcatcagcaggatggagaagggcgaggagccctggatgagggagatccagctgccccaccagaggcacagggagagggccttcggcaccagccccaagaaaaagagaaaagtctaagctgccttctgcggggcttgccttctggccatgcccttcttctctcccttgcacctgtacctcttggtctttgaataaagcctgagtaggaaggctagcaaaaaaaaaaaaaaaaaaaaaaaaaaaaaaaaaaaaaaaaaaaaaaaaaaaaaaaaaaaaaaaaaaaaaaaaaaaaaaaa

SEQ ID NO: 3665 - RNA, 5419 nt, synthetic construct
  source 1..5419: mol_type = other RNA
aggaaataagagagaaaagaagagtaagaagaaatataagagccaccatggcccctaagaagaagcgtaaagtgagccgggtgaacggcagcggcagcggcggcggcatgaaccacgaccaggagttcgacccccctaaggtgtaccctcccgtccccgccgagaagagaaagcccatccgggtcctgagcctgttcgatggcatcgccaccggtctgctggtgctgaaggacctgggcatccaggtggataggtacattgcctccgaggtgtgcgaggactccatcaccgtgggaatggtgcgtcatcagggcaagatcatgtacgtgggcgacgtgcggagcgtgacacagaagcatatccaggagtggggccctttcgacctggtgatcggcggcagcccttgcaatgacctgagcatcgtgaacccagcccggaagggcctgtacgagggaaccggcagactgttcttcgagttttacagactgctgcacgacgcccggcctaaggaaggcgacgaccggcccttcttttggctgttcgagaatgtggtggccatgggagtcagcgacaagcgggatattagccggttcctggagagcaaccccgtgatgatcgatgccaaggaagtgagcgccgcccaccgggccagatacttctggggcaatctgcctggcatgaacagacccctggccagcaccgtgaacgacaagctggagctgcaggagtgcctggagcacggccggatcgccaagttcagcaaggtgagaaccatcaccacccgaagcaacagcatcaaacaaggcaaggaccagcactttcctgtgttcatgaacgagaaggaggacatcctgtggtgtaccgagatggagagagtgttcgggttcccagtccactacacagatgtcagcaacatgtctagactggccagacagagactgctgggaagaagctggtccgtccctgtgatcagacacctgttcgcccctctgaaggagtacttcgcctgcgtgagcagcggcaacagcaacgccaacagccggggccccagcttctctagcggcctggtgccactgtccctgagagggagccacatgggccccatggagatctacaaaaccgtgagcgcctggaagcggcagcctgtgcgcgtgctgagcctgtttcggaatatcgataaagtcctgaaaagcctgggattcctggagagcggctctggctccggcggtggcaccctgaagtacgtggaggatgtgacaaacgtggtcagacgggatgtggagaagtggggccccttcgatctggtgtacggcagcacccaacccctgggcagctcttgtgaccggtgccctggctggtacatgtttcagttccaccggatcctgcagtacgccctgccgagacaggagtcccagcggccattcttttggattttcatggacaacttgctgctgaccgaggatgaccaggaaactaccactcggttcctgcagaccgaagccgtgaccctgcaggacgtgagaggccgggactaccagaacgccatgcgggtgtggtccaacatccctggactgaaaagcaagcacgcacctctgacccctaaagaagaggagtacctgcaggcccaggtgcggagcagaagcaagctggacgcccctaaggtggatctgctggtgaagaattgcctcctgcccctgagagagtacttcaagtatttcagccagaatagtctgcccctgggcggcccaagcagcggcgcccctcctcccagcggcggcagcccagccggctccccaacctctaccgaggagggcacctctgagtccgccacccccgagagcggccctggcacctccaccgagcccagcgagggcagcgcacccggcagccctgccggcagccccacctccacagaggagggaaccagcaccgagcccagcgaaggcagcgccccaggcaccagcaccgagcctagtgagggcggctctggcggcggcagcgcccaggagattaaacggatcaacaagatcagaagaagacttgtgaaagacagcaacaccaagaaggccggcaagacaggccccatgaaaaccctgctggttagagtgatgacacccgatctgagagagcggctggaaaacctgagaaagaagcctgaaaatatcccccagcccatcagcaatacatctagagccaacctgaataagctgctgaccgattacaccgaaatgaagaaggcgatcctgcatgtgtactgggaagagttccagaaggaccctgtgggcctgatgagccgggtggcccagcctgccagcaagaagatcgatcagaacaagctgaaacctgagatggacgagaagggcaacctgaccaccgccggctttgcctgctctcagtgtggccagcccctgttcgtgtacaagctggagcaggtgtctgagaagggcaaggcttacaccaactacttcggacggtgcaatgtggccgagcacgaaaagctgatcctgctggcccagctgaagcccgagaaggatagcgacgaagccgtgacatatagcctgggaaagtttgggcagagggccctggatttctacagcattcatgtgaccaaggagtccacccaccccgtgaagcccctggcccagatcgccggaaacagatacgcctccggacctgtgggaaaggccctgagcgacgcatgtatgggcacaatcgcctccttcctgtctaagtaccaggacatcatcatcgaacaccagaaggtggtgaagggcaaccagaagagactggagagcctgcgggagctggccggcaaggaaaacctggaataccctagcgtgaccctgccacctcagcctcacaccaaggagggcgttgatgcctacaacgaagtgatcgcccgggtgcgaatgtgggtgaacctgaacctgtggcagaagctgaagctaagcagagatgatgccaagcctctgctgagactgaagggattcccttcctttcctctggtcgagagacaggccaacgaagtggactggtgggacatggtgtgtaacgtgaagaagctgatcaacgagaaaaaggaggatggcaaggtgttttggcagaatctggctggctacaagagacaggaagccctgagaccatacctgagcagcgaggaagatcggaagaagggaaagaaattcgctcggtaccagctgggcgacctgctgctgcacctggaaaagaagcacggcgaggactggggaaaggtgtacgacgaggcctgggagcggattgacaagaaagtggaaggcctgagcaagcacatcaagctggaagaggaacggagaagcgaggacgcccagagcaaggccgccctgaccgactggctgcgggctaaggccagcttcgtgatcgagggcctgaaggaggccgacaaggacgagttctgcagatgcgagctgaagctgcagaagtggtacggggacctgcggggaaagcccttcgccatcgaagccgagaacagcatcctggacatcagcggcttcagcaagcagtacaactgtgccttcatctggcagaaggacggcgtgaagaagctgaacctgtacctgatcatcaactacttcaagggcggcaagctgcggttcaagaagatcaaacctgaagccttcgaagccaacagattctacaccgtgatcaacaaaaagagcggcgagatcgtgcccatggaggtgaacttcaacttcgacgaccccaacctgatcatcctgcctctggcctttggcaagagacagggcagagaattcatctggaacgacctgctgtccctggaaaccggcagcctgaagctggccaacggaagagtgatcgagaagacactgtacaacagaagaacccggcaggatgagcctgccctgttcgtggccctgaccttcgagcggcgggaggtcctggactcctccaatatcaaaccaatgaacctgatcggcgtggcaagaggcgaaaacatccccgccgtgatcgccctgaccgaccccgagggctgcccactgagccggtttaaggatagcctgggaaacccaacccacatcctgagaatcggcgagagctataaggagaagcagcggaccatccaggccaagaaggaggtggagcagcggagagccggcggctacagccggaagtacgccagcaaagccaagaatctggcagacgatatggtgagaaacaccgctagagatctgctgtactacgccgtgacccaggatgccatgctgatcttcgccaacctgagccggggcttcggccggcagggcaagcggaccttcatggccgagagacagtacacacggatggaggactggctgaccgccaagctggcctacgagggcctgagcaagacctacctgtccaagacactggcccagtacacctccaagacatgcagcaactgtgggtttaccatcaccagcgccgactacgacagggtgctggagaagctgaagaagacagcaacaggctggatgaccacaattaacggcaaggagctgaaggtggagggccagattacctactacaacagatacaagagacagaacgtagtcaaggacctgtccgtcgagctggatagactgagcgaagaatctgtgaacaacgacatctcctcctggacaaagggcagaagcggagaagctctgagcctcctgaagaaaagattctcccatagacccgtgcaggagaagttcgtgtgcctgaactgcggcttcgagacacacgcagccgagcaagccgccctgaacatcgccagatcctggctgttcctgcggagccaggagtacaagaaataccagacaaacaagacaaccggcaacaccgataagagagccttcgtcgagacctggcagtccttttaccggaagaagcttaaggaggtgtggaaacctgccgtgcggtctggcggatctggcggaggctccacaagccagggcctggtgagcttcaaggacgtggccgtggacttcacccaggaggagtggcagcagctggaccccgcccagaggaccctgtacagggacgtgatgctggagaacttcagccacctggtgagcatcggctacgccgtgagcaagcccgacgtgatcagcaagctggagcagggcgaggacccctggatcatcaagagggacatccccaactggatctaccccgacgagaaccaggccgacaccagccccaagaaaaagagaaaagtctaagctgccttctgcggggcttgccttctggccatgcccttcttctctcccttgcacctgtacctcttggtctttgaataaagcctgagtaggaaggctagcaaaaaaaaaaaaaaaaaaaaaaaaaaaaaaaaaaaaaaaaaaaaaaaaaaaaaaaaaaaaaaaaaaaaaaaaaaaaaaaa

SEQ ID NO: 3666 - RNA, 5419 nt, synthetic construct
  source 1..5419: mol_type = other RNA
aggaaataagagagaaaagaagagtaagaagaaatataagagccaccatggcccctaagaagaagcgtaaagtgagccgggtgaacggcagcggcagcggcggcggcatgaaccacgaccaggagttcgacccccctaaggtgtaccctcccgtccccgccgagaagagaaagcccatccgggtcctgagcctgttcgatggcatcgccaccggtctgctggtgctgaaggacctgggcatccaggtggataggtacattgcctccgaggtgtgcgaggactccatcaccgtgggaatggtgcgtcatcagggcaagatcatgtacgtgggcgacgtgcggagcgtgacacagaagcatatccaggagtggggccctttcgacctggtgatcggcggcagcccttgcaatgacctgagcatcgtgaacccagcccggaagggcctgtacgagggaaccggcagactgttcttcgagttttacagactgctgcacgacgcccggcctaaggaaggcgacgaccggcccttcttttggctgttcgagaatgtggtggccatgggagtcagcgacaagcgggatattagccggttcctggagagcaaccccgtgatgatcgatgccaaggaagtgagcgccgcccaccgggccagatacttctggggcaatctgcctggcatgaacagacccctggccagcaccgtgaacgacaagctggagctgcaggagtgcctggagcacggccggatcgccaagttcagcaaggtgagaaccatcaccacccgaagcaacagcatcaaacaaggcaaggaccagcactttcctgtgttcatgaacgagaaggaggacatcctgtggtgtaccgagatggagagagtgttcgggttcccagtccactacacagatgtcagcaacatgtctagactggccagacagagactgctgggaagaagctggtccgtccctgtgatcagacacctgttcgcccctctgaaggagtacttcgcctgcgtgagcagcggcaacagcaacgccaacagccggggccccagcttctctagcggcctggtgccactgtccctgagagggagccacatgggccccatggagatctacaaaaccgtgagcgcctggaagcggcagcctgtgcgcgtgctgagcctgtttcggaatatcgataaagtcctgaaaagcctgggattcctggagagcggctctggctccggcggtggcaccctgaagtacgtggaggatgtgacaaacgtggtcagacgggatgtggagaagtggggccccttcgatctggtgtacggcagcacccaacccctgggcagctcttgtgaccggtgccctggctggtacatgtttcagttccaccggatcctgcagtacgccctgccgagacaggagtcccagcggccattcttttggattttcatggacaacttgctgctgaccgaggatgaccaggaaactaccactcggttcctgcagaccgaagccgtgaccctgcaggacgtgagaggccgggactaccagaacgccatgcgggtgtggtccaacatccctggactgaaaagcaagcacgcacctctgacccctaaagaagaggagtacctgcaggcccaggtgcggagcagaagcaagctggacgcccctaaggtggatctgctggtgaagaattgcctcctgcccctgagagagtacttcaagtatttcagccagaatagtctgcccctgggcggcccaagcagcggcgcccctcctcccagcggcggcagcccagccggctccccaacctctaccgaggagggcacctctgagtccgccacccccgagagcggccctggcacctccaccgagcccagcgagggcagcgcacccggcagccctgccggcagccccacctccacagaggagggaaccagcaccgagcccagcgaaggcagcgccccaggcaccagcaccgagcctagtgagggcggctctggcggcggcagcgcccaggagattaaacggatcaacaagatcagaagaagacttgtgaaagacagcaacaccaagaaggccggcaagacaggccccatgaaaaccctgctggttagagtgatgacacccgatctgagagagcggctggaaaacctgagaaagaagcctgaaaatatcccccagcccatcagcaatacatctagagccaacctgaataagctgctgaccgattacaccgaaatgaagaaggcgatcctgcatgtgtactgggaagagttccagaaggaccctgtgggcctgatgagccgggtggcccagcctgccagcaagaagatcgatcagaacaagctgaaacctgagatggacgagaagggcaacctgaccaccgccggctttgcctgctctcagtgtggccagcccctgttcgtgtacaagctggagcaggtgtctgagaagggcaaggcttacaccaactacttcggacggtgcaatgtggccgagcacgaaaagctgatcctgctggcccagctgaagcccgagaaggatagcgacgaagccgtgacatatagcctgggaaagtttgggcagagggccctggatttctacagcattcatgtgaccaaggagtccacccaccccgtgaagcccctggcccagatcgccggaaacagatacgcctccggacctgtgggaaaggccctgagcgacgcatgtatgggcacaatcgcctccttcctgtctaagtaccaggacatcatcatcgaacaccagaaggtggtgaagggcaaccagaagagactggagagcctgcgggagctggccggcaaggaaaacctggaataccctagcgtgaccctgccacctcagcctcacaccaaggagggcgttgatgcctacaacgaagtgatcgcccgggtgcgaatgtgggtgaacctgaacctgtggcagaagctgaagctaagcagagatgatgccaagcctctgctgagactgaagggattcccttcctttcctctggtcgagagacaggccaacgaagtggactggtgggacatggtgtgtaacgtgaagaagctgatcaacgagaaaaaggaggatggcaaggtgttttggcagaatctggctggctacaagagacaggaagccctgagaccatacctgagcagcgaggaagatcggaagaagggaaagaaattcgctcggtaccagctgggcgacctgctgctgcacctggaaaagaagcacggcgaggactggggaaaggtgtacgacgaggcctgggagcggattgacaagaaagtggaaggcctgagcaagcacatcaagctggaagaggaacggagaagcgaggacgcccagagcaaggccgccctgaccgactggctgcgggctaaggccagcttcgtgatcgagggcctgaaggaggccgacaaggacgagttctgcagatgcgagctgaagctgcagaagtggtacggggacctgcggggaaagcccttcgccatcgaagccgagaacagcatcctggacatcagcggcttcagcaagcagtacaactgtgccttcatctggcagaaggacggcgtgaagaagctgaacctgtacctgatcatcaactacttcaagggcggcaagctgcggttcaagaagatcaaacctgaagccttcgaagccaacagattctacaccgtgatcaacaaaaagagcggcgagatcgtgcccatggaggtgaacttcaacttcgacgaccccaacctgatcatcctgcctctggcctttggcaagagacagggcagagaattcatctggaacgacctgctgtccctggaaaccggcagcctgaagctggccaacggaagagtgatcgagaagacactgtacaacagaagaacccggcaggatgagcctgccctgttcgtggccctgaccttcgagcggcgggaggtcctggactcctccaatatcaaaccaatgaacctgatcggcgtggcaagaggcgaaaacatccccgccgtgatcgccctgaccgaccccgagggctgcccactgagccggtttaaggatagcctgggaaacccaacccacatcctgagaatcggcgagagctataaggagaagcagcggaccatccaggccaagaaggaggtggagcagcggagagccggcggctacagccggaagtacgccagcaaagccaagaatctggcagacgatatggtgagaaacaccgctagagatctgctgtactacgccgtgacccaggatgccatgctgatcttcgccaacctgagccggggcttcggccggcagggcaagcggaccttcatggccgagagacagtacacacggatggaggactggctgaccgccaagctggcctacgagggcctgagcaagacctacctgtccaagacactggcccagtacacctccaagacatgcagcaactgtgggtttaccatcaccagcgccgactacgacagggtgctggagaagctgaagaagacagcaacaggctggatgaccacaattaacggcaaggagctgaaggtggagggccagattacctactacaacagatacaagagacagaacgtagtcaaggacctgtccgtcgagctggatagactgagcgaagaatctgtgaacaacgacatctcctcctggacaaagggcagaagcggagaagctctgagcctcctgaagaaaagattctcccatagacccgtgcaggagaagttcgtgtgcctgaactgcggcttcgagacacacgcagccgagcaagccgccctgaacatcgccagatcctggctgttcctgcggagccaggagtacaagaaataccagacaaacaagacaaccggcaacaccgataagagagccttcgtcgagacctggcagtccttttaccggaagaagcttaaggaggtgtggaaacctgccgtgcggtctggcggatctggcggaggctccacaagcagcctgggcatggtgagcttcgacgacgtgatggtgaccttcagcctggaggagtggcagctgctgagcaccagccagaggaccctgtacaggaccgtgatgctggacacctacagcagcctggccgccctgggccactgcgccgtgaagcccggcgtgatcatcaagctggagcagggcgccgagccctggatgggcgcccaggccccccccaggagcctgagcgacccctgcggccccagcaccagccccaagaaaaagagaaaagtctaagctgccttctgcggggcttgccttctggccatgcccttcttctctcccttgcacctgtacctcttggtctttgaataaagcctgagtaggaaggctagcaaaaaaaaaaaaaaaaaaaaaaaaaaaaaaaaaaaaaaaaaaaaaaaaaaaaaaaaaaaaaaaaaaaaaaaaaaaaaaaa

SEQ ID NO: 3667 - RNA, 5419 nt, synthetic construct
  source 1..5419: mol_type = other RNA
aggaaataagagagaaaagaagagtaagaagaaatataagagccaccatggcccctaagaagaagcgtaaagtgagccgggtgaacggcagcggcagcggcggcggcatgaaccacgaccaggagttcgacccccctaaggtgtaccctcccgtccccgccgagaagagaaagcccatccgggtcctgagcctgttcgatggcatcgccaccggtctgctggtgctgaaggacctgggcatccaggtggataggtacattgcctccgaggtgtgcgaggactccatcaccgtgggaatggtgcgtcatcagggcaagatcatgtacgtgggcgacgtgcggagcgtgacacagaagcatatccaggagtggggccctttcgacctggtgatcggcggcagcccttgcaatgacctgagcatcgtgaacccagcccggaagggcctgtacgagggaaccggcagactgttcttcgagttttacagactgctgcacgacgcccggcctaaggaaggcgacgaccggcccttcttttggctgttcgagaatgtggtggccatgggagtcagcgacaagcgggatattagccggttcctggagagcaaccccgtgatgatcgatgccaaggaagtgagcgccgcccaccgggccagatacttctggggcaatctgcctggcatgaacagacccctggccagcaccgtgaacgacaagctggagctgcaggagtgcctggagcacggccggatcgccaagttcagcaaggtgagaaccatcaccacccgaagcaacagcatcaaacaaggcaaggaccagcactttcctgtgttcatgaacgagaaggaggacatcctgtggtgtaccgagatggagagagtgttcgggttcccagtccactacacagatgtcagcaacatgtctagactggccagacagagactgctgggaagaagctggtccgtccctgtgatcagacacctgttcgcccctctgaaggagtacttcgcctgcgtgagcagcggcaacagcaacgccaacagccggggccccagcttctctagcggcctggtgccactgtccctgagagggagccacatgggccccatggagatctacaaaaccgtgagcgcctggaagcggcagcctgtgcgcgtgctgagcctgtttcggaatatcgataaagtcctgaaaagcctgggattcctggagagcggctctggctccggcggtggcaccctgaagtacgtggaggatgtgacaaacgtggtcagacgggatgtggagaagtggggccccttcgatctggtgtacggcagcacccaacccctgggcagctcttgtgaccggtgccctggctggtacatgtttcagttccaccggatcctgcagtacgccctgccgagacaggagtcccagcggccattcttttggattttcatggacaacttgctgctgaccgaggatgaccaggaaactaccactcggttcctgcagaccgaagccgtgaccctgcaggacgtgagaggccgggactaccagaacgccatgcgggtgtggtccaacatccctggactgaaaagcaagcacgcacctctgacccctaaagaagaggagtacctgcaggcccaggtgcggagcagaagcaagctggacgcccctaaggtggatctgctggtgaagaattgcctcctgcccctgagagagtacttcaagtatttcagccagaatagtctgcccctgggcggcccaagcagcggcgcccctcctcccagcggcggcagcccagccggctccccaacctctaccgaggagggcacctctgagtccgccacccccgagagcggccctggcacctccaccgagcccagcgagggcagcgcacccggcagccctgccggcagccccacctccacagaggagggaaccagcaccgagcccagcgaaggcagcgccccaggcaccagcaccgagcctagtgagggcggctctggcggcggcagcgcccaggagattaaacggatcaacaagatcagaagaagacttgtgaaagacagcaacaccaagaaggccggcaagacaggccccatgaaaaccctgctggttagagtgatgacacccgatctgagagagcggctggaaaacctgagaaagaagcctgaaaatatcccccagcccatcagcaatacatctagagccaacctgaataagctgctgaccgattacaccgaaatgaagaaggcgatcctgcatgtgtactgggaagagttccagaaggaccctgtgggcctgatgagccgggtggcccagcctgccagcaagaagatcgatcagaacaagctgaaacctgagatggacgagaagggcaacctgaccaccgccggctttgcctgctctcagtgtggccagcccctgttcgtgtacaagctggagcaggtgtctgagaagggcaaggcttacaccaactacttcggacggtgcaatgtggccgagcacgaaaagctgatcctgctggcccagctgaagcccgagaaggatagcgacgaagccgtgacatatagcctgggaaagtttgggcagagggccctggatttctacagcattcatgtgaccaaggagtccacccaccccgtgaagcccctggcccagatcgccggaaacagatacgcctccggacctgtgggaaaggccctgagcgacgcatgtatgggcacaatcgcctccttcctgtctaagtaccaggacatcatcatcgaacaccagaaggtggtgaagggcaaccagaagagactggagagcctgcgggagctggccggcaaggaaaacctggaataccctagcgtgaccctgccacctcagcctcacaccaaggagggcgttgatgcctacaacgaagtgatcgcccgggtgcgaatgtgggtgaacctgaacctgtggcagaagctgaagctaagcagagatgatgccaagcctctgctgagactgaagggattcccttcctttcctctggtcgagagacaggccaacgaagtggactggtgggacatggtgtgtaacgtgaagaagctgatcaacgagaaaaaggaggatggcaaggtgttttggcagaatctggctggctacaagagacaggaagccctgagaccatacctgagcagcgaggaagatcggaagaagggaaagaaattcgctcggtaccagctgggcgacctgctgctgcacctggaaaagaagcacggcgaggactggggaaaggtgtacgacgaggcctgggagcggattgacaagaaagtggaaggcctgagcaagcacatcaagctggaagaggaacggagaagcgaggacgcccagagcaaggccgccctgaccgactggctgcgggctaaggccagcttcgtgatcgagggcctgaaggaggccgacaaggacgagttctgcagatgcgagctgaagctgcagaagtggtacggggacctgcggggaaagcccttcgccatcgaagccgagaacagcatcctggacatcagcggcttcagcaagcagtacaactgtgccttcatctggcagaaggacggcgtgaagaagctgaacctgtacctgatcatcaactacttcaagggcggcaagctgcggttcaagaagatcaaacctgaagccttcgaagccaacagattctacaccgtgatcaacaaaaagagcggcgagatcgtgcccatggaggtgaacttcaacttcgacgaccccaacctgatcatcctgcctctggcctttggcaagagacagggcagagaattcatctggaacgacctgctgtccctggaaaccggcagcctgaagctggccaacggaagagtgatcgagaagacactgtacaacagaagaacccggcaggatgagcctgccctgttcgtggccctgaccttcgagcggcgggaggtcctggactcctccaatatcaaaccaatgaacctgatcggcgtggcaagaggcgaaaacatccccgccgtgatcgccctgaccgaccccgagggctgcccactgagccggtttaaggatagcctgggaaacccaacccacatcctgagaatcggcgagagctataaggagaagcagcggaccatccaggccaagaaggaggtggagcagcggagagccggcggctacagccggaagtacgccagcaaagccaagaatctggcagacgatatggtgagaaacaccgctagagatctgctgtactacgccgtgacccaggatgccatgctgatcttcgccaacctgagccggggcttcggccggcagggcaagcggaccttcatggccgagagacagtacacacggatggaggactggctgaccgccaagctggcctacgagggcctgagcaagacctacctgtccaagacactggcccagtacacctccaagacatgcagcaactgtgggtttaccatcaccagcgccgactacgacagggtgctggagaagctgaagaagacagcaacaggctggatgaccacaattaacggcaaggagctgaaggtggagggccagattacctactacaacagatacaagagacagaacgtagtcaaggacctgtccgtcgagctggatagactgagcgaagaatctgtgaacaacgacatctcctcctggacaaagggcagaagcggagaagctctgagcctcctgaagaaaagattctcccatagacccgtgcaggagaagttcgtgtgcctgaactgcggcttcgagacacacgcagccgagcaagccgccctgaacatcgccagatcctggctgttcctgcggagccaggagtacaagaaataccagacaaacaagacaaccggcaacaccgataagagagccttcgtcgagacctggcagtccttttaccggaagaagcttaaggaggtgtggaaacctgccgtgcggtctggcggatctggcggaggctccacaagcacccaggagagcgtgatgttcgaggacgtggccgtggacttcaccagggaggagtggagccacctggaccccgcccagagggccctgtacagggaggtgatgctggagaactacgagaacctggtgagcctgggcctgcccgtgagcaagctggacgtgatcagcctgctggagaggggcgaggccccctggaggcccgagggcggcggccccaggtgcagctgccccgaccccttcatcgagaccagccccaagaaaaagagaaaagtctaagctgccttctgcggggcttgccttctggccatgcccttcttctctcccttgcacctgtacctcttggtctttgaataaagcctgagtaggaaggctagcaaaaaaaaaaaaaaaaaaaaaaaaaaaaaaaaaaaaaaaaaaaaaaaaaaaaaaaaaaaaaaaaaaaaaaaaaaaaaaaa

SEQ ID NO: 3668 - RNA, 5419 nt, synthetic construct
  source 1..5419: mol_type = other RNA
aggaaataagagagaaaagaagagtaagaagaaatataagagccaccatggcccctaagaagaagcgtaaagtgagccgggtgaacggcagcggcagcggcggcggcatgaaccacgaccaggagttcgacccccctaaggtgtaccctcccgtccccgccgagaagagaaagcccatccgggtcctgagcctgttcgatggcatcgccaccggtctgctggtgctgaaggacctgggcatccaggtggataggtacattgcctccgaggtgtgcgaggactccatcaccgtgggaatggtgcgtcatcagggcaagatcatgtacgtgggcgacgtgcggagcgtgacacagaagcatatccaggagtggggccctttcgacctggtgatcggcggcagcccttgcaatgacctgagcatcgtgaacccagcccggaagggcctgtacgagggaaccggcagactgttcttcgagttttacagactgctgcacgacgcccggcctaaggaaggcgacgaccggcccttcttttggctgttcgagaatgtggtggccatgggagtcagcgacaagcgggatattagccggttcctggagagcaaccccgtgatgatcgatgccaaggaagtgagcgccgcccaccgggccagatacttctggggcaatctgcctggcatgaacagacccctggccagcaccgtgaacgacaagctggagctgcaggagtgcctggagcacggccggatcgccaagttcagcaaggtgagaaccatcaccacccgaagcaacagcatcaaacaaggcaaggaccagcactttcctgtgttcatgaacgagaaggaggacatcctgtggtgtaccgagatggagagagtgttcgggttcccagtccactacacagatgtcagcaacatgtctagactggccagacagagactgctgggaagaagctggtccgtccctgtgatcagacacctgttcgcccctctgaaggagtacttcgcctgcgtgagcagcggcaacagcaacgccaacagccggggccccagcttctctagcggcctggtgccactgtccctgagagggagccacatgggccccatggagatctacaaaaccgtgagcgcctggaagcggcagcctgtgcgcgtgctgagcctgtttcggaatatcgataaagtcctgaaaagcctgggattcctggagagcggctctggctccggcggtggcaccctgaagtacgtggaggatgtgacaaacgtggtcagacgggatgtggagaagtggggccccttcgatctggtgtacggcagcacccaacccctgggcagctcttgtgaccggtgccctggctggtacatgtttcagttccaccggatcctgcagtacgccctgccgagacaggagtcccagcggccattcttttggattttcatggacaacttgctgctgaccgaggatgaccaggaaactaccactcggttcctgcagaccgaagccgtgaccctgcaggacgtgagaggccgggactaccagaacgccatgcgggtgtggtccaacatccctggactgaaaagcaagcacgcacctctgacccctaaagaagaggagtacctgcaggcccaggtgcggagcagaagcaagctggacgcccctaaggtggatctgctggtgaagaattgcctcctgcccctgagagagtacttcaagtatttcagccagaatagtctgcccctgggcggcccaagcagcggcgcccctcctcccagcggcggcagcccagccggctccccaacctctaccgaggagggcacctctgagtccgccacccccgagagcggccctggcacctccaccgagcccagcgagggcagcgcacccggcagccctgccggcagccccacctccacagaggagggaaccagcaccgagcccagcgaaggcagcgccccaggcaccagcaccgagcctagtgagggcggctctggcggcggcagcgcccaggagattaaacggatcaacaagatcagaagaagacttgtgaaagacagcaacaccaagaaggccggcaagacaggccccatgaaaaccctgctggttagagtgatgacacccgatctgagagagcggctggaaaacctgagaaagaagcctgaaaatatcccccagcccatcagcaatacatctagagccaacctgaataagctgctgaccgattacaccgaaatgaagaaggcgatcctgcatgtgtactgggaagagttccagaaggaccctgtgggcctgatgagccgggtggcccagcctgccagcaagaagatcgatcagaacaagctgaaacctgagatggacgagaagggcaacctgaccaccgccggctttgcctgctctcagtgtggccagcccctgttcgtgtacaagctggagcaggtgtctgagaagggcaaggcttacaccaactacttcggacggtgcaatgtggccgagcacgaaaagctgatcctgctggcccagctgaagcccgagaaggatagcgacgaagccgtgacatatagcctgggaaagtttgggcagagggccctggatttctacagcattcatgtgaccaaggagtccacccaccccgtgaagcccctggcccagatcgccggaaacagatacgcctccggacctgtgggaaaggccctgagcgacgcatgtatgggcacaatcgcctccttcctgtctaagtaccaggacatcatcatcgaacaccagaaggtggtgaagggcaaccagaagagactggagagcctgcgggagctggccggcaaggaaaacctggaataccctagcgtgaccctgccacctcagcctcacaccaaggagggcgttgatgcctacaacgaagtgatcgcccgggtgcgaatgtgggtgaacctgaacctgtggcagaagctgaagctaagcagagatgatgccaagcctctgctgagactgaagggattcccttcctttcctctggtcgagagacaggccaacgaagtggactggtgggacatggtgtgtaacgtgaagaagctgatcaacgagaaaaaggaggatggcaaggtgttttggcagaatctggctggctacaagagacaggaagccctgagaccatacctgagcagcgaggaagatcggaagaagggaaagaaattcgctcggtaccagctgggcgacctgctgctgcacctggaaaagaagcacggcgaggactggggaaaggtgtacgacgaggcctgggagcggattgacaagaaagtggaaggcctgagcaagcacatcaagctggaagaggaacggagaagcgaggacgcccagagcaaggccgccctgaccgactggctgcgggctaaggccagcttcgtgatcgagggcctgaaggaggccgacaaggacgagttctgcagatgcgagctgaagctgcagaagtggtacggggacctgcggggaaagcccttcgccatcgaagccgagaacagcatcctggacatcagcggcttcagcaagcagtacaactgtgccttcatctggcagaaggacggcgtgaagaagctgaacctgtacctgatcatcaactacttcaagggcggcaagctgcggttcaagaagatcaaacctgaagccttcgaagccaacagattctacaccgtgatcaacaaaaagagcggcgagatcgtgcccatggaggtgaacttcaacttcgacgaccccaacctgatcatcctgcctctggcctttggcaagagacagggcagagaattcatctggaacgacctgctgtccctggaaaccggcagcctgaagctggccaacggaagagtgatcgagaagacactgtacaacagaagaacccggcaggatgagcctgccctgttcgtggccctgaccttcgagcggcgggaggtcctggactcctccaatatcaaaccaatgaacctgatcggcgtggcaagaggcgaaaacatccccgccgtgatcgccctgaccgaccccgagggctgcccactgagccggtttaaggatagcctgggaaacccaacccacatcctgagaatcggcgagagctataaggagaagcagcggaccatccaggccaagaaggaggtggagcagcggagagccggcggctacagccggaagtacgccagcaaagccaagaatctggcagacgatatggtgagaaacaccgctagagatctgctgtactacgccgtgacccaggatgccatgctgatcttcgccaacctgagccggggcttcggccggcagggcaagcggaccttcatggccgagagacagtacacacggatggaggactggctgaccgccaagctggcctacgagggcctgagcaagacctacctgtccaagacactggcccagtacacctccaagacatgcagcaactgtgggtttaccatcaccagcgccgactacgacagggtgctggagaagctgaagaagacagcaacaggctggatgaccacaattaacggcaaggagctgaaggtggagggccagattacctactacaacagatacaagagacagaacgtagtcaaggacctgtccgtcgagctggatagactgagcgaagaatctgtgaacaacgacatctcctcctggacaaagggcagaagcggagaagctctgagcctcctgaagaaaagattctcccatagacccgtgcaggagaagttcgtgtgcctgaactgcggcttcgagacacacgcagccgagcaagccgccctgaacatcgccagatcctggctgttcctgcggagccaggagtacaagaaataccagacaaacaagacaaccggcaacaccgataagagagccttcgtcgagacctggcagtccttttaccggaagaagcttaaggaggtgtggaaacctgccgtgcggtctggcggatctggcggaggctccacaagcatggtgaccttcaaggacgtggccgtggccttcagcgaggaggagctgaggctgctggaccccgcccagaggaagctgtaccaggaggtgatggtggagaacttccagaacctgctgagcgtgggcatcaacaaccagagcgagctgagggccgtgcaggacggcggcagccacgaggccctgagctgctggcagatctggcagagggtgatcgacaacctgaccaggtgccaggacagcatgaccagccccaagaaaaagagaaaagtctaagctgccttctgcggggcttgccttctggccatgcccttcttctctcccttgcacctgtacctcttggtctttgaataaagcctgagtaggaaggctagcaaaaaaaaaaaaaaaaaaaaaaaaaaaaaaaaaaaaaaaaaaaaaaaaaaaaaaaaaaaaaaaaaaaaaaaaaaaaaaaa

SEQ ID NO: 3669 - RNA, 5419 nt, synthetic construct
  source 1..5419: mol_type = other RNA
aggaaataagagagaaaagaagagtaagaagaaatataagagccaccatggcccctaagaagaagcgtaaagtgagccgggtgaacggcagcggcagcggcggcggcatgaaccacgaccaggagttcgacccccctaaggtgtaccctcccgtccccgccgagaagagaaagcccatccgggtcctgagcctgttcgatggcatcgccaccggtctgctggtgctgaaggacctgggcatccaggtggataggtacattgcctccgaggtgtgcgaggactccatcaccgtgggaatggtgcgtcatcagggcaagatcatgtacgtgggcgacgtgcggagcgtgacacagaagcatatccaggagtggggccctttcgacctggtgatcggcggcagcccttgcaatgacctgagcatcgtgaacccagcccggaagggcctgtacgagggaaccggcagactgttcttcgagttttacagactgctgcacgacgcccggcctaaggaaggcgacgaccggcccttcttttggctgttcgagaatgtggtggccatgggagtcagcgacaagcgggatattagccggttcctggagagcaaccccgtgatgatcgatgccaaggaagtgagcgccgcccaccgggccagatacttctggggcaatctgcctggcatgaacagacccctggccagcaccgtgaacgacaagctggagctgcaggagtgcctggagcacggccggatcgccaagttcagcaaggtgagaaccatcaccacccgaagcaacagcatcaaacaaggcaaggaccagcactttcctgtgttcatgaacgagaaggaggacatcctgtggtgtaccgagatggagagagtgttcgggttcccagtccactacacagatgtcagcaacatgtctagactggccagacagagactgctgggaagaagctggtccgtccctgtgatcagacacctgttcgcccctctgaaggagtacttcgcctgcgtgagcagcggcaacagcaacgccaacagccggggccccagcttctctagcggcctggtgccactgtccctgagagggagccacatgggccccatggagatctacaaaaccgtgagcgcctggaagcggcagcctgtgcgcgtgctgagcctgtttcggaatatcgataaagtcctgaaaagcctgggattcctggagagcggctctggctccggcggtggcaccctgaagtacgtggaggatgtgacaaacgtggtcagacgggatgtggagaagtggggccccttcgatctggtgtacggcagcacccaacccctgggcagctcttgtgaccggtgccctggctggtacatgtttcagttccaccggatcctgcagtacgccctgccgagacaggagtcccagcggccattcttttggattttcatggacaacttgctgctgaccgaggatgaccaggaaactaccactcggttcctgcagaccgaagccgtgaccctgcaggacgtgagaggccgggactaccagaacgccatgcgggtgtggtccaacatccctggactgaaaagcaagcacgcacctctgacccctaaagaagaggagtacctgcaggcccaggtgcggagcagaagcaagctggacgcccctaaggtggatctgctggtgaagaattgcctcctgcccctgagagagtacttcaagtatttcagccagaatagtctgcccctgggcggcccaagcagcggcgcccctcctcccagcggcggcagcccagccggctccccaacctctaccgaggagggcacctctgagtccgccacccccgagagcggccctggcacctccaccgagcccagcgagggcagcgcacccggcagccctgccggcagccccacctccacagaggagggaaccagcaccgagcccagcgaaggcagcgccccaggcaccagcaccgagcctagtgagggcggctctggcggcggcagcgcccaggagattaaacggatcaacaagatcagaagaagacttgtgaaagacagcaacaccaagaaggccggcaagacaggccccatgaaaaccctgctggttagagtgatgacacccgatctgagagagcggctggaaaacctgagaaagaagcctgaaaatatcccccagcccatcagcaatacatctagagccaacctgaataagctgctgaccgattacaccgaaatgaagaaggcgatcctgcatgtgtactgggaagagttccagaaggaccctgtgggcctgatgagccgggtggcccagcctgccagcaagaagatcgatcagaacaagctgaaacctgagatggacgagaagggcaacctgaccaccgccggctttgcctgctctcagtgtggccagcccctgttcgtgtacaagctggagcaggtgtctgagaagggcaaggcttacaccaactacttcggacggtgcaatgtggccgagcacgaaaagctgatcctgctggcccagctgaagcccgagaaggatagcgacgaagccgtgacatatagcctgggaaagtttgggcagagggccctggatttctacagcattcatgtgaccaaggagtccacccaccccgtgaagcccctggcccagatcgccggaaacagatacgcctccggacctgtgggaaaggccctgagcgacgcatgtatgggcacaatcgcctccttcctgtctaagtaccaggacatcatcatcgaacaccagaaggtggtgaagggcaaccagaagagactggagagcctgcgggagctggccggcaaggaaaacctggaataccctagcgtgaccctgccacctcagcctcacaccaaggagggcgttgatgcctacaacgaagtgatcgcccgggtgcgaatgtgggtgaacctgaacctgtggcagaagctgaagctaagcagagatgatgccaagcctctgctgagactgaagggattcccttcctttcctctggtcgagagacaggccaacgaagtggactggtgggacatggtgtgtaacgtgaagaagctgatcaacgagaaaaaggaggatggcaaggtgttttggcagaatctggctggctacaagagacaggaagccctgagaccatacctgagcagcgaggaagatcggaagaagggaaagaaattcgctcggtaccagctgggcgacctgctgctgcacctggaaaagaagcacggcgaggactggggaaaggtgtacgacgaggcctgggagcggattgacaagaaagtggaaggcctgagcaagcacatcaagctggaagaggaacggagaagcgaggacgcccagagcaaggccgccctgaccgactggctgcgggctaaggccagcttcgtgatcgagggcctgaaggaggccgacaaggacgagttctgcagatgcgagctgaagctgcagaagtggtacggggacctgcggggaaagcccttcgccatcgaagccgagaacagcatcctggacatcagcggcttcagcaagcagtacaactgtgccttcatctggcagaaggacggcgtgaagaagctgaacctgtacctgatcatcaactacttcaagggcggcaagctgcggttcaagaagatcaaacctgaagccttcgaagccaacagattctacaccgtgatcaacaaaaagagcggcgagatcgtgcccatggaggtgaacttcaacttcgacgaccccaacctgatcatcctgcctctggcctttggcaagagacagggcagagaattcatctggaacgacctgctgtccctggaaaccggcagcctgaagctggccaacggaagagtgatcgagaagacactgtacaacagaagaacccggcaggatgagcctgccctgttcgtggccctgaccttcgagcggcgggaggtcctggactcctccaatatcaaaccaatgaacctgatcggcgtggcaagaggcgaaaacatccccgccgtgatcgccctgaccgaccccgagggctgcccactgagccggtttaaggatagcctgggaaacccaacccacatcctgagaatcggcgagagctataaggagaagcagcggaccatccaggccaagaaggaggtggagcagcggagagccggcggctacagccggaagtacgccagcaaagccaagaatctggcagacgatatggtgagaaacaccgctagagatctgctgtactacgccgtgacccaggatgccatgctgatcttcgccaacctgagccggggcttcggccggcagggcaagcggaccttcatggccgagagacagtacacacggatggaggactggctgaccgccaagctggcctacgagggcctgagcaagacctacctgtccaagacactggcccagtacacctccaagacatgcagcaactgtgggtttaccatcaccagcgccgactacgacagggtgctggagaagctgaagaagacagcaacaggctggatgaccacaattaacggcaaggagctgaaggtggagggccagattacctactacaacagatacaagagacagaacgtagtcaaggacctgtccgtcgagctggatagactgagcgaagaatctgtgaacaacgacatctcctcctggacaaagggcagaagcggagaagctctgagcctcctgaagaaaagattctcccatagacccgtgcaggagaagttcgtgtgcctgaactgcggcttcgagacacacgcagccgagcaagccgccctgaacatcgccagatcctggctgttcctgcggagccaggagtacaagaaataccagacaaacaagacaaccggcaacaccgataagagagccttcgtcgagacctggcagtccttttaccggaagaagcttaaggaggtgtggaaacctgccgtgcggtctggcggatctggcggaggctccacaagcatgcccggcccccccggcagcctggagatgggcgtgctgaccttcagggacgtggccatcgagttcagcctggaggagtggcagtgcctggacatcacccagcagaacctgtacaggaacgtgatgctggagaactacaggaacctggtgttcgtgggcatcgccgccagcaagcccgacctgatcacctgcctggagcagggcaaggagccctggaacgtgaagaggcacgagatggtggccaccagccccaagaaaaagagaaaagtctaagctgccttctgcggggcttgccttctggccatgcccttcttctctcccttgcacctgtacctcttggtctttgaataaagcctgagtaggaaggctagcaaaaaaaaaaaaaaaaaaaaaaaaaaaaaaaaaaaaaaaaaaaaaaaaaaaaaaaaaaaaaaaaaaaaaaaaaaaaaaaa

SEQ ID NO: 3670 - RNA, 5419 nt, synthetic construct
  source 1..5419: mol_type = other RNA
aggaaataagagagaaaagaagagtaagaagaaatataagagccaccatggcccctaagaagaagcgtaaagtgagccgggtgaacggcagcggcagcggcggcggcatgaaccacgaccaggagttcgacccccctaaggtgtaccctcccgtccccgccgagaagagaaagcccatccgggtcctgagcctgttcgatggcatcgccaccggtctgctggtgctgaaggacctgggcatccaggtggataggtacattgcctccgaggtgtgcgaggactccatcaccgtgggaatggtgcgtcatcagggcaagatcatgtacgtgggcgacgtgcggagcgtgacacagaagcatatccaggagtggggccctttcgacctggtgatcggcggcagcccttgcaatgacctgagcatcgtgaacccagcccggaagggcctgtacgagggaaccggcagactgttcttcgagttttacagactgctgcacgacgcccggcctaaggaaggcgacgaccggcccttcttttggctgttcgagaatgtggtggccatgggagtcagcgacaagcgggatattagccggttcctggagagcaaccccgtgatgatcgatgccaaggaagtgagcgccgcccaccgggccagatacttctggggcaatctgcctggcatgaacagacccctggccagcaccgtgaacgacaagctggagctgcaggagtgcctggagcacggccggatcgccaagttcagcaaggtgagaaccatcaccacccgaagcaacagcatcaaacaaggcaaggaccagcactttcctgtgttcatgaacgagaaggaggacatcctgtggtgtaccgagatggagagagtgttcgggttcccagtccactacacagatgtcagcaacatgtctagactggccagacagagactgctgggaagaagctggtccgtccctgtgatcagacacctgttcgcccctctgaaggagtacttcgcctgcgtgagcagcggcaacagcaacgccaacagccggggccccagcttctctagcggcctggtgccactgtccctgagagggagccacatgggccccatggagatctacaaaaccgtgagcgcctggaagcggcagcctgtgcgcgtgctgagcctgtttcggaatatcgataaagtcctgaaaagcctgggattcctggagagcggctctggctccggcggtggcaccctgaagtacgtggaggatgtgacaaacgtggtcagacgggatgtggagaagtggggccccttcgatctggtgtacggcagcacccaacccctgggcagctcttgtgaccggtgccctggctggtacatgtttcagttccaccggatcctgcagtacgccctgccgagacaggagtcccagcggccattcttttggattttcatggacaacttgctgctgaccgaggatgaccaggaaactaccactcggttcctgcagaccgaagccgtgaccctgcaggacgtgagaggccgggactaccagaacgccatgcgggtgtggtccaacatccctggactgaaaagcaagcacgcacctctgacccctaaagaagaggagtacctgcaggcccaggtgcggagcagaagcaagctggacgcccctaaggtggatctgctggtgaagaattgcctcctgcccctgagagagtacttcaagtatttcagccagaatagtctgcccctgggcggcccaagcagcggcgcccctcctcccagcggcggcagcccagccggctccccaacctctaccgaggagggcacctctgagtccgccacccccgagagcggccctggcacctccaccgagcccagcgagggcagcgcacccggcagccctgccggcagccccacctccacagaggagggaaccagcaccgagcccagcgaaggcagcgccccaggcaccagcaccgagcctagtgagggcggctctggcggcggcagcgcccaggagattaaacggatcaacaagatcagaagaagacttgtgaaagacagcaacaccaagaaggccggcaagacaggccccatgaaaaccctgctggttagagtgatgacacccgatctgagagagcggctggaaaacctgagaaagaagcctgaaaatatcccccagcccatcagcaatacatctagagccaacctgaataagctgctgaccgattacaccgaaatgaagaaggcgatcctgcatgtgtactgggaagagttccagaaggaccctgtgggcctgatgagccgggtggcccagcctgccagcaagaagatcgatcagaacaagctgaaacctgagatggacgagaagggcaacctgaccaccgccggctttgcctgctctcagtgtggccagcccctgttcgtgtacaagctggagcaggtgtctgagaagggcaaggcttacaccaactacttcggacggtgcaatgtggccgagcacgaaaagctgatcctgctggcccagctgaagcccgagaaggatagcgacgaagccgtgacatatagcctgggaaagtttgggcagagggccctggatttctacagcattcatgtgaccaaggagtccacccaccccgtgaagcccctggcccagatcgccggaaacagatacgcctccggacctgtgggaaaggccctgagcgacgcatgtatgggcacaatcgcctccttcctgtctaagtaccaggacatcatcatcgaacaccagaaggtggtgaagggcaaccagaagagactggagagcctgcgggagctggccggcaaggaaaacctggaataccctagcgtgaccctgccacctcagcctcacaccaaggagggcgttgatgcctacaacgaagtgatcgcccgggtgcgaatgtgggtgaacctgaacctgtggcagaagctgaagctaagcagagatgatgccaagcctctgctgagactgaagggattcccttcctttcctctggtcgagagacaggccaacgaagtggactggtgggacatggtgtgtaacgtgaagaagctgatcaacgagaaaaaggaggatggcaaggtgttttggcagaatctggctggctacaagagacaggaagccctgagaccatacctgagcagcgaggaagatcggaagaagggaaagaaattcgctcggtaccagctgggcgacctgctgctgcacctggaaaagaagcacggcgaggactggggaaaggtgtacgacgaggcctgggagcggattgacaagaaagtggaaggcctgagcaagcacatcaagctggaagaggaacggagaagcgaggacgcccagagcaaggccgccctgaccgactggctgcgggctaaggccagcttcgtgatcgagggcctgaaggaggccgacaaggacgagttctgcagatgcgagctgaagctgcagaagtggtacggggacctgcggggaaagcccttcgccatcgaagccgagaacagcatcctggacatcagcggcttcagcaagcagtacaactgtgccttcatctggcagaaggacggcgtgaagaagctgaacctgtacctgatcatcaactacttcaagggcggcaagctgcggttcaagaagatcaaacctgaagccttcgaagccaacagattctacaccgtgatcaacaaaaagagcggcgagatcgtgcccatggaggtgaacttcaacttcgacgaccccaacctgatcatcctgcctctggcctttggcaagagacagggcagagaattcatctggaacgacctgctgtccctggaaaccggcagcctgaagctggccaacggaagagtgatcgagaagacactgtacaacagaagaacccggcaggatgagcctgccctgttcgtggccctgaccttcgagcggcgggaggtcctggactcctccaatatcaaaccaatgaacctgatcggcgtggcaagaggcgaaaacatccccgccgtgatcgccctgaccgaccccgagggctgcccactgagccggtttaaggatagcctgggaaacccaacccacatcctgagaatcggcgagagctataaggagaagcagcggaccatccaggccaagaaggaggtggagcagcggagagccggcggctacagccggaagtacgccagcaaagccaagaatctggcagacgatatggtgagaaacaccgctagagatctgctgtactacgccgtgacccaggatgccatgctgatcttcgccaacctgagccggggcttcggccggcagggcaagcggaccttcatggccgagagacagtacacacggatggaggactggctgaccgccaagctggcctacgagggcctgagcaagacctacctgtccaagacactggcccagtacacctccaagacatgcagcaactgtgggtttaccatcaccagcgccgactacgacagggtgctggagaagctgaagaagacagcaacaggctggatgaccacaattaacggcaaggagctgaaggtggagggccagattacctactacaacagatacaagagacagaacgtagtcaaggacctgtccgtcgagctggatagactgagcgaagaatctgtgaacaacgacatctcctcctggacaaagggcagaagcggagaagctctgagcctcctgaagaaaagattctcccatagacccgtgcaggagaagttcgtgtgcctgaactgcggcttcgagacacacgcagccgagcaagccgccctgaacatcgccagatcctggctgttcctgcggagccaggagtacaagaaataccagacaaacaagacaaccggcaacaccgataagagagccttcgtcgagacctggcagtccttttaccggaagaagcttaaggaggtgtggaaacctgccgtgcggtctggcggatctggcggaggctccacaagcgacatgggcctggtgagcttcgaggacgtggccgtggacttcacctggcaggagtggcaggagctggacgccgcccagaggaccctgtacagggacgtgatgctggagaactacaggagcctggtgtggctgggccactgcctggccaagcccgagctgatcagcaagctggaggagggcttcgagccctggggcgtggccgaggccaccgagcagtgcctgccctgcgccgaggaccagaccaccagccccaagaaaaagagaaaagtctaagctgccttctgcggggcttgccttctggccatgcccttcttctctcccttgcacctgtacctcttggtctttgaataaagcctgagtaggaaggctagcaaaaaaaaaaaaaaaaaaaaaaaaaaaaaaaaaaaaaaaaaaaaaaaaaaaaaaaaaaaaaaaaaaaaaaaaaaaaaaaa

SEQ ID NO: 3671 - RNA, 5419 nt, synthetic construct
  source 1..5419: mol_type = other RNA
aggaaataagagagaaaagaagagtaagaagaaatataagagccaccatggcccctaagaagaagcgtaaagtgagccgggtgaacggcagcggcagcggcggcggcatgaaccacgaccaggagttcgacccccctaaggtgtaccctcccgtccccgccgagaagagaaagcccatccgggtcctgagcctgttcgatggcatcgccaccggtctgctggtgctgaaggacctgggcatccaggtggataggtacattgcctccgaggtgtgcgaggactccatcaccgtgggaatggtgcgtcatcagggcaagatcatgtacgtgggcgacgtgcggagcgtgacacagaagcatatccaggagtggggccctttcgacctggtgatcggcggcagcccttgcaatgacctgagcatcgtgaacccagcccggaagggcctgtacgagggaaccggcagactgttcttcgagttttacagactgctgcacgacgcccggcctaaggaaggcgacgaccggcccttcttttggctgttcgagaatgtggtggccatgggagtcagcgacaagcgggatattagccggttcctggagagcaaccccgtgatgatcgatgccaaggaagtgagcgccgcccaccgggccagatacttctggggcaatctgcctggcatgaacagacccctggccagcaccgtgaacgacaagctggagctgcaggagtgcctggagcacggccggatcgccaagttcagcaaggtgagaaccatcaccacccgaagcaacagcatcaaacaaggcaaggaccagcactttcctgtgttcatgaacgagaaggaggacatcctgtggtgtaccgagatggagagagtgttcgggttcccagtccactacacagatgtcagcaacatgtctagactggccagacagagactgctgggaagaagctggtccgtccctgtgatcagacacctgttcgcccctctgaaggagtacttcgcctgcgtgagcagcggcaacagcaacgccaacagccggggccccagcttctctagcggcctggtgccactgtccctgagagggagccacatgggccccatggagatctacaaaaccgtgagcgcctggaagcggcagcctgtgcgcgtgctgagcctgtttcggaatatcgataaagtcctgaaaagcctgggattcctggagagcggctctggctccggcggtggcaccctgaagtacgtggaggatgtgacaaacgtggtcagacgggatgtggagaagtggggccccttcgatctggtgtacggcagcacccaacccctgggcagctcttgtgaccggtgccctggctggtacatgtttcagttccaccggatcctgcagtacgccctgccgagacaggagtcccagcggccattcttttggattttcatggacaacttgctgctgaccgaggatgaccaggaaactaccactcggttcctgcagaccgaagccgtgaccctgcaggacgtgagaggccgggactaccagaacgccatgcgggtgtggtccaacatccctggactgaaaagcaagcacgcacctctgacccctaaagaagaggagtacctgcaggcccaggtgcggagcagaagcaagctggacgcccctaaggtggatctgctggtgaagaattgcctcctgcccctgagagagtacttcaagtatttcagccagaatagtctgcccctgggcggcccaagcagcggcgcccctcctcccagcggcggcagcccagccggctccccaacctctaccgaggagggcacctctgagtccgccacccccgagagcggccctggcacctccaccgagcccagcgagggcagcgcacccggcagccctgccggcagccccacctccacagaggagggaaccagcaccgagcccagcgaaggcagcgccccaggcaccagcaccgagcctagtgagggcggctctggcggcggcagcgcccaggagattaaacggatcaacaagatcagaagaagacttgtgaaagacagcaacaccaagaaggccggcaagacaggccccatgaaaaccctgctggttagagtgatgacacccgatctgagagagcggctggaaaacctgagaaagaagcctgaaaatatcccccagcccatcagcaatacatctagagccaacctgaataagctgctgaccgattacaccgaaatgaagaaggcgatcctgcatgtgtactgggaagagttccagaaggaccctgtgggcctgatgagccgggtggcccagcctgccagcaagaagatcgatcagaacaagctgaaacctgagatggacgagaagggcaacctgaccaccgccggctttgcctgctctcagtgtggccagcccctgttcgtgtacaagctggagcaggtgtctgagaagggcaaggcttacaccaactacttcggacggtgcaatgtggccgagcacgaaaagctgatcctgctggcccagctgaagcccgagaaggatagcgacgaagccgtgacatatagcctgggaaagtttgggcagagggccctggatttctacagcattcatgtgaccaaggagtccacccaccccgtgaagcccctggcccagatcgccggaaacagatacgcctccggacctgtgggaaaggccctgagcgacgcatgtatgggcacaatcgcctccttcctgtctaagtaccaggacatcatcatcgaacaccagaaggtggtgaagggcaaccagaagagactggagagcctgcgggagctggccggcaaggaaaacctggaataccctagcgtgaccctgccacctcagcctcacaccaaggagggcgttgatgcctacaacgaagtgatcgcccgggtgcgaatgtgggtgaacctgaacctgtggcagaagctgaagctaagcagagatgatgccaagcctctgctgagactgaagggattcccttcctttcctctggtcgagagacaggccaacgaagtggactggtgggacatggtgtgtaacgtgaagaagctgatcaacgagaaaaaggaggatggcaaggtgttttggcagaatctggctggctacaagagacaggaagccctgagaccatacctgagcagcgaggaagatcggaagaagggaaagaaattcgctcggtaccagctgggcgacctgctgctgcacctggaaaagaagcacggcgaggactggggaaaggtgtacgacgaggcctgggagcggattgacaagaaagtggaaggcctgagcaagcacatcaagctggaagaggaacggagaagcgaggacgcccagagcaaggccgccctgaccgactggctgcgggctaaggccagcttcgtgatcgagggcctgaaggaggccgacaaggacgagttctgcagatgcgagctgaagctgcagaagtggtacggggacctgcggggaaagcccttcgccatcgaagccgagaacagcatcctggacatcagcggcttcagcaagcagtacaactgtgccttcatctggcagaaggacggcgtgaagaagctgaacctgtacctgatcatcaactacttcaagggcggcaagctgcggttcaagaagatcaaacctgaagccttcgaagccaacagattctacaccgtgatcaacaaaaagagcggcgagatcgtgcccatggaggtgaacttcaacttcgacgaccccaacctgatcatcctgcctctggcctttggcaagagacagggcagagaattcatctggaacgacctgctgtccctggaaaccggcagcctgaagctggccaacggaagagtgatcgagaagacactgtacaacagaagaacccggcaggatgagcctgccctgttcgtggccctgaccttcgagcggcgggaggtcctggactcctccaatatcaaaccaatgaacctgatcggcgtggcaagaggcgaaaacatccccgccgtgatcgccctgaccgaccccgagggctgcccactgagccggtttaaggatagcctgggaaacccaacccacatcctgagaatcggcgagagctataaggagaagcagcggaccatccaggccaagaaggaggtggagcagcggagagccggcggctacagccggaagtacgccagcaaagccaagaatctggcagacgatatggtgagaaacaccgctagagatctgctgtactacgccgtgacccaggatgccatgctgatcttcgccaacctgagccggggcttcggccggcagggcaagcggaccttcatggccgagagacagtacacacggatggaggactggctgaccgccaagctggcctacgagggcctgagcaagacctacctgtccaagacactggcccagtacacctccaagacatgcagcaactgtgggtttaccatcaccagcgccgactacgacagggtgctggagaagctgaagaagacagcaacaggctggatgaccacaattaacggcaaggagctgaaggtggagggccagattacctactacaacagatacaagagacagaacgtagtcaaggacctgtccgtcgagctggatagactgagcgaagaatctgtgaacaacgacatctcctcctggacaaagggcagaagcggagaagctctgagcctcctgaagaaaagattctcccatagacccgtgcaggagaagttcgtgtgcctgaactgcggcttcgagacacacgcagccgagcaagccgccctgaacatcgccagatcctggctgttcctgcggagccaggagtacaagaaataccagacaaacaagacaaccggcaacaccgataagagagccttcgtcgagacctggcagtccttttaccggaagaagcttaaggaggtgtggaaacctgccgtgcggtctggcggatctggcggaggctccacaagcctgcagggccagctgaccttcagggacgtggccatcgagttcagcgaggaggagtggaggtgcctgacccacacccagaggcagctgtacagggacatgatgctggagaactacaggcacctgctgttcctgggcctgatcgtgagcaagcccgacctggtgagcttcctggagcagaagaaggacccctgggacgtgaagaggaagaagaccgtggtgttcgaccccggcaggtgggagtggaccagccccaagaaaaagagaaaagtctaagctgccttctgcggggcttgccttctggccatgcccttcttctctcccttgcacctgtacctcttggtctttgaataaagcctgagtaggaaggctagcaaaaaaaaaaaaaaaaaaaaaaaaaaaaaaaaaaaaaaaaaaaaaaaaaaaaaaaaaaaaaaaaaaaaaaaaaaaaaaaa

SEQ ID NO: 3672 - RNA, 5419 nt, synthetic construct
  source 1..5419: mol_type = other RNA
aggaaataagagagaaaagaagagtaagaagaaatataagagccaccatggcccctaagaagaagcgtaaagtgagccgggtgaacggcagcggcagcggcggcggcatgaaccacgaccaggagttcgacccccctaaggtgtaccctcccgtccccgccgagaagagaaagcccatccgggtcctgagcctgttcgatggcatcgccaccggtctgctggtgctgaaggacctgggcatccaggtggataggtacattgcctccgaggtgtgcgaggactccatcaccgtgggaatggtgcgtcatcagggcaagatcatgtacgtgggcgacgtgcggagcgtgacacagaagcatatccaggagtggggccctttcgacctggtgatcggcggcagcccttgcaatgacctgagcatcgtgaacccagcccggaagggcctgtacgagggaaccggcagactgttcttcgagttttacagactgctgcacgacgcccggcctaaggaaggcgacgaccggcccttcttttggctgttcgagaatgtggtggccatgggagtcagcgacaagcgggatattagccggttcctggagagcaaccccgtgatgatcgatgccaaggaagtgagcgccgcccaccgggccagatacttctggggcaatctgcctggcatgaacagacccctggccagcaccgtgaacgacaagctggagctgcaggagtgcctggagcacggccggatcgccaagttcagcaaggtgagaaccatcaccacccgaagcaacagcatcaaacaaggcaaggaccagcactttcctgtgttcatgaacgagaaggaggacatcctgtggtgtaccgagatggagagagtgttcgggttcccagtccactacacagatgtcagcaacatgtctagactggccagacagagactgctgggaagaagctggtccgtccctgtgatcagacacctgttcgcccctctgaaggagtacttcgcctgcgtgagcagcggcaacagcaacgccaacagccggggccccagcttctctagcggcctggtgccactgtccctgagagggagccacatgggccccatggagatctacaaaaccgtgagcgcctggaagcggcagcctgtgcgcgtgctgagcctgtttcggaatatcgataaagtcctgaaaagcctgggattcctggagagcggctctggctccggcggtggcaccctgaagtacgtggaggatgtgacaaacgtggtcagacgggatgtggagaagtggggccccttcgatctggtgtacggcagcacccaacccctgggcagctcttgtgaccggtgccctggctggtacatgtttcagttccaccggatcctgcagtacgccctgccgagacaggagtcccagcggccattcttttggattttcatggacaacttgctgctgaccgaggatgaccaggaaactaccactcggttcctgcagaccgaagccgtgaccctgcaggacgtgagaggccgggactaccagaacgccatgcgggtgtggtccaacatccctggactgaaaagcaagcacgcacctctgacccctaaagaagaggagtacctgcaggcccaggtgcggagcagaagcaagctggacgcccctaaggtggatctgctggtgaagaattgcctcctgcccctgagagagtacttcaagtatttcagccagaatagtctgcccctgggcggcccaagcagcggcgcccctcctcccagcggcggcagcccagccggctccccaacctctaccgaggagggcacctctgagtccgccacccccgagagcggccctggcacctccaccgagcccagcgagggcagcgcacccggcagccctgccggcagccccacctccacagaggagggaaccagcaccgagcccagcgaaggcagcgccccaggcaccagcaccgagcctagtgagggcggctctggcggcggcagcgcccaggagattaaacggatcaacaagatcagaagaagacttgtgaaagacagcaacaccaagaaggccggcaagacaggccccatgaaaaccctgctggttagagtgatgacacccgatctgagagagcggctggaaaacctgagaaagaagcctgaaaatatcccccagcccatcagcaatacatctagagccaacctgaataagctgctgaccgattacaccgaaatgaagaaggcgatcctgcatgtgtactgggaagagttccagaaggaccctgtgggcctgatgagccgggtggcccagcctgccagcaagaagatcgatcagaacaagctgaaacctgagatggacgagaagggcaacctgaccaccgccggctttgcctgctctcagtgtggccagcccctgttcgtgtacaagctggagcaggtgtctgagaagggcaaggcttacaccaactacttcggacggtgcaatgtggccgagcacgaaaagctgatcctgctggcccagctgaagcccgagaaggatagcgacgaagccgtgacatatagcctgggaaagtttgggcagagggccctggatttctacagcattcatgtgaccaaggagtccacccaccccgtgaagcccctggcccagatcgccggaaacagatacgcctccggacctgtgggaaaggccctgagcgacgcatgtatgggcacaatcgcctccttcctgtctaagtaccaggacatcatcatcgaacaccagaaggtggtgaagggcaaccagaagagactggagagcctgcgggagctggccggcaaggaaaacctggaataccctagcgtgaccctgccacctcagcctcacaccaaggagggcgttgatgcctacaacgaagtgatcgcccgggtgcgaatgtgggtgaacctgaacctgtggcagaagctgaagctaagcagagatgatgccaagcctctgctgagactgaagggattcccttcctttcctctggtcgagagacaggccaacgaagtggactggtgggacatggtgtgtaacgtgaagaagctgatcaacgagaaaaaggaggatggcaaggtgttttggcagaatctggctggctacaagagacaggaagccctgagaccatacctgagcagcgaggaagatcggaagaagggaaagaaattcgctcggtaccagctgggcgacctgctgctgcacctggaaaagaagcacggcgaggactggggaaaggtgtacgacgaggcctgggagcggattgacaagaaagtggaaggcctgagcaagcacatcaagctggaagaggaacggagaagcgaggacgcccagagcaaggccgccctgaccgactggctgcgggctaaggccagcttcgtgatcgagggcctgaaggaggccgacaaggacgagttctgcagatgcgagctgaagctgcagaagtggtacggggacctgcggggaaagcccttcgccatcgaagccgagaacagcatcctggacatcagcggcttcagcaagcagtacaactgtgccttcatctggcagaaggacggcgtgaagaagctgaacctgtacctgatcatcaactacttcaagggcggcaagctgcggttcaagaagatcaaacctgaagccttcgaagccaacagattctacaccgtgatcaacaaaaagagcggcgagatcgtgcccatggaggtgaacttcaacttcgacgaccccaacctgatcatcctgcctctggcctttggcaagagacagggcagagaattcatctggaacgacctgctgtccctggaaaccggcagcctgaagctggccaacggaagagtgatcgagaagacactgtacaacagaagaacccggcaggatgagcctgccctgttcgtggccctgaccttcgagcggcgggaggtcctggactcctccaatatcaaaccaatgaacctgatcggcgtggcaagaggcgaaaacatccccgccgtgatcgccctgaccgaccccgagggctgcccactgagccggtttaaggatagcctgggaaacccaacccacatcctgagaatcggcgagagctataaggagaagcagcggaccatccaggccaagaaggaggtggagcagcggagagccggcggctacagccggaagtacgccagcaaagccaagaatctggcagacgatatggtgagaaacaccgctagagatctgctgtactacgccgtgacccaggatgccatgctgatcttcgccaacctgagccggggcttcggccggcagggcaagcggaccttcatggccgagagacagtacacacggatggaggactggctgaccgccaagctggcctacgagggcctgagcaagacctacctgtccaagacactggcccagtacacctccaagacatgcagcaactgtgggtttaccatcaccagcgccgactacgacagggtgctggagaagctgaagaagacagcaacaggctggatgaccacaattaacggcaaggagctgaaggtggagggccagattacctactacaacagatacaagagacagaacgtagtcaaggacctgtccgtcgagctggatagactgagcgaagaatctgtgaacaacgacatctcctcctggacaaagggcagaagcggagaagctctgagcctcctgaagaaaagattctcccatagacccgtgcaggagaagttcgtgtgcctgaactgcggcttcgagacacacgcagccgagcaagccgccctgaacatcgccagatcctggctgttcctgcggagccaggagtacaagaaataccagacaaacaagacaaccggcaacaccgataagagagccttcgtcgagacctggcagtccttttaccggaagaagcttaaggaggtgtggaaacctgccgtgcggtctggcggatctggcggaggctccacaagcagccaggagcccgtgaccttcgccgacgtggccgtggtgttcacccccgaggagtgggtgttcctggacagcacccagaggagcctgtacagggacgtgatgctggagaactacaggaacctggccagcgtggccgaccagctgtgcaagcccaacgccagcagctacctggagcagaggggcgagcagtggaccaccgacaggggcatcctggccgacacctgcgccgagccccagctgcagaccagccccaagaaaaagagaaaagtctaagctgccttctgcggggcttgccttctggccatgcccttcttctctcccttgcacctgtacctcttggtctttgaataaagcctgagtaggaaggctagcaaaaaaaaaaaaaaaaaaaaaaaaaaaaaaaaaaaaaaaaaaaaaaaaaaaaaaaaaaaaaaaaaaaaaaaaaaaaaaaa

SEQ ID NO: 3673 - RNA, 5419 nt, synthetic construct
  source 1..5419: mol_type = other RNA
aggaaataagagagaaaagaagagtaagaagaaatataagagccaccatggcccctaagaagaagcgtaaagtgagccgggtgaacggcagcggcagcggcggcggcatgaaccacgaccaggagttcgacccccctaaggtgtaccctcccgtccccgccgagaagagaaagcccatccgggtcctgagcctgttcgatggcatcgccaccggtctgctggtgctgaaggacctgggcatccaggtggataggtacattgcctccgaggtgtgcgaggactccatcaccgtgggaatggtgcgtcatcagggcaagatcatgtacgtgggcgacgtgcggagcgtgacacagaagcatatccaggagtggggccctttcgacctggtgatcggcggcagcccttgcaatgacctgagcatcgtgaacccagcccggaagggcctgtacgagggaaccggcagactgttcttcgagttttacagactgctgcacgacgcccggcctaaggaaggcgacgaccggcccttcttttggctgttcgagaatgtggtggccatgggagtcagcgacaagcgggatattagccggttcctggagagcaaccccgtgatgatcgatgccaaggaagtgagcgccgcccaccgggccagatacttctggggcaatctgcctggcatgaacagacccctggccagcaccgtgaacgacaagctggagctgcaggagtgcctggagcacggccggatcgccaagttcagcaaggtgagaaccatcaccacccgaagcaacagcatcaaacaaggcaaggaccagcactttcctgtgttcatgaacgagaaggaggacatcctgtggtgtaccgagatggagagagtgttcgggttcccagtccactacacagatgtcagcaacatgtctagactggccagacagagactgctgggaagaagctggtccgtccctgtgatcagacacctgttcgcccctctgaaggagtacttcgcctgcgtgagcagcggcaacagcaacgccaacagccggggccccagcttctctagcggcctggtgccactgtccctgagagggagccacatgggccccatggagatctacaaaaccgtgagcgcctggaagcggcagcctgtgcgcgtgctgagcctgtttcggaatatcgataaagtcctgaaaagcctgggattcctggagagcggctctggctccggcggtggcaccctgaagtacgtggaggatgtgacaaacgtggtcagacgggatgtggagaagtggggccccttcgatctggtgtacggcagcacccaacccctgggcagctcttgtgaccggtgccctggctggtacatgtttcagttccaccggatcctgcagtacgccctgccgagacaggagtcccagcggccattcttttggattttcatggacaacttgctgctgaccgaggatgaccaggaaactaccactcggttcctgcagaccgaagccgtgaccctgcaggacgtgagaggccgggactaccagaacgccatgcgggtgtggtccaacatccctggactgaaaagcaagcacgcacctctgacccctaaagaagaggagtacctgcaggcccaggtgcggagcagaagcaagctggacgcccctaaggtggatctgctggtgaagaattgcctcctgcccctgagagagtacttcaagtatttcagccagaatagtctgcccctgggcggcccaagcagcggcgcccctcctcccagcggcggcagcccagccggctccccaacctctaccgaggagggcacctctgagtccgccacccccgagagcggccctggcacctccaccgagcccagcgagggcagcgcacccggcagccctgccggcagccccacctccacagaggagggaaccagcaccgagcccagcgaaggcagcgccccaggcaccagcaccgagcctagtgagggcggctctggcggcggcagcgcccaggagattaaacggatcaacaagatcagaagaagacttgtgaaagacagcaacaccaagaaggccggcaagacaggccccatgaaaaccctgctggttagagtgatgacacccgatctgagagagcggctggaaaacctgagaaagaagcctgaaaatatcccccagcccatcagcaatacatctagagccaacctgaataagctgctgaccgattacaccgaaatgaagaaggcgatcctgcatgtgtactgggaagagttccagaaggaccctgtgggcctgatgagccgggtggcccagcctgccagcaagaagatcgatcagaacaagctgaaacctgagatggacgagaagggcaacctgaccaccgccggctttgcctgctctcagtgtggccagcccctgttcgtgtacaagctggagcaggtgtctgagaagggcaaggcttacaccaactacttcggacggtgcaatgtggccgagcacgaaaagctgatcctgctggcccagctgaagcccgagaaggatagcgacgaagccgtgacatatagcctgggaaagtttgggcagagggccctggatttctacagcattcatgtgaccaaggagtccacccaccccgtgaagcccctggcccagatcgccggaaacagatacgcctccggacctgtgggaaaggccctgagcgacgcatgtatgggcacaatcgcctccttcctgtctaagtaccaggacatcatcatcgaacaccagaaggtggtgaagggcaaccagaagagactggagagcctgcgggagctggccggcaaggaaaacctggaataccctagcgtgaccctgccacctcagcctcacaccaaggagggcgttgatgcctacaacgaagtgatcgcccgggtgcgaatgtgggtgaacctgaacctgtggcagaagctgaagctaagcagagatgatgccaagcctctgctgagactgaagggattcccttcctttcctctggtcgagagacaggccaacgaagtggactggtgggacatggtgtgtaacgtgaagaagctgatcaacgagaaaaaggaggatggcaaggtgttttggcagaatctggctggctacaagagacaggaagccctgagaccatacctgagcagcgaggaagatcggaagaagggaaagaaattcgctcggtaccagctgggcgacctgctgctgcacctggaaaagaagcacggcgaggactggggaaaggtgtacgacgaggcctgggagcggattgacaagaaagtggaaggcctgagcaagcacatcaagctggaagaggaacggagaagcgaggacgcccagagcaaggccgccctgaccgactggctgcgggctaaggccagcttcgtgatcgagggcctgaaggaggccgacaaggacgagttctgcagatgcgagctgaagctgcagaagtggtacggggacctgcggggaaagcccttcgccatcgaagccgagaacagcatcctggacatcagcggcttcagcaagcagtacaactgtgccttcatctggcagaaggacggcgtgaagaagctgaacctgtacctgatcatcaactacttcaagggcggcaagctgcggttcaagaagatcaaacctgaagccttcgaagccaacagattctacaccgtgatcaacaaaaagagcggcgagatcgtgcccatggaggtgaacttcaacttcgacgaccccaacctgatcatcctgcctctggcctttggcaagagacagggcagagaattcatctggaacgacctgctgtccctggaaaccggcagcctgaagctggccaacggaagagtgatcgagaagacactgtacaacagaagaacccggcaggatgagcctgccctgttcgtggccctgaccttcgagcggcgggaggtcctggactcctccaatatcaaaccaatgaacctgatcggcgtggcaagaggcgaaaacatccccgccgtgatcgccctgaccgaccccgagggctgcccactgagccggtttaaggatagcctgggaaacccaacccacatcctgagaatcggcgagagctataaggagaagcagcggaccatccaggccaagaaggaggtggagcagcggagagccggcggctacagccggaagtacgccagcaaagccaagaatctggcagacgatatggtgagaaacaccgctagagatctgctgtactacgccgtgacccaggatgccatgctgatcttcgccaacctgagccggggcttcggccggcagggcaagcggaccttcatggccgagagacagtacacacggatggaggactggctgaccgccaagctggcctacgagggcctgagcaagacctacctgtccaagacactggcccagtacacctccaagacatgcagcaactgtgggtttaccatcaccagcgccgactacgacagggtgctggagaagctgaagaagacagcaacaggctggatgaccacaattaacggcaaggagctgaaggtggagggccagattacctactacaacagatacaagagacagaacgtagtcaaggacctgtccgtcgagctggatagactgagcgaagaatctgtgaacaacgacatctcctcctggacaaagggcagaagcggagaagctctgagcctcctgaagaaaagattctcccatagacccgtgcaggagaagttcgtgtgcctgaactgcggcttcgagacacacgcagccgagcaagccgccctgaacatcgccagatcctggctgttcctgcggagccaggagtacaagaaataccagacaaacaagacaaccggcaacaccgataagagagccttcgtcgagacctggcagtccttttaccggaagaagcttaaggaggtgtggaaacctgccgtgcggtctggcggatctggcggaggctccacaagcgacgtggtgacctacgaggacgtgcacgtgaacttcacccaggaggagtgggccctgctggaccccagccagaagaggctgtacaaggtggtgatgctggagacctacaagaacctgagcgccatcggctacatctgggaggaccacaccatcgagcagcacttccagagcagcaggagccacggcaggcacaagaggcacaggaccggcgagcagcccagcgagctgatccagcacggcaagaccagccccaagaaaaagagaaaagtctaagctgccttctgcggggcttgccttctggccatgcccttcttctctcccttgcacctgtacctcttggtctttgaataaagcctgagtaggaaggctagcaaaaaaaaaaaaaaaaaaaaaaaaaaaaaaaaaaaaaaaaaaaaaaaaaaaaaaaaaaaaaaaaaaaaaaaaaaaaaaaa

SEQ ID NO: 3674 - RNA, 5419 nt, synthetic construct
  source 1..5419: mol_type = other RNA
aggaaataagagagaaaagaagagtaagaagaaatataagagccaccatggcccctaagaagaagcgtaaagtgagccgggtgaacggcagcggcagcggcggcggcatgaaccacgaccaggagttcgacccccctaaggtgtaccctcccgtccccgccgagaagagaaagcccatccgggtcctgagcctgttcgatggcatcgccaccggtctgctggtgctgaaggacctgggcatccaggtggataggtacattgcctccgaggtgtgcgaggactccatcaccgtgggaatggtgcgtcatcagggcaagatcatgtacgtgggcgacgtgcggagcgtgacacagaagcatatccaggagtggggccctttcgacctggtgatcggcggcagcccttgcaatgacctgagcatcgtgaacccagcccggaagggcctgtacgagggaaccggcagactgttcttcgagttttacagactgctgcacgacgcccggcctaaggaaggcgacgaccggcccttcttttggctgttcgagaatgtggtggccatgggagtcagcgacaagcgggatattagccggttcctggagagcaaccccgtgatgatcgatgccaaggaagtgagcgccgcccaccgggccagatacttctggggcaatctgcctggcatgaacagacccctggccagcaccgtgaacgacaagctggagctgcaggagtgcctggagcacggccggatcgccaagttcagcaaggtgagaaccatcaccacccgaagcaacagcatcaaacaaggcaaggaccagcactttcctgtgttcatgaacgagaaggaggacatcctgtggtgtaccgagatggagagagtgttcgggttcccagtccactacacagatgtcagcaacatgtctagactggccagacagagactgctgggaagaagctggtccgtccctgtgatcagacacctgttcgcccctctgaaggagtacttcgcctgcgtgagcagcggcaacagcaacgccaacagccggggccccagcttctctagcggcctggtgccactgtccctgagagggagccacatgggccccatggagatctacaaaaccgtgagcgcctggaagcggcagcctgtgcgcgtgctgagcctgtttcggaatatcgataaagtcctgaaaagcctgggattcctggagagcggctctggctccggcggtggcaccctgaagtacgtggaggatgtgacaaacgtggtcagacgggatgtggagaagtggggccccttcgatctggtgtacggcagcacccaacccctgggcagctcttgtgaccggtgccctggctggtacatgtttcagttccaccggatcctgcagtacgccctgccgagacaggagtcccagcggccattcttttggattttcatggacaacttgctgctgaccgaggatgaccaggaaactaccactcggttcctgcagaccgaagccgtgaccctgcaggacgtgagaggccgggactaccagaacgccatgcgggtgtggtccaacatccctggactgaaaagcaagcacgcacctctgacccctaaagaagaggagtacctgcaggcccaggtgcggagcagaagcaagctggacgcccctaaggtggatctgctggtgaagaattgcctcctgcccctgagagagtacttcaagtatttcagccagaatagtctgcccctgggcggcccaagcagcggcgcccctcctcccagcggcggcagcccagccggctccccaacctctaccgaggagggcacctctgagtccgccacccccgagagcggccctggcacctccaccgagcccagcgagggcagcgcacccggcagccctgccggcagccccacctccacagaggagggaaccagcaccgagcccagcgaaggcagcgccccaggcaccagcaccgagcctagtgagggcggctctggcggcggcagcgcccaggagattaaacggatcaacaagatcagaagaagacttgtgaaagacagcaacaccaagaaggccggcaagacaggccccatgaaaaccctgctggttagagtgatgacacccgatctgagagagcggctggaaaacctgagaaagaagcctgaaaatatcccccagcccatcagcaatacatctagagccaacctgaataagctgctgaccgattacaccgaaatgaagaaggcgatcctgcatgtgtactgggaagagttccagaaggaccctgtgggcctgatgagccgggtggcccagcctgccagcaagaagatcgatcagaacaagctgaaacctgagatggacgagaagggcaacctgaccaccgccggctttgcctgctctcagtgtggccagcccctgttcgtgtacaagctggagcaggtgtctgagaagggcaaggcttacaccaactacttcggacggtgcaatgtggccgagcacgaaaagctgatcctgctggcccagctgaagcccgagaaggatagcgacgaagccgtgacatatagcctgggaaagtttgggcagagggccctggatttctacagcattcatgtgaccaaggagtccacccaccccgtgaagcccctggcccagatcgccggaaacagatacgcctccggacctgtgggaaaggccctgagcgacgcatgtatgggcacaatcgcctccttcctgtctaagtaccaggacatcatcatcgaacaccagaaggtggtgaagggcaaccagaagagactggagagcctgcgggagctggccggcaaggaaaacctggaataccctagcgtgaccctgccacctcagcctcacaccaaggagggcgttgatgcctacaacgaagtgatcgcccgggtgcgaatgtgggtgaacctgaacctgtggcagaagctgaagctaagcagagatgatgccaagcctctgctgagactgaagggattcccttcctttcctctggtcgagagacaggccaacgaagtggactggtgggacatggtgtgtaacgtgaagaagctgatcaacgagaaaaaggaggatggcaaggtgttttggcagaatctggctggctacaagagacaggaagccctgagaccatacctgagcagcgaggaagatcggaagaagggaaagaaattcgctcggtaccagctgggcgacctgctgctgcacctggaaaagaagcacggcgaggactggggaaaggtgtacgacgaggcctgggagcggattgacaagaaagtggaaggcctgagcaagcacatcaagctggaagaggaacggagaagcgaggacgcccagagcaaggccgccctgaccgactggctgcgggctaaggccagcttcgtgatcgagggcctgaaggaggccgacaaggacgagttctgcagatgcgagctgaagctgcagaagtggtacggggacctgcggggaaagcccttcgccatcgaagccgagaacagcatcctggacatcagcggcttcagcaagcagtacaactgtgccttcatctggcagaaggacggcgtgaagaagctgaacctgtacctgatcatcaactacttcaagggcggcaagctgcggttcaagaagatcaaacctgaagccttcgaagccaacagattctacaccgtgatcaacaaaaagagcggcgagatcgtgcccatggaggtgaacttcaacttcgacgaccccaacctgatcatcctgcctctggcctttggcaagagacagggcagagaattcatctggaacgacctgctgtccctggaaaccggcagcctgaagctggccaacggaagagtgatcgagaagacactgtacaacagaagaacccggcaggatgagcctgccctgttcgtggccctgaccttcgagcggcgggaggtcctggactcctccaatatcaaaccaatgaacctgatcggcgtggcaagaggcgaaaacatccccgccgtgatcgccctgaccgaccccgagggctgcccactgagccggtttaaggatagcctgggaaacccaacccacatcctgagaatcggcgagagctataaggagaagcagcggaccatccaggccaagaaggaggtggagcagcggagagccggcggctacagccggaagtacgccagcaaagccaagaatctggcagacgatatggtgagaaacaccgctagagatctgctgtactacgccgtgacccaggatgccatgctgatcttcgccaacctgagccggggcttcggccggcagggcaagcggaccttcatggccgagagacagtacacacggatggaggactggctgaccgccaagctggcctacgagggcctgagcaagacctacctgtccaagacactggcccagtacacctccaagacatgcagcaactgtgggtttaccatcaccagcgccgactacgacagggtgctggagaagctgaagaagacagcaacaggctggatgaccacaattaacggcaaggagctgaaggtggagggccagattacctactacaacagatacaagagacagaacgtagtcaaggacctgtccgtcgagctggatagactgagcgaagaatctgtgaacaacgacatctcctcctggacaaagggcagaagcggagaagctctgagcctcctgaagaaaagattctcccatagacccgtgcaggagaagttcgtgtgcctgaactgcggcttcgagacacacgcagccgagcaagccgccctgaacatcgccagatcctggctgttcctgcggagccaggagtacaagaaataccagacaaacaagacaaccggcaacaccgataagagagccttcgtcgagacctggcagtccttttaccggaagaagcttaaggaggtgtggaaacctgccgtgcggtctggcggatctggcggaggctccacaagcatggacgccgtgacctacgaggacgtgcacgtgaacttcagcagggaggagtgggtgctgctggaccccagccagaagagcctgtacaaggacgtgatgctggagacctactggaacctgacctgcatcggctacaagtggaaggaccacgacaacgaggagtactgccagaacagcggcaggcacggcaggtgcatcaactgccccagcgcctacggcaagaagcagtgcaccaacctgttcaccagccccaagaaaaagagaaaagtctaagctgccttctgcggggcttgccttctggccatgcccttcttctctcccttgcacctgtacctcttggtctttgaataaagcctgagtaggaaggctagcaaaaaaaaaaaaaaaaaaaaaaaaaaaaaaaaaaaaaaaaaaaaaaaaaaaaaaaaaaaaaaaaaaaaaaaaaaaaaaaa

SEQ ID NO: 3675 - RNA, 5419 nt, synthetic construct
  source 1..5419: mol_type = other RNA
aggaaataagagagaaaagaagagtaagaagaaatataagagccaccatggcccctaagaagaagcgtaaagtgagccgggtgaacggcagcggcagcggcggcggcatgaaccacgaccaggagttcgacccccctaaggtgtaccctcccgtccccgccgagaagagaaagcccatccgggtcctgagcctgttcgatggcatcgccaccggtctgctggtgctgaaggacctgggcatccaggtggataggtacattgcctccgaggtgtgcgaggactccatcaccgtgggaatggtgcgtcatcagggcaagatcatgtacgtgggcgacgtgcggagcgtgacacagaagcatatccaggagtggggccctttcgacctggtgatcggcggcagcccttgcaatgacctgagcatcgtgaacccagcccggaagggcctgtacgagggaaccggcagactgttcttcgagttttacagactgctgcacgacgcccggcctaaggaaggcgacgaccggcccttcttttggctgttcgagaatgtggtggccatgggagtcagcgacaagcgggatattagccggttcctggagagcaaccccgtgatgatcgatgccaaggaagtgagcgccgcccaccgggccagatacttctggggcaatctgcctggcatgaacagacccctggccagcaccgtgaacgacaagctggagctgcaggagtgcctggagcacggccggatcgccaagttcagcaaggtgagaaccatcaccacccgaagcaacagcatcaaacaaggcaaggaccagcactttcctgtgttcatgaacgagaaggaggacatcctgtggtgtaccgagatggagagagtgttcgggttcccagtccactacacagatgtcagcaacatgtctagactggccagacagagactgctgggaagaagctggtccgtccctgtgatcagacacctgttcgcccctctgaaggagtacttcgcctgcgtgagcagcggcaacagcaacgccaacagccggggccccagcttctctagcggcctggtgccactgtccctgagagggagccacatgggccccatggagatctacaaaaccgtgagcgcctggaagcggcagcctgtgcgcgtgctgagcctgtttcggaatatcgataaagtcctgaaaagcctgggattcctggagagcggctctggctccggcggtggcaccctgaagtacgtggaggatgtgacaaacgtggtcagacgggatgtggagaagtggggccccttcgatctggtgtacggcagcacccaacccctgggcagctcttgtgaccggtgccctggctggtacatgtttcagttccaccggatcctgcagtacgccctgccgagacaggagtcccagcggccattcttttggattttcatggacaacttgctgctgaccgaggatgaccaggaaactaccactcggttcctgcagaccgaagccgtgaccctgcaggacgtgagaggccgggactaccagaacgccatgcgggtgtggtccaacatccctggactgaaaagcaagcacgcacctctgacccctaaagaagaggagtacctgcaggcccaggtgcggagcagaagcaagctggacgcccctaaggtggatctgctggtgaagaattgcctcctgcccctgagagagtacttcaagtatttcagccagaatagtctgcccctgggcggcccaagcagcggcgcccctcctcccagcggcggcagcccagccggctccccaacctctaccgaggagggcacctctgagtccgccacccccgagagcggccctggcacctccaccgagcccagcgagggcagcgcacccggcagccctgccggcagccccacctccacagaggagggaaccagcaccgagcccagcgaaggcagcgccccaggcaccagcaccgagcctagtgagggcggctctggcggcggcagcgcccaggagattaaacggatcaacaagatcagaagaagacttgtgaaagacagcaacaccaagaaggccggcaagacaggccccatgaaaaccctgctggttagagtgatgacacccgatctgagagagcggctggaaaacctgagaaagaagcctgaaaatatcccccagcccatcagcaatacatctagagccaacctgaataagctgctgaccgattacaccgaaatgaagaaggcgatcctgcatgtgtactgggaagagttccagaaggaccctgtgggcctgatgagccgggtggcccagcctgccagcaagaagatcgatcagaacaagctgaaacctgagatggacgagaagggcaacctgaccaccgccggctttgcctgctctcagtgtggccagcccctgttcgtgtacaagctggagcaggtgtctgagaagggcaaggcttacaccaactacttcggacggtgcaatgtggccgagcacgaaaagctgatcctgctggcccagctgaagcccgagaaggatagcgacgaagccgtgacatatagcctgggaaagtttgggcagagggccctggatttctacagcattcatgtgaccaaggagtccacccaccccgtgaagcccctggcccagatcgccggaaacagatacgcctccggacctgtgggaaaggccctgagcgacgcatgtatgggcacaatcgcctccttcctgtctaagtaccaggacatcatcatcgaacaccagaaggtggtgaagggcaaccagaagagactggagagcctgcgggagctggccggcaaggaaaacctggaataccctagcgtgaccctgccacctcagcctcacaccaaggagggcgttgatgcctacaacgaagtgatcgcccgggtgcgaatgtgggtgaacctgaacctgtggcagaagctgaagctaagcagagatgatgccaagcctctgctgagactgaagggattcccttcctttcctctggtcgagagacaggccaacgaagtggactggtgggacatggtgtgtaacgtgaagaagctgatcaacgagaaaaaggaggatggcaaggtgttttggcagaatctggctggctacaagagacaggaagccctgagaccatacctgagcagcgaggaagatcggaagaagggaaagaaattcgctcggtaccagctgggcgacctgctgctgcacctggaaaagaagcacggcgaggactggggaaaggtgtacgacgaggcctgggagcggattgacaagaaagtggaaggcctgagcaagcacatcaagctggaagaggaacggagaagcgaggacgcccagagcaaggccgccctgaccgactggctgcgggctaaggccagcttcgtgatcgagggcctgaaggaggccgacaaggacgagttctgcagatgcgagctgaagctgcagaagtggtacggggacctgcggggaaagcccttcgccatcgaagccgagaacagcatcctggacatcagcggcttcagcaagcagtacaactgtgccttcatctggcagaaggacggcgtgaagaagctgaacctgtacctgatcatcaactacttcaagggcggcaagctgcggttcaagaagatcaaacctgaagccttcgaagccaacagattctacaccgtgatcaacaaaaagagcggcgagatcgtgcccatggaggtgaacttcaacttcgacgaccccaacctgatcatcctgcctctggcctttggcaagagacagggcagagaattcatctggaacgacctgctgtccctggaaaccggcagcctgaagctggccaacggaagagtgatcgagaagacactgtacaacagaagaacccggcaggatgagcctgccctgttcgtggccctgaccttcgagcggcgggaggtcctggactcctccaatatcaaaccaatgaacctgatcggcgtggcaagaggcgaaaacatccccgccgtgatcgccctgaccgaccccgagggctgcccactgagccggtttaaggatagcctgggaaacccaacccacatcctgagaatcggcgagagctataaggagaagcagcggaccatccaggccaagaaggaggtggagcagcggagagccggcggctacagccggaagtacgccagcaaagccaagaatctggcagacgatatggtgagaaacaccgctagagatctgctgtactacgccgtgacccaggatgccatgctgatcttcgccaacctgagccggggcttcggccggcagggcaagcggaccttcatggccgagagacagtacacacggatggaggactggctgaccgccaagctggcctacgagggcctgagcaagacctacctgtccaagacactggcccagtacacctccaagacatgcagcaactgtgggtttaccatcaccagcgccgactacgacagggtgctggagaagctgaagaagacagcaacaggctggatgaccacaattaacggcaaggagctgaaggtggagggccagattacctactacaacagatacaagagacagaacgtagtcaaggacctgtccgtcgagctggatagactgagcgaagaatctgtgaacaacgacatctcctcctggacaaagggcagaagcggagaagctctgagcctcctgaagaaaagattctcccatagacccgtgcaggagaagttcgtgtgcctgaactgcggcttcgagacacacgcagccgagcaagccgccctgaacatcgccagatcctggctgttcctgcggagccaggagtacaagaaataccagacaaacaagacaaccggcaacaccgataagagagccttcgtcgagacctggcagtccttttaccggaagaagcttaaggaggtgtggaaacctgccgtgcggtctggcggatctggcggaggctccacaagcggcagccagggcaacctgccccaggccgagatcaccctgatgaaccaggcccaggagagcgtgaccttcgaggacgtggccgtgaacttcaccaacagggagtggcagtgcctgacctacgcccagaggcacctgtacaaggacgtgatgctggagaactacggcaacatggtgagcctgggcttccccttccccaagccccccctgatcagccacctggagagggaggtggacccctgcgtgaccagccccaagaaaaagagaaaagtctaagctgccttctgcggggcttgccttctggccatgcccttcttctctcccttgcacctgtacctcttggtctttgaataaagcctgagtaggaaggctagcaaaaaaaaaaaaaaaaaaaaaaaaaaaaaaaaaaaaaaaaaaaaaaaaaaaaaaaaaaaaaaaaaaaaaaaaaaaaaaaa

SEQ ID NO: 3676 - RNA, 5419 nt, synthetic construct
  source 1..5419: mol_type = other RNA
aggaaataagagagaaaagaagagtaagaagaaatataagagccaccatggcccctaagaagaagcgtaaagtgagccgggtgaacggcagcggcagcggcggcggcatgaaccacgaccaggagttcgacccccctaaggtgtaccctcccgtccccgccgagaagagaaagcccatccgggtcctgagcctgttcgatggcatcgccaccggtctgctggtgctgaaggacctgggcatccaggtggataggtacattgcctccgaggtgtgcgaggactccatcaccgtgggaatggtgcgtcatcagggcaagatcatgtacgtgggcgacgtgcggagcgtgacacagaagcatatccaggagtggggccctttcgacctggtgatcggcggcagcccttgcaatgacctgagcatcgtgaacccagcccggaagggcctgtacgagggaaccggcagactgttcttcgagttttacagactgctgcacgacgcccggcctaaggaaggcgacgaccggcccttcttttggctgttcgagaatgtggtggccatgggagtcagcgacaagcgggatattagccggttcctggagagcaaccccgtgatgatcgatgccaaggaagtgagcgccgcccaccgggccagatacttctggggcaatctgcctggcatgaacagacccctggccagcaccgtgaacgacaagctggagctgcaggagtgcctggagcacggccggatcgccaagttcagcaaggtgagaaccatcaccacccgaagcaacagcatcaaacaaggcaaggaccagcactttcctgtgttcatgaacgagaaggaggacatcctgtggtgtaccgagatggagagagtgttcgggttcccagtccactacacagatgtcagcaacatgtctagactggccagacagagactgctgggaagaagctggtccgtccctgtgatcagacacctgttcgcccctctgaaggagtacttcgcctgcgtgagcagcggcaacagcaacgccaacagccggggccccagcttctctagcggcctggtgccactgtccctgagagggagccacatgggccccatggagatctacaaaaccgtgagcgcctggaagcggcagcctgtgcgcgtgctgagcctgtttcggaatatcgataaagtcctgaaaagcctgggattcctggagagcggctctggctccggcggtggcaccctgaagtacgtggaggatgtgacaaacgtggtcagacgggatgtggagaagtggggccccttcgatctggtgtacggcagcacccaacccctgggcagctcttgtgaccggtgccctggctggtacatgtttcagttccaccggatcctgcagtacgccctgccgagacaggagtcccagcggccattcttttggattttcatggacaacttgctgctgaccgaggatgaccaggaaactaccactcggttcctgcagaccgaagccgtgaccctgcaggacgtgagaggccgggactaccagaacgccatgcgggtgtggtccaacatccctggactgaaaagcaagcacgcacctctgacccctaaagaagaggagtacctgcaggcccaggtgcggagcagaagcaagctggacgcccctaaggtggatctgctggtgaagaattgcctcctgcccctgagagagtacttcaagtatttcagccagaatagtctgcccctgggcggcccaagcagcggcgcccctcctcccagcggcggcagcccagccggctccccaacctctaccgaggagggcacctctgagtccgccacccccgagagcggccctggcacctccaccgagcccagcgagggcagcgcacccggcagccctgccggcagccccacctccacagaggagggaaccagcaccgagcccagcgaaggcagcgccccaggcaccagcaccgagcctagtgagggcggctctggcggcggcagcgcccaggagattaaacggatcaacaagatcagaagaagacttgtgaaagacagcaacaccaagaaggccggcaagacaggccccatgaaaaccctgctggttagagtgatgacacccgatctgagagagcggctggaaaacctgagaaagaagcctgaaaatatcccccagcccatcagcaatacatctagagccaacctgaataagctgctgaccgattacaccgaaatgaagaaggcgatcctgcatgtgtactgggaagagttccagaaggaccctgtgggcctgatgagccgggtggcccagcctgccagcaagaagatcgatcagaacaagctgaaacctgagatggacgagaagggcaacctgaccaccgccggctttgcctgctctcagtgtggccagcccctgttcgtgtacaagctggagcaggtgtctgagaagggcaaggcttacaccaactacttcggacggtgcaatgtggccgagcacgaaaagctgatcctgctggcccagctgaagcccgagaaggatagcgacgaagccgtgacatatagcctgggaaagtttgggcagagggccctggatttctacagcattcatgtgaccaaggagtccacccaccccgtgaagcccctggcccagatcgccggaaacagatacgcctccggacctgtgggaaaggccctgagcgacgcatgtatgggcacaatcgcctccttcctgtctaagtaccaggacatcatcatcgaacaccagaaggtggtgaagggcaaccagaagagactggagagcctgcgggagctggccggcaaggaaaacctggaataccctagcgtgaccctgccacctcagcctcacaccaaggagggcgttgatgcctacaacgaagtgatcgcccgggtgcgaatgtgggtgaacctgaacctgtggcagaagctgaagctaagcagagatgatgccaagcctctgctgagactgaagggattcccttcctttcctctggtcgagagacaggccaacgaagtggactggtgggacatggtgtgtaacgtgaagaagctgatcaacgagaaaaaggaggatggcaaggtgttttggcagaatctggctggctacaagagacaggaagccctgagaccatacctgagcagcgaggaagatcggaagaagggaaagaaattcgctcggtaccagctgggcgacctgctgctgcacctggaaaagaagcacggcgaggactggggaaaggtgtacgacgaggcctgggagcggattgacaagaaagtggaaggcctgagcaagcacatcaagctggaagaggaacggagaagcgaggacgcccagagcaaggccgccctgaccgactggctgcgggctaaggccagcttcgtgatcgagggcctgaaggaggccgacaaggacgagttctgcagatgcgagctgaagctgcagaagtggtacggggacctgcggggaaagcccttcgccatcgaagccgagaacagcatcctggacatcagcggcttcagcaagcagtacaactgtgccttcatctggcagaaggacggcgtgaagaagctgaacctgtacctgatcatcaactacttcaagggcggcaagctgcggttcaagaagatcaaacctgaagccttcgaagccaacagattctacaccgtgatcaacaaaaagagcggcgagatcgtgcccatggaggtgaacttcaacttcgacgaccccaacctgatcatcctgcctctggcctttggcaagagacagggcagagaattcatctggaacgacctgctgtccctggaaaccggcagcctgaagctggccaacggaagagtgatcgagaagacactgtacaacagaagaacccggcaggatgagcctgccctgttcgtggccctgaccttcgagcggcgggaggtcctggactcctccaatatcaaaccaatgaacctgatcggcgtggcaagaggcgaaaacatccccgccgtgatcgccctgaccgaccccgagggctgcccactgagccggtttaaggatagcctgggaaacccaacccacatcctgagaatcggcgagagctataaggagaagcagcggaccatccaggccaagaaggaggtggagcagcggagagccggcggctacagccggaagtacgccagcaaagccaagaatctggcagacgatatggtgagaaacaccgctagagatctgctgtactacgccgtgacccaggatgccatgctgatcttcgccaacctgagccggggcttcggccggcagggcaagcggaccttcatggccgagagacagtacacacggatggaggactggctgaccgccaagctggcctacgagggcctgagcaagacctacctgtccaagacactggcccagtacacctccaagacatgcagcaactgtgggtttaccatcaccagcgccgactacgacagggtgctggagaagctgaagaagacagcaacaggctggatgaccacaattaacggcaaggagctgaaggtggagggccagattacctactacaacagatacaagagacagaacgtagtcaaggacctgtccgtcgagctggatagactgagcgaagaatctgtgaacaacgacatctcctcctggacaaagggcagaagcggagaagctctgagcctcctgaagaaaagattctcccatagacccgtgcaggagaagttcgtgtgcctgaactgcggcttcgagacacacgcagccgagcaagccgccctgaacatcgccagatcctggctgttcctgcggagccaggagtacaagaaataccagacaaacaagacaaccggcaacaccgataagagagccttcgtcgagacctggcagtccttttaccggaagaagcttaaggaggtgtggaaacctgccgtgcggtctggcggatctggcggaggctccacaagccaggtgcccgtgaccttcgaggacctggccgtgaggttcagcgccgaggagtggcacctgctggaggagtggcagagggagttccacagggacgtgatgagggagaactacgagatgctggtgagcctgggcaccgcccagctgctgcccctgagcgccttcctgagcctgaccgagccccaggaggacatgggcgacaacggctgcagcgacggcgagtgggagaggcccggcggcggcctgaccagccccaagaaaaagagaaaagtctaagctgccttctgcggggcttgccttctggccatgcccttcttctctcccttgcacctgtacctcttggtctttgaataaagcctgagtaggaaggctagcaaaaaaaaaaaaaaaaaaaaaaaaaaaaaaaaaaaaaaaaaaaaaaaaaaaaaaaaaaaaaaaaaaaaaaaaaaaaaaaa

SEQ ID NO: 3677 - RNA, 5419 nt, synthetic construct
  source 1..5419: mol_type = other RNA
aggaaataagagagaaaagaagagtaagaagaaatataagagccaccatggcccctaagaagaagcgtaaagtgagccgggtgaacggcagcggcagcggcggcggcatgaaccacgaccaggagttcgacccccctaaggtgtaccctcccgtccccgccgagaagagaaagcccatccgggtcctgagcctgttcgatggcatcgccaccggtctgctggtgctgaaggacctgggcatccaggtggataggtacattgcctccgaggtgtgcgaggactccatcaccgtgggaatggtgcgtcatcagggcaagatcatgtacgtgggcgacgtgcggagcgtgacacagaagcatatccaggagtggggccctttcgacctggtgatcggcggcagcccttgcaatgacctgagcatcgtgaacccagcccggaagggcctgtacgagggaaccggcagactgttcttcgagttttacagactgctgcacgacgcccggcctaaggaaggcgacgaccggcccttcttttggctgttcgagaatgtggtggccatgggagtcagcgacaagcgggatattagccggttcctggagagcaaccccgtgatgatcgatgccaaggaagtgagcgccgcccaccgggccagatacttctggggcaatctgcctggcatgaacagacccctggccagcaccgtgaacgacaagctggagctgcaggagtgcctggagcacggccggatcgccaagttcagcaaggtgagaaccatcaccacccgaagcaacagcatcaaacaaggcaaggaccagcactttcctgtgttcatgaacgagaaggaggacatcctgtggtgtaccgagatggagagagtgttcgggttcccagtccactacacagatgtcagcaacatgtctagactggccagacagagactgctgggaagaagctggtccgtccctgtgatcagacacctgttcgcccctctgaaggagtacttcgcctgcgtgagcagcggcaacagcaacgccaacagccggggccccagcttctctagcggcctggtgccactgtccctgagagggagccacatgggccccatggagatctacaaaaccgtgagcgcctggaagcggcagcctgtgcgcgtgctgagcctgtttcggaatatcgataaagtcctgaaaagcctgggattcctggagagcggctctggctccggcggtggcaccctgaagtacgtggaggatgtgacaaacgtggtcagacgggatgtggagaagtggggccccttcgatctggtgtacggcagcacccaacccctgggcagctcttgtgaccggtgccctggctggtacatgtttcagttccaccggatcctgcagtacgccctgccgagacaggagtcccagcggccattcttttggattttcatggacaacttgctgctgaccgaggatgaccaggaaactaccactcggttcctgcagaccgaagccgtgaccctgcaggacgtgagaggccgggactaccagaacgccatgcgggtgtggtccaacatccctggactgaaaagcaagcacgcacctctgacccctaaagaagaggagtacctgcaggcccaggtgcggagcagaagcaagctggacgcccctaaggtggatctgctggtgaagaattgcctcctgcccctgagagagtacttcaagtatttcagccagaatagtctgcccctgggcggcccaagcagcggcgcccctcctcccagcggcggcagcccagccggctccccaacctctaccgaggagggcacctctgagtccgccacccccgagagcggccctggcacctccaccgagcccagcgagggcagcgcacccggcagccctgccggcagccccacctccacagaggagggaaccagcaccgagcccagcgaaggcagcgccccaggcaccagcaccgagcctagtgagggcggctctggcggcggcagcgcccaggagattaaacggatcaacaagatcagaagaagacttgtgaaagacagcaacaccaagaaggccggcaagacaggccccatgaaaaccctgctggttagagtgatgacacccgatctgagagagcggctggaaaacctgagaaagaagcctgaaaatatcccccagcccatcagcaatacatctagagccaacctgaataagctgctgaccgattacaccgaaatgaagaaggcgatcctgcatgtgtactgggaagagttccagaaggaccctgtgggcctgatgagccgggtggcccagcctgccagcaagaagatcgatcagaacaagctgaaacctgagatggacgagaagggcaacctgaccaccgccggctttgcctgctctcagtgtggccagcccctgttcgtgtacaagctggagcaggtgtctgagaagggcaaggcttacaccaactacttcggacggtgcaatgtggccgagcacgaaaagctgatcctgctggcccagctgaagcccgagaaggatagcgacgaagccgtgacatatagcctgggaaagtttgggcagagggccctggatttctacagcattcatgtgaccaaggagtccacccaccccgtgaagcccctggcccagatcgccggaaacagatacgcctccggacctgtgggaaaggccctgagcgacgcatgtatgggcacaatcgcctccttcctgtctaagtaccaggacatcatcatcgaacaccagaaggtggtgaagggcaaccagaagagactggagagcctgcgggagctggccggcaaggaaaacctggaataccctagcgtgaccctgccacctcagcctcacaccaaggagggcgttgatgcctacaacgaagtgatcgcccgggtgcgaatgtgggtgaacctgaacctgtggcagaagctgaagctaagcagagatgatgccaagcctctgctgagactgaagggattcccttcctttcctctggtcgagagacaggccaacgaagtggactggtgggacatggtgtgtaacgtgaagaagctgatcaacgagaaaaaggaggatggcaaggtgttttggcagaatctggctggctacaagagacaggaagccctgagaccatacctgagcagcgaggaagatcggaagaagggaaagaaattcgctcggtaccagctgggcgacctgctgctgcacctggaaaagaagcacggcgaggactggggaaaggtgtacgacgaggcctgggagcggattgacaagaaagtggaaggcctgagcaagcacatcaagctggaagaggaacggagaagcgaggacgcccagagcaaggccgccctgaccgactggctgcgggctaaggccagcttcgtgatcgagggcctgaaggaggccgacaaggacgagttctgcagatgcgagctgaagctgcagaagtggtacggggacctgcggggaaagcccttcgccatcgaagccgagaacagcatcctggacatcagcggcttcagcaagcagtacaactgtgccttcatctggcagaaggacggcgtgaagaagctgaacctgtacctgatcatcaactacttcaagggcggcaagctgcggttcaagaagatcaaacctgaagccttcgaagccaacagattctacaccgtgatcaacaaaaagagcggcgagatcgtgcccatggaggtgaacttcaacttcgacgaccccaacctgatcatcctgcctctggcctttggcaagagacagggcagagaattcatctggaacgacctgctgtccctggaaaccggcagcctgaagctggccaacggaagagtgatcgagaagacactgtacaacagaagaacccggcaggatgagcctgccctgttcgtggccctgaccttcgagcggcgggaggtcctggactcctccaatatcaaaccaatgaacctgatcggcgtggcaagaggcgaaaacatccccgccgtgatcgccctgaccgaccccgagggctgcccactgagccggtttaaggatagcctgggaaacccaacccacatcctgagaatcggcgagagctataaggagaagcagcggaccatccaggccaagaaggaggtggagcagcggagagccggcggctacagccggaagtacgccagcaaagccaagaatctggcagacgatatggtgagaaacaccgctagagatctgctgtactacgccgtgacccaggatgccatgctgatcttcgccaacctgagccggggcttcggccggcagggcaagcggaccttcatggccgagagacagtacacacggatggaggactggctgaccgccaagctggcctacgagggcctgagcaagacctacctgtccaagacactggcccagtacacctccaagacatgcagcaactgtgggtttaccatcaccagcgccgactacgacagggtgctggagaagctgaagaagacagcaacaggctggatgaccacaattaacggcaaggagctgaaggtggagggccagattacctactacaacagatacaagagacagaacgtagtcaaggacctgtccgtcgagctggatagactgagcgaagaatctgtgaacaacgacatctcctcctggacaaagggcagaagcggagaagctctgagcctcctgaagaaaagattctcccatagacccgtgcaggagaagttcgtgtgcctgaactgcggcttcgagacacacgcagccgagcaagccgccctgaacatcgccagatcctggctgttcctgcggagccaggagtacaagaaataccagacaaacaagacaaccggcaacaccgataagagagccttcgtcgagacctggcagtccttttaccggaagaagcttaaggaggtgtggaaacctgccgtgcggtctggcggatctggcggaggctccacaagcctgcaggaggccgtgaccttcaaggacgtggccgtggtgttcaccgaggaggagctgggcctgctggacagcacccagaggaccctgtacagggacgtgatgctggagaacttcaggaacctggtgagcctgggccaccagagcttcaagcccgacgtgatcagccagctggagagggaggagaagctgtggctgaagaagctgcagacccagaggggcaggaggagcggcggcaggagccagaccagccccaagaaaaagagaaaagtctaagctgccttctgcggggcttgccttctggccatgcccttcttctctcccttgcacctgtacctcttggtctttgaataaagcctgagtaggaaggctagcaaaaaaaaaaaaaaaaaaaaaaaaaaaaaaaaaaaaaaaaaaaaaaaaaaaaaaaaaaaaaaaaaaaaaaaaaaaaaaaa

SEQ ID NO: 3678 - RNA, 5452 nt, synthetic construct
  source 1..5452: mol_type = other RNA
aggaaataagagagaaaagaagagtaagaagaaatataagagccaccatggcccctaagaagaagcgtaaagtgagccgggtgaacggcagcggcagcggcggcggcatgaaccacgaccaggagttcgacccccctaaggtgtaccctcccgtccccgccgagaagagaaagcccatccgggtcctgagcctgttcgatggcatcgccaccggtctgctggtgctgaaggacctgggcatccaggtggataggtacattgcctccgaggtgtgcgaggactccatcaccgtgggaatggtgcgtcatcagggcaagatcatgtacgtgggcgacgtgcggagcgtgacacagaagcatatccaggagtggggccctttcgacctggtgatcggcggcagcccttgcaatgacctgagcatcgtgaacccagcccggaagggcctgtacgagggaaccggcagactgttcttcgagttttacagactgctgcacgacgcccggcctaaggaaggcgacgaccggcccttcttttggctgttcgagaatgtggtggccatgggagtcagcgacaagcgggatattagccggttcctggagagcaaccccgtgatgatcgatgccaaggaagtgagcgccgcccaccgggccagatacttctggggcaatctgcctggcatgaacagacccctggccagcaccgtgaacgacaagctggagctgcaggagtgcctggagcacggccggatcgccaagttcagcaaggtgagaaccatcaccacccgaagcaacagcatcaaacaaggcaaggaccagcactttcctgtgttcatgaacgagaaggaggacatcctgtggtgtaccgagatggagagagtgttcgggttcccagtccactacacagatgtcagcaacatgtctagactggccagacagagactgctgggaagaagctggtccgtccctgtgatcagacacctgttcgcccctctgaaggagtacttcgcctgcgtgagcagcggcaacagcaacgccaacagccggggccccagcttctctagcggcctggtgccactgtccctgagagggagccacatgggccccatggagatctacaaaaccgtgagcgcctggaagcggcagcctgtgcgcgtgctgagcctgtttcggaatatcgataaagtcctgaaaagcctgggattcctggagagcggctctggctccggcggtggcaccctgaagtacgtggaggatgtgacaaacgtggtcagacgggatgtggagaagtggggccccttcgatctggtgtacggcagcacccaacccctgggcagctcttgtgaccggtgccctggctggtacatgtttcagttccaccggatcctgcagtacgccctgccgagacaggagtcccagcggccattcttttggattttcatggacaacttgctgctgaccgaggatgaccaggaaactaccactcggttcctgcagaccgaagccgtgaccctgcaggacgtgagaggccgggactaccagaacgccatgcgggtgtggtccaacatccctggactgaaaagcaagcacgcacctctgacccctaaagaagaggagtacctgcaggcccaggtgcggagcagaagcaagctggacgcccctaaggtggatctgctggtgaagaattgcctcctgcccctgagagagtacttcaagtatttcagccagaatagtctgcccctgggcggcccaagcagcggcgcccctcctcccagcggcggcagcccagccggctccccaacctctaccgaggagggcacctctgagtccgccacccccgagagcggccctggcacctccaccgagcccagcgagggcagcgcacccggcagccctgccggcagccccacctccacagaggagggaaccagcaccgagcccagcgaaggcagcgccccaggcaccagcaccgagcctagtgagggcggctctggcggcggcagcgcccaggagattaaacggatcaacaagatcagaagaagacttgtgaaagacagcaacaccaagaaggccggcaagacaggccccatgaaaaccctgctggttagagtgatgacacccgatctgagagagcggctggaaaacctgagaaagaagcctgaaaatatcccccagcccatcagcaatacatctagagccaacctgaataagctgctgaccgattacaccgaaatgaagaaggcgatcctgcatgtgtactgggaagagttccagaaggaccctgtgggcctgatgagccgggtggcccagcctgccagcaagaagatcgatcagaacaagctgaaacctgagatggacgagaagggcaacctgaccaccgccggctttgcctgctctcagtgtggccagcccctgttcgtgtacaagctggagcaggtgtctgagaagggcaaggcttacaccaactacttcggacggtgcaatgtggccgagcacgaaaagctgatcctgctggcccagctgaagcccgagaaggatagcgacgaagccgtgacatatagcctgggaaagtttgggcagagggccctggatttctacagcattcatgtgaccaaggagtccacccaccccgtgaagcccctggcccagatcgccggaaacagatacgcctccggacctgtgggaaaggccctgagcgacgcatgtatgggcacaatcgcctccttcctgtctaagtaccaggacatcatcatcgaacaccagaaggtggtgaagggcaaccagaagagactggagagcctgcgggagctggccggcaaggaaaacctggaataccctagcgtgaccctgccacctcagcctcacaccaaggagggcgttgatgcctacaacgaagtgatcgcccgggtgcgaatgtgggtgaacctgaacctgtggcagaagctgaagctaagcagagatgatgccaagcctctgctgagactgaagggattcccttcctttcctctggtcgagagacaggccaacgaagtggactggtgggacatggtgtgtaacgtgaagaagctgatcaacgagaaaaaggaggatggcaaggtgttttggcagaatctggctggctacaagagacaggaagccctgagaccatacctgagcagcgaggaagatcggaagaagggaaagaaattcgctcggtaccagctgggcgacctgctgctgcacctggaaaagaagcacggcgaggactggggaaaggtgtacgacgaggcctgggagcggattgacaagaaagtggaaggcctgagcaagcacatcaagctggaagaggaacggagaagcgaggacgcccagagcaaggccgccctgaccgactggctgcgggctaaggccagcttcgtgatcgagggcctgaaggaggccgacaaggacgagttctgcagatgcgagctgaagctgcagaagtggtacggggacctgcggggaaagcccttcgccatcgaagccgagaacagcatcctggacatcagcggcttcagcaagcagtacaactgtgccttcatctggcagaaggacggcgtgaagaagctgaacctgtacctgatcatcaactacttcaagggcggcaagctgcggttcaagaagatcaaacctgaagccttcgaagccaacagattctacaccgtgatcaacaaaaagagcggcgagatcgtgcccatggaggtgaacttcaacttcgacgaccccaacctgatcatcctgcctctggcctttggcaagagacagggcagagaattcatctggaacgacctgctgtccctggaaaccggcagcctgaagctggccaacggaagagtgatcgagaagacactgtacaacagaagaacccggcaggatgagcctgccctgttcgtggccctgaccttcgagcggcgggaggtcctggactcctccaatatcaaaccaatgaacctgatcggcgtggcaagaggcgaaaacatccccgccgtgatcgccctgaccgaccccgagggctgcccactgagccggtttaaggatagcctgggaaacccaacccacatcctgagaatcggcgagagctataaggagaagcagcggaccatccaggccaagaaggaggtggagcagcggagagccggcggctacagccggaagtacgccagcaaagccaagaatctggcagacgatatggtgagaaacaccgctagagatctgctgtactacgccgtgacccaggatgccatgctgatcttcgccaacctgagccggggcttcggccggcagggcaagcggaccttcatggccgagagacagtacacacggatggaggactggctgaccgccaagctggcctacgagggcctgagcaagacctacctgtccaagacactggcccagtacacctccaagacatgcagcaactgtgggtttaccatcaccagcgccgactacgacagggtgctggagaagctgaagaagacagcaacaggctggatgaccacaattaacggcaaggagctgaaggtggagggccagattacctactacaacagatacaagagacagaacgtagtcaaggacctgtccgtcgagctggatagactgagcgaagaatctgtgaacaacgacatctcctcctggacaaagggcagaagcggagaagctctgagcctcctgaagaaaagattctcccatagacccgtgcaggagaagttcgtgtgcctgaactgcggcttcgagacacacgcagccgagcaagccgccctgaacatcgccagatcctggctgttcctgcggagccaggagtacaagaaataccagacaaacaagacaaccggcaacaccgataagagagccttcgtcgagacctggcagtccttttaccggaagaagcttaaggaggtgtggaaacctgccgtgcggtctggcggatctggcggaggctccacaagcgtggtgttcgaggacgtggccgtgtacttcagccaggaggagtggggcctgctggacgaggcccagaggcacctgtaccacgccgtgatgaccgagaacttcgccctggtgaccagcctgggctgctggcacggcgcccaggacgaggaggcccccagcgagcagagcatcagcgtgggcatgagcgaggtgggcacccccaagcccgaccccagcaccaagaagggccagccctacgagatgtgcgagcccctgagcaaggacctgctgcacctgaccagccccaagaaaaagagaaaagtctaagctgccttctgcggggcttgccttctggccatgcccttcttctctcccttgcacctgtacctcttggtctttgaataaagcctgagtaggaaggctagcaaaaaaaaaaaaaaaaaaaaaaaaaaaaaaaaaaaaaaaaaaaaaaaaaaaaaaaaaaaaaaaaaaaaaaaaaaaaaaaa

SEQ ID NO: 3679 - RNA, 5419 nt, synthetic construct
  source 1..5419: mol_type = other RNA
aggaaataagagagaaaagaagagtaagaagaaatataagagccaccatggcccctaagaagaagcgtaaagtgagccgggtgaacggcagcggcagcggcggcggcatgaaccacgaccaggagttcgacccccctaaggtgtaccctcccgtccccgccgagaagagaaagcccatccgggtcctgagcctgttcgatggcatcgccaccggtctgctggtgctgaaggacctgggcatccaggtggataggtacattgcctccgaggtgtgcgaggactccatcaccgtgggaatggtgcgtcatcagggcaagatcatgtacgtgggcgacgtgcggagcgtgacacagaagcatatccaggagtggggccctttcgacctggtgatcggcggcagcccttgcaatgacctgagcatcgtgaacccagcccggaagggcctgtacgagggaaccggcagactgttcttcgagttttacagactgctgcacgacgcccggcctaaggaaggcgacgaccggcccttcttttggctgttcgagaatgtggtggccatgggagtcagcgacaagcgggatattagccggttcctggagagcaaccccgtgatgatcgatgccaaggaagtgagcgccgcccaccgggccagatacttctggggcaatctgcctggcatgaacagacccctggccagcaccgtgaacgacaagctggagctgcaggagtgcctggagcacggccggatcgccaagttcagcaaggtgagaaccatcaccacccgaagcaacagcatcaaacaaggcaaggaccagcactttcctgtgttcatgaacgagaaggaggacatcctgtggtgtaccgagatggagagagtgttcgggttcccagtccactacacagatgtcagcaacatgtctagactggccagacagagactgctgggaagaagctggtccgtccctgtgatcagacacctgttcgcccctctgaaggagtacttcgcctgcgtgagcagcggcaacagcaacgccaacagccggggccccagcttctctagcggcctggtgccactgtccctgagagggagccacatgggccccatggagatctacaaaaccgtgagcgcctggaagcggcagcctgtgcgcgtgctgagcctgtttcggaatatcgataaagtcctgaaaagcctgggattcctggagagcggctctggctccggcggtggcaccctgaagtacgtggaggatgtgacaaacgtggtcagacgggatgtggagaagtggggccccttcgatctggtgtacggcagcacccaacccctgggcagctcttgtgaccggtgccctggctggtacatgtttcagttccaccggatcctgcagtacgccctgccgagacaggagtcccagcggccattcttttggattttcatggacaacttgctgctgaccgaggatgaccaggaaactaccactcggttcctgcagaccgaagccgtgaccctgcaggacgtgagaggccgggactaccagaacgccatgcgggtgtggtccaacatccctggactgaaaagcaagcacgcacctctgacccctaaagaagaggagtacctgcaggcccaggtgcggagcagaagcaagctggacgcccctaaggtggatctgctggtgaagaattgcctcctgcccctgagagagtacttcaagtatttcagccagaatagtctgcccctgggcggcccaagcagcggcgcccctcctcccagcggcggcagcccagccggctccccaacctctaccgaggagggcacctctgagtccgccacccccgagagcggccctggcacctccaccgagcccagcgagggcagcgcacccggcagccctgccggcagccccacctccacagaggagggaaccagcaccgagcccagcgaaggcagcgccccaggcaccagcaccgagcctagtgagggcggctctggcggcggcagcgcccaggagattaaacggatcaacaagatcagaagaagacttgtgaaagacagcaacaccaagaaggccggcaagacaggccccatgaaaaccctgctggttagagtgatgacacccgatctgagagagcggctggaaaacctgagaaagaagcctgaaaatatcccccagcccatcagcaatacatctagagccaacctgaataagctgctgaccgattacaccgaaatgaagaaggcgatcctgcatgtgtactgggaagagttccagaaggaccctgtgggcctgatgagccgggtggcccagcctgccagcaagaagatcgatcagaacaagctgaaacctgagatggacgagaagggcaacctgaccaccgccggctttgcctgctctcagtgtggccagcccctgttcgtgtacaagctggagcaggtgtctgagaagggcaaggcttacaccaactacttcggacggtgcaatgtggccgagcacgaaaagctgatcctgctggcccagctgaagcccgagaaggatagcgacgaagccgtgacatatagcctgggaaagtttgggcagagggccctggatttctacagcattcatgtgaccaaggagtccacccaccccgtgaagcccctggcccagatcgccggaaacagatacgcctccggacctgtgggaaaggccctgagcgacgcatgtatgggcacaatcgcctccttcctgtctaagtaccaggacatcatcatcgaacaccagaaggtggtgaagggcaaccagaagagactggagagcctgcgggagctggccggcaaggaaaacctggaataccctagcgtgaccctgccacctcagcctcacaccaaggagggcgttgatgcctacaacgaagtgatcgcccgggtgcgaatgtgggtgaacctgaacctgtggcagaagctgaagctaagcagagatgatgccaagcctctgctgagactgaagggattcccttcctttcctctggtcgagagacaggccaacgaagtggactggtgggacatggtgtgtaacgtgaagaagctgatcaacgagaaaaaggaggatggcaaggtgttttggcagaatctggctggctacaagagacaggaagccctgagaccatacctgagcagcgaggaagatcggaagaagggaaagaaattcgctcggtaccagctgggcgacctgctgctgcacctggaaaagaagcacggcgaggactggggaaaggtgtacgacgaggcctgggagcggattgacaagaaagtggaaggcctgagcaagcacatcaagctggaagaggaacggagaagcgaggacgcccagagcaaggccgccctgaccgactggctgcgggctaaggccagcttcgtgatcgagggcctgaaggaggccgacaaggacgagttctgcagatgcgagctgaagctgcagaagtggtacggggacctgcggggaaagcccttcgccatcgaagccgagaacagcatcctggacatcagcggcttcagcaagcagtacaactgtgccttcatctggcagaaggacggcgtgaagaagctgaacctgtacctgatcatcaactacttcaagggcggcaagctgcggttcaagaagatcaaacctgaagccttcgaagccaacagattctacaccgtgatcaacaaaaagagcggcgagatcgtgcccatggaggtgaacttcaacttcgacgaccccaacctgatcatcctgcctctggcctttggcaagagacagggcagagaattcatctggaacgacctgctgtccctggaaaccggcagcctgaagctggccaacggaagagtgatcgagaagacactgtacaacagaagaacccggcaggatgagcctgccctgttcgtggccctgaccttcgagcggcgggaggtcctggactcctccaatatcaaaccaatgaacctgatcggcgtggcaagaggcgaaaacatccccgccgtgatcgccctgaccgaccccgagggctgcccactgagccggtttaaggatagcctgggaaacccaacccacatcctgagaatcggcgagagctataaggagaagcagcggaccatccaggccaagaaggaggtggagcagcggagagccggcggctacagccggaagtacgccagcaaagccaagaatctggcagacgatatggtgagaaacaccgctagagatctgctgtactacgccgtgacccaggatgccatgctgatcttcgccaacctgagccggggcttcggccggcagggcaagcggaccttcatggccgagagacagtacacacggatggaggactggctgaccgccaagctggcctacgagggcctgagcaagacctacctgtccaagacactggcccagtacacctccaagacatgcagcaactgtgggtttaccatcaccagcgccgactacgacagggtgctggagaagctgaagaagacagcaacaggctggatgaccacaattaacggcaaggagctgaaggtggagggccagattacctactacaacagatacaagagacagaacgtagtcaaggacctgtccgtcgagctggatagactgagcgaagaatctgtgaacaacgacatctcctcctggacaaagggcagaagcggagaagctctgagcctcctgaagaaaagattctcccatagacccgtgcaggagaagttcgtgtgcctgaactgcggcttcgagacacacgcagccgagcaagccgccctgaacatcgccagatcctggctgttcctgcggagccaggagtacaagaaataccagacaaacaagacaaccggcaacaccgataagagagccttcgtcgagacctggcagtccttttaccggaagaagcttaaggaggtgtggaaacctgccgtgcggtctggcggatctggcggaggctccacaagcccccaggagcccgtgaccttcgccgacgtggccgtgctgttcacccccgaggagtggctgttcctggacagcgcccagaagagcctgtacagggacgtgatgctggagaactacaggaacctggccagcgtgggcgaccagctgtgcaagaccaggatgagcagccacctggagcagagggaggagctgtgcgtgaccgagaggggcatcttccccggcgcccacctgggcccccacttccagaccagccccaagaaaaagagaaaagtctaagctgccttctgcggggcttgccttctggccatgcccttcttctctcccttgcacctgtacctcttggtctttgaataaagcctgagtaggaaggctagcaaaaaaaaaaaaaaaaaaaaaaaaaaaaaaaaaaaaaaaaaaaaaaaaaaaaaaaaaaaaaaaaaaaaaaaaaaaaaaaa

SEQ ID NO: 3680 - RNA, 5416 nt, synthetic construct
  source 1..5416: mol_type = other RNA
aggaaataagagagaaaagaagagtaagaagaaatataagagccaccatggcccctaagaagaagcgtaaagtgagccgggtgaacggcagcggcagcggcggcggcatgaaccacgaccaggagttcgacccccctaaggtgtaccctcccgtccccgccgagaagagaaagcccatccgggtcctgagcctgttcgatggcatcgccaccggtctgctggtgctgaaggacctgggcatccaggtggataggtacattgcctccgaggtgtgcgaggactccatcaccgtgggaatggtgcgtcatcagggcaagatcatgtacgtgggcgacgtgcggagcgtgacacagaagcatatccaggagtggggccctttcgacctggtgatcggcggcagcccttgcaatgacctgagcatcgtgaacccagcccggaagggcctgtacgagggaaccggcagactgttcttcgagttttacagactgctgcacgacgcccggcctaaggaaggcgacgaccggcccttcttttggctgttcgagaatgtggtggccatgggagtcagcgacaagcgggatattagccggttcctggagagcaaccccgtgatgatcgatgccaaggaagtgagcgccgcccaccgggccagatacttctggggcaatctgcctggcatgaacagacccctggccagcaccgtgaacgacaagctggagctgcaggagtgcctggagcacggccggatcgccaagttcagcaaggtgagaaccatcaccacccgaagcaacagcatcaaacaaggcaaggaccagcactttcctgtgttcatgaacgagaaggaggacatcctgtggtgtaccgagatggagagagtgttcgggttcccagtccactacacagatgtcagcaacatgtctagactggccagacagagactgctgggaagaagctggtccgtccctgtgatcagacacctgttcgcccctctgaaggagtacttcgcctgcgtgagcagcggcaacagcaacgccaacagccggggccccagcttctctagcggcctggtgccactgtccctgagagggagccacatgggccccatggagatctacaaaaccgtgagcgcctggaagcggcagcctgtgcgcgtgctgagcctgtttcggaatatcgataaagtcctgaaaagcctgggattcctggagagcggctctggctccggcggtggcaccctgaagtacgtggaggatgtgacaaacgtggtcagacgggatgtggagaagtggggccccttcgatctggtgtacggcagcacccaacccctgggcagctcttgtgaccggtgccctggctggtacatgtttcagttccaccggatcctgcagtacgccctgccgagacaggagtcccagcggccattcttttggattttcatggacaacttgctgctgaccgaggatgaccaggaaactaccactcggttcctgcagaccgaagccgtgaccctgcaggacgtgagaggccgggactaccagaacgccatgcgggtgtggtccaacatccctggactgaaaagcaagcacgcacctctgacccctaaagaagaggagtacctgcaggcccaggtgcggagcagaagcaagctggacgcccctaaggtggatctgctggtgaagaattgcctcctgcccctgagagagtacttcaagtatttcagccagaatagtctgcccctgggcggcccaagcagcggcgcccctcctcccagcggcggcagcccagccggctccccaacctctaccgaggagggcacctctgagtccgccacccccgagagcggccctggcacctccaccgagcccagcgagggcagcgcacccggcagccctgccggcagccccacctccacagaggagggaaccagcaccgagcccagcgaaggcagcgccccaggcaccagcaccgagcctagtgagggcggctctggcggcggcagcgcccaggagattaaacggatcaacaagatcagaagaagacttgtgaaagacagcaacaccaagaaggccggcaagacaggccccatgaaaaccctgctggttagagtgatgacacccgatctgagagagcggctggaaaacctgagaaagaagcctgaaaatatcccccagcccatcagcaatacatctagagccaacctgaataagctgctgaccgattacaccgaaatgaagaaggcgatcctgcatgtgtactgggaagagttccagaaggaccctgtgggcctgatgagccgggtggcccagcctgccagcaagaagatcgatcagaacaagctgaaacctgagatggacgagaagggcaacctgaccaccgccggctttgcctgctctcagtgtggccagcccctgttcgtgtacaagctggagcaggtgtctgagaagggcaaggcttacaccaactacttcggacggtgcaatgtggccgagcacgaaaagctgatcctgctggcccagctgaagcccgagaaggatagcgacgaagccgtgacatatagcctgggaaagtttgggcagagggccctggatttctacagcattcatgtgaccaaggagtccacccaccccgtgaagcccctggcccagatcgccggaaacagatacgcctccggacctgtgggaaaggccctgagcgacgcatgtatgggcacaatcgcctccttcctgtctaagtaccaggacatcatcatcgaacaccagaaggtggtgaagggcaaccagaagagactggagagcctgcgggagctggccggcaaggaaaacctggaataccctagcgtgaccctgccacctcagcctcacaccaaggagggcgttgatgcctacaacgaagtgatcgcccgggtgcgaatgtgggtgaacctgaacctgtggcagaagctgaagctaagcagagatgatgccaagcctctgctgagactgaagggattcccttcctttcctctggtcgagagacaggccaacgaagtggactggtgggacatggtgtgtaacgtgaagaagctgatcaacgagaaaaaggaggatggcaaggtgttttggcagaatctggctggctacaagagacaggaagccctgagaccatacctgagcagcgaggaagatcggaagaagggaaagaaattcgctcggtaccagctgggcgacctgctgctgcacctggaaaagaagcacggcgaggactggggaaaggtgtacgacgaggcctgggagcggattgacaagaaagtggaaggcctgagcaagcacatcaagctggaagaggaacggagaagcgaggacgcccagagcaaggccgccctgaccgactggctgcgggctaaggccagcttcgtgatcgagggcctgaaggaggccgacaaggacgagttctgcagatgcgagctgaagctgcagaagtggtacggggacctgcggggaaagcccttcgccatcgaagccgagaacagcatcctggacatcagcggcttcagcaagcagtacaactgtgccttcatctggcagaaggacggcgtgaagaagctgaacctgtacctgatcatcaactacttcaagggcggcaagctgcggttcaagaagatcaaacctgaagccttcgaagccaacagattctacaccgtgatcaacaaaaagagcggcgagatcgtgcccatggaggtgaacttcaacttcgacgaccccaacctgatcatcctgcctctggcctttggcaagagacagggcagagaattcatctggaacgacctgctgtccctggaaaccggcagcctgaagctggccaacggaagagtgatcgagaagacactgtacaacagaagaacccggcaggatgagcctgccctgttcgtggccctgaccttcgagcggcgggaggtcctggactcctccaatatcaaaccaatgaacctgatcggcgtggcaagaggcgaaaacatccccgccgtgatcgccctgaccgaccccgagggctgcccactgagccggtttaaggatagcctgggaaacccaacccacatcctgagaatcggcgagagctataaggagaagcagcggaccatccaggccaagaaggaggtggagcagcggagagccggcggctacagccggaagtacgccagcaaagccaagaatctggcagacgatatggtgagaaacaccgctagagatctgctgtactacgccgtgacccaggatgccatgctgatcttcgccaacctgagccggggcttcggccggcagggcaagcggaccttcatggccgagagacagtacacacggatggaggactggctgaccgccaagctggcctacgagggcctgagcaagacctacctgtccaagacactggcccagtacacctccaagacatgcagcaactgtgggtttaccatcaccagcgccgactacgacagggtgctggagaagctgaagaagacagcaacaggctggatgaccacaattaacggcaaggagctgaaggtggagggccagattacctactacaacagatacaagagacagaacgtagtcaaggacctgtccgtcgagctggatagactgagcgaagaatctgtgaacaacgacatctcctcctggacaaagggcagaagcggagaagctctgagcctcctgaagaaaagattctcccatagacccgtgcaggagaagttcgtgtgcctgaactgcggcttcgagacacacgcagccgagcaagccgccctgaacatcgccagatcctggctgttcctgcggagccaggagtacaagaaataccagacaaacaagacaaccggcaacaccgataagagagccttcgtcgagacctggcagtccttttaccggaagaagcttaaggaggtgtggaaacctgccgtgcggtctggcggatctggcggaggctccacaagcagagtgctgaccttcagagacgtggccgtggagttcagccccgaggagtgggagtgcctggacagcgcccagcagagactgtacagagacgtgatgctggagaactacggcaacctgttcagcctgggcctggccatcttcaagcccgacctgatcacctacctggagcagagaaaggagccctggaacgccagaagacagaagaccgtggccaagcaccccgccggcagcctgcacttcaccagccccaagaaaaagagaaaagtctaagctgccttctgcggggcttgccttctggccatgcccttcttctctcccttgcacctgtacctcttggtctttgaataaagcctgagtaggaaggctagcaaaaaaaaaaaaaaaaaaaaaaaaaaaaaaaaaaaaaaaaaaaaaaaaaaaaaaaaaaaaaaaaaaaaaaaaaaaaaaaa

SEQ ID NO: 3681 - RNA, 5419 nt, synthetic construct
  source 1..5419: mol_type = other RNA
aggaaataagagagaaaagaagagtaagaagaaatataagagccaccatggcccctaagaagaagcgtaaagtgagccgggtgaacggcagcggcagcggcggcggcatgaaccacgaccaggagttcgacccccctaaggtgtaccctcccgtccccgccgagaagagaaagcccatccgggtcctgagcctgttcgatggcatcgccaccggtctgctggtgctgaaggacctgggcatccaggtggataggtacattgcctccgaggtgtgcgaggactccatcaccgtgggaatggtgcgtcatcagggcaagatcatgtacgtgggcgacgtgcggagcgtgacacagaagcatatccaggagtggggccctttcgacctggtgatcggcggcagcccttgcaatgacctgagcatcgtgaacccagcccggaagggcctgtacgagggaaccggcagactgttcttcgagttttacagactgctgcacgacgcccggcctaaggaaggcgacgaccggcccttcttttggctgttcgagaatgtggtggccatgggagtcagcgacaagcgggatattagccggttcctggagagcaaccccgtgatgatcgatgccaaggaagtgagcgccgcccaccgggccagatacttctggggcaatctgcctggcatgaacagacccctggccagcaccgtgaacgacaagctggagctgcaggagtgcctggagcacggccggatcgccaagttcagcaaggtgagaaccatcaccacccgaagcaacagcatcaaacaaggcaaggaccagcactttcctgtgttcatgaacgagaaggaggacatcctgtggtgtaccgagatggagagagtgttcgggttcccagtccactacacagatgtcagcaacatgtctagactggccagacagagactgctgggaagaagctggtccgtccctgtgatcagacacctgttcgcccctctgaaggagtacttcgcctgcgtgagcagcggcaacagcaacgccaacagccggggccccagcttctctagcggcctggtgccactgtccctgagagggagccacatgggccccatggagatctacaaaaccgtgagcgcctggaagcggcagcctgtgcgcgtgctgagcctgtttcggaatatcgataaagtcctgaaaagcctgggattcctggagagcggctctggctccggcggtggcaccctgaagtacgtggaggatgtgacaaacgtggtcagacgggatgtggagaagtggggccccttcgatctggtgtacggcagcacccaacccctgggcagctcttgtgaccggtgccctggctggtacatgtttcagttccaccggatcctgcagtacgccctgccgagacaggagtcccagcggccattcttttggattttcatggacaacttgctgctgaccgaggatgaccaggaaactaccactcggttcctgcagaccgaagccgtgaccctgcaggacgtgagaggccgggactaccagaacgccatgcgggtgtggtccaacatccctggactgaaaagcaagcacgcacctctgacccctaaagaagaggagtacctgcaggcccaggtgcggagcagaagcaagctggacgcccctaaggtggatctgctggtgaagaattgcctcctgcccctgagagagtacttcaagtatttcagccagaatagtctgcccctgggcggcccaagcagcggcgcccctcctcccagcggcggcagcccagccggctccccaacctctaccgaggagggcacctctgagtccgccacccccgagagcggccctggcacctccaccgagcccagcgagggcagcgcacccggcagccctgccggcagccccacctccacagaggagggaaccagcaccgagcccagcgaaggcagcgccccaggcaccagcaccgagcctagtgagggcggctctggcggcggcagcgcccaggagattaaacggatcaacaagatcagaagaagacttgtgaaagacagcaacaccaagaaggccggcaagacaggccccatgaaaaccctgctggttagagtgatgacacccgatctgagagagcggctggaaaacctgagaaagaagcctgaaaatatcccccagcccatcagcaatacatctagagccaacctgaataagctgctgaccgattacaccgaaatgaagaaggcgatcctgcatgtgtactgggaagagttccagaaggaccctgtgggcctgatgagccgggtggcccagcctgccagcaagaagatcgatcagaacaagctgaaacctgagatggacgagaagggcaacctgaccaccgccggctttgcctgctctcagtgtggccagcccctgttcgtgtacaagctggagcaggtgtctgagaagggcaaggcttacaccaactacttcggacggtgcaatgtggccgagcacgaaaagctgatcctgctggcccagctgaagcccgagaaggatagcgacgaagccgtgacatatagcctgggaaagtttgggcagagggccctggatttctacagcattcatgtgaccaaggagtccacccaccccgtgaagcccctggcccagatcgccggaaacagatacgcctccggacctgtgggaaaggccctgagcgacgcatgtatgggcacaatcgcctccttcctgtctaagtaccaggacatcatcatcgaacaccagaaggtggtgaagggcaaccagaagagactggagagcctgcgggagctggccggcaaggaaaacctggaataccctagcgtgaccctgccacctcagcctcacaccaaggagggcgttgatgcctacaacgaagtgatcgcccgggtgcgaatgtgggtgaacctgaacctgtggcagaagctgaagctaagcagagatgatgccaagcctctgctgagactgaagggattcccttcctttcctctggtcgagagacaggccaacgaagtggactggtgggacatggtgtgtaacgtgaagaagctgatcaacgagaaaaaggaggatggcaaggtgttttggcagaatctggctggctacaagagacaggaagccctgagaccatacctgagcagcgaggaagatcggaagaagggaaagaaattcgctcggtaccagctgggcgacctgctgctgcacctggaaaagaagcacggcgaggactggggaaaggtgtacgacgaggcctgggagcggattgacaagaaagtggaaggcctgagcaagcacatcaagctggaagaggaacggagaagcgaggacgcccagagcaaggccgccctgaccgactggctgcgggctaaggccagcttcgtgatcgagggcctgaaggaggccgacaaggacgagttctgcagatgcgagctgaagctgcagaagtggtacggggacctgcggggaaagcccttcgccatcgaagccgagaacagcatcctggacatcagcggcttcagcaagcagtacaactgtgccttcatctggcagaaggacggcgtgaagaagctgaacctgtacctgatcatcaactacttcaagggcggcaagctgcggttcaagaagatcaaacctgaagccttcgaagccaacagattctacaccgtgatcaacaaaaagagcggcgagatcgtgcccatggaggtgaacttcaacttcgacgaccccaacctgatcatcctgcctctggcctttggcaagagacagggcagagaattcatctggaacgacctgctgtccctggaaaccggcagcctgaagctggccaacggaagagtgatcgagaagacactgtacaacagaagaacccggcaggatgagcctgccctgttcgtggccctgaccttcgagcggcgggaggtcctggactcctccaatatcaaaccaatgaacctgatcggcgtggcaagaggcgaaaacatccccgccgtgatcgccctgaccgaccccgagggctgcccactgagccggtttaaggatagcctgggaaacccaacccacatcctgagaatcggcgagagctataaggagaagcagcggaccatccaggccaagaaggaggtggagcagcggagagccggcggctacagccggaagtacgccagcaaagccaagaatctggcagacgatatggtgagaaacaccgctagagatctgctgtactacgccgtgacccaggatgccatgctgatcttcgccaacctgagccggggcttcggccggcagggcaagcggaccttcatggccgagagacagtacacacggatggaggactggctgaccgccaagctggcctacgagggcctgagcaagacctacctgtccaagacactggcccagtacacctccaagacatgcagcaactgtgggtttaccatcaccagcgccgactacgacagggtgctggagaagctgaagaagacagcaacaggctggatgaccacaattaacggcaaggagctgaaggtggagggccagattacctactacaacagatacaagagacagaacgtagtcaaggacctgtccgtcgagctggatagactgagcgaagaatctgtgaacaacgacatctcctcctggacaaagggcagaagcggagaagctctgagcctcctgaagaaaagattctcccatagacccgtgcaggagaagttcgtgtgcctgaactgcggcttcgagacacacgcagccgagcaagccgccctgaacatcgccagatcctggctgttcctgcggagccaggagtacaagaaataccagacaaacaagacaaccggcaacaccgataagagagccttcgtcgagacctggcagtccttttaccggaagaagcttaaggaggtgtggaaacctgccgtgcggtctggcggatctggcggaggctccacaagcgcccaggagaccgtgaccttcaaggacgtggccgtggacttcacccaggaggagtggggccagctggaccccgtgcagaggaccctgtacagggacgtgatgctggagacctacggccacctgctgagcgtgggcaaccagatcgccaagcccgaggtgatcagcctgctggagcagggcgaggagccctggagcatggacagggtgtaccccccccagaggacctgccccgagtggatgaggaccagccccaagaaaaagagaaaagtctaagctgccttctgcggggcttgccttctggccatgcccttcttctctcccttgcacctgtacctcttggtctttgaataaagcctgagtaggaaggctagcaaaaaaaaaaaaaaaaaaaaaaaaaaaaaaaaaaaaaaaaaaaaaaaaaaaaaaaaaaaaaaaaaaaaaaaaaaaaaaaa

SEQ ID NO: 3682 - RNA, 5419 nt, synthetic construct
  source 1..5419: mol_type = other RNA
aggaaataagagagaaaagaagagtaagaagaaatataagagccaccatggcccctaagaagaagcgtaaagtgagccgggtgaacggcagcggcagcggcggcggcatgaaccacgaccaggagttcgacccccctaaggtgtaccctcccgtccccgccgagaagagaaagcccatccgggtcctgagcctgttcgatggcatcgccaccggtctgctggtgctgaaggacctgggcatccaggtggataggtacattgcctccgaggtgtgcgaggactccatcaccgtgggaatggtgcgtcatcagggcaagatcatgtacgtgggcgacgtgcggagcgtgacacagaagcatatccaggagtggggccctttcgacctggtgatcggcggcagcccttgcaatgacctgagcatcgtgaacccagcccggaagggcctgtacgagggaaccggcagactgttcttcgagttttacagactgctgcacgacgcccggcctaaggaaggcgacgaccggcccttcttttggctgttcgagaatgtggtggccatgggagtcagcgacaagcgggatattagccggttcctggagagcaaccccgtgatgatcgatgccaaggaagtgagcgccgcccaccgggccagatacttctggggcaatctgcctggcatgaacagacccctggccagcaccgtgaacgacaagctggagctgcaggagtgcctggagcacggccggatcgccaagttcagcaaggtgagaaccatcaccacccgaagcaacagcatcaaacaaggcaaggaccagcactttcctgtgttcatgaacgagaaggaggacatcctgtggtgtaccgagatggagagagtgttcgggttcccagtccactacacagatgtcagcaacatgtctagactggccagacagagactgctgggaagaagctggtccgtccctgtgatcagacacctgttcgcccctctgaaggagtacttcgcctgcgtgagcagcggcaacagcaacgccaacagccggggccccagcttctctagcggcctggtgccactgtccctgagagggagccacatgggccccatggagatctacaaaaccgtgagcgcctggaagcggcagcctgtgcgcgtgctgagcctgtttcggaatatcgataaagtcctgaaaagcctgggattcctggagagcggctctggctccggcggtggcaccctgaagtacgtggaggatgtgacaaacgtggtcagacgggatgtggagaagtggggccccttcgatctggtgtacggcagcacccaacccctgggcagctcttgtgaccggtgccctggctggtacatgtttcagttccaccggatcctgcagtacgccctgccgagacaggagtcccagcggccattcttttggattttcatggacaacttgctgctgaccgaggatgaccaggaaactaccactcggttcctgcagaccgaagccgtgaccctgcaggacgtgagaggccgggactaccagaacgccatgcgggtgtggtccaacatccctggactgaaaagcaagcacgcacctctgacccctaaagaagaggagtacctgcaggcccaggtgcggagcagaagcaagctggacgcccctaaggtggatctgctggtgaagaattgcctcctgcccctgagagagtacttcaagtatttcagccagaatagtctgcccctgggcggcccaagcagcggcgcccctcctcccagcggcggcagcccagccggctccccaacctctaccgaggagggcacctctgagtccgccacccccgagagcggccctggcacctccaccgagcccagcgagggcagcgcacccggcagccctgccggcagccccacctccacagaggagggaaccagcaccgagcccagcgaaggcagcgccccaggcaccagcaccgagcctagtgagggcggctctggcggcggcagcgcccaggagattaaacggatcaacaagatcagaagaagacttgtgaaagacagcaacaccaagaaggccggcaagacaggccccatgaaaaccctgctggttagagtgatgacacccgatctgagagagcggctggaaaacctgagaaagaagcctgaaaatatcccccagcccatcagcaatacatctagagccaacctgaataagctgctgaccgattacaccgaaatgaagaaggcgatcctgcatgtgtactgggaagagttccagaaggaccctgtgggcctgatgagccgggtggcccagcctgccagcaagaagatcgatcagaacaagctgaaacctgagatggacgagaagggcaacctgaccaccgccggctttgcctgctctcagtgtggccagcccctgttcgtgtacaagctggagcaggtgtctgagaagggcaaggcttacaccaactacttcggacggtgcaatgtggccgagcacgaaaagctgatcctgctggcccagctgaagcccgagaaggatagcgacgaagccgtgacatatagcctgggaaagtttgggcagagggccctggatttctacagcattcatgtgaccaaggagtccacccaccccgtgaagcccctggcccagatcgccggaaacagatacgcctccggacctgtgggaaaggccctgagcgacgcatgtatgggcacaatcgcctccttcctgtctaagtaccaggacatcatcatcgaacaccagaaggtggtgaagggcaaccagaagagactggagagcctgcgggagctggccggcaaggaaaacctggaataccctagcgtgaccctgccacctcagcctcacaccaaggagggcgttgatgcctacaacgaagtgatcgcccgggtgcgaatgtgggtgaacctgaacctgtggcagaagctgaagctaagcagagatgatgccaagcctctgctgagactgaagggattcccttcctttcctctggtcgagagacaggccaacgaagtggactggtgggacatggtgtgtaacgtgaagaagctgatcaacgagaaaaaggaggatggcaaggtgttttggcagaatctggctggctacaagagacaggaagccctgagaccatacctgagcagcgaggaagatcggaagaagggaaagaaattcgctcggtaccagctgggcgacctgctgctgcacctggaaaagaagcacggcgaggactggggaaaggtgtacgacgaggcctgggagcggattgacaagaaagtggaaggcctgagcaagcacatcaagctggaagaggaacggagaagcgaggacgcccagagcaaggccgccctgaccgactggctgcgggctaaggccagcttcgtgatcgagggcctgaaggaggccgacaaggacgagttctgcagatgcgagctgaagctgcagaagtggtacggggacctgcggggaaagcccttcgccatcgaagccgagaacagcatcctggacatcagcggcttcagcaagcagtacaactgtgccttcatctggcagaaggacggcgtgaagaagctgaacctgtacctgatcatcaactacttcaagggcggcaagctgcggttcaagaagatcaaacctgaagccttcgaagccaacagattctacaccgtgatcaacaaaaagagcggcgagatcgtgcccatggaggtgaacttcaacttcgacgaccccaacctgatcatcctgcctctggcctttggcaagagacagggcagagaattcatctggaacgacctgctgtccctggaaaccggcagcctgaagctggccaacggaagagtgatcgagaagacactgtacaacagaagaacccggcaggatgagcctgccctgttcgtggccctgaccttcgagcggcgggaggtcctggactcctccaatatcaaaccaatgaacctgatcggcgtggcaagaggcgaaaacatccccgccgtgatcgccctgaccgaccccgagggctgcccactgagccggtttaaggatagcctgggaaacccaacccacatcctgagaatcggcgagagctataaggagaagcagcggaccatccaggccaagaaggaggtggagcagcggagagccggcggctacagccggaagtacgccagcaaagccaagaatctggcagacgatatggtgagaaacaccgctagagatctgctgtactacgccgtgacccaggatgccatgctgatcttcgccaacctgagccggggcttcggccggcagggcaagcggaccttcatggccgagagacagtacacacggatggaggactggctgaccgccaagctggcctacgagggcctgagcaagacctacctgtccaagacactggcccagtacacctccaagacatgcagcaactgtgggtttaccatcaccagcgccgactacgacagggtgctggagaagctgaagaagacagcaacaggctggatgaccacaattaacggcaaggagctgaaggtggagggccagattacctactacaacagatacaagagacagaacgtagtcaaggacctgtccgtcgagctggatagactgagcgaagaatctgtgaacaacgacatctcctcctggacaaagggcagaagcggagaagctctgagcctcctgaagaaaagattctcccatagacccgtgcaggagaagttcgtgtgcctgaactgcggcttcgagacacacgcagccgagcaagccgccctgaacatcgccagatcctggctgttcctgcggagccaggagtacaagaaataccagacaaacaagacaaccggcaacaccgataagagagccttcgtcgagacctggcagtccttttaccggaagaagcttaaggaggtgtggaaacctgccgtgcggtctggcggatctggcggaggctccacaagcatggccgccgtgagccccaccaccaggtgccaggagagcgtgaccttcgaggacgtggccgtggtgttcaccgacgaggagtggagccacctggtgcccatccagagggacctgtacaaggaggtgatgctggagaactacaacagcatcgtgagcctgggcctgcccgtgccccagcccgacgtgatcttccagctgaagaggggcgacaagccctgggtggtggacctgcacggcagcgagaccagccccaagaaaaagagaaaagtctaagctgccttctgcggggcttgccttctggccatgcccttcttctctcccttgcacctgtacctcttggtctttgaataaagcctgagtaggaaggctagcaaaaaaaaaaaaaaaaaaaaaaaaaaaaaaaaaaaaaaaaaaaaaaaaaaaaaaaaaaaaaaaaaaaaaaaaaaaaaaaa

SEQ ID NO: 3683 - RNA, 5419 nt, synthetic construct
  source 1..5419: mol_type = other RNA
aggaaataagagagaaaagaagagtaagaagaaatataagagccaccatggcccctaagaagaagcgtaaagtgagccgggtgaacggcagcggcagcggcggcggcatgaaccacgaccaggagttcgacccccctaaggtgtaccctcccgtccccgccgagaagagaaagcccatccgggtcctgagcctgttcgatggcatcgccaccggtctgctggtgctgaaggacctgggcatccaggtggataggtacattgcctccgaggtgtgcgaggactccatcaccgtgggaatggtgcgtcatcagggcaagatcatgtacgtgggcgacgtgcggagcgtgacacagaagcatatccaggagtggggccctttcgacctggtgatcggcggcagcccttgcaatgacctgagcatcgtgaacccagcccggaagggcctgtacgagggaaccggcagactgttcttcgagttttacagactgctgcacgacgcccggcctaaggaaggcgacgaccggcccttcttttggctgttcgagaatgtggtggccatgggagtcagcgacaagcgggatattagccggttcctggagagcaaccccgtgatgatcgatgccaaggaagtgagcgccgcccaccgggccagatacttctggggcaatctgcctggcatgaacagacccctggccagcaccgtgaacgacaagctggagctgcaggagtgcctggagcacggccggatcgccaagttcagcaaggtgagaaccatcaccacccgaagcaacagcatcaaacaaggcaaggaccagcactttcctgtgttcatgaacgagaaggaggacatcctgtggtgtaccgagatggagagagtgttcgggttcccagtccactacacagatgtcagcaacatgtctagactggccagacagagactgctgggaagaagctggtccgtccctgtgatcagacacctgttcgcccctctgaaggagtacttcgcctgcgtgagcagcggcaacagcaacgccaacagccggggccccagcttctctagcggcctggtgccactgtccctgagagggagccacatgggccccatggagatctacaaaaccgtgagcgcctggaagcggcagcctgtgcgcgtgctgagcctgtttcggaatatcgataaagtcctgaaaagcctgggattcctggagagcggctctggctccggcggtggcaccctgaagtacgtggaggatgtgacaaacgtggtcagacgggatgtggagaagtggggccccttcgatctggtgtacggcagcacccaacccctgggcagctcttgtgaccggtgccctggctggtacatgtttcagttccaccggatcctgcagtacgccctgccgagacaggagtcccagcggccattcttttggattttcatggacaacttgctgctgaccgaggatgaccaggaaactaccactcggttcctgcagaccgaagccgtgaccctgcaggacgtgagaggccgggactaccagaacgccatgcgggtgtggtccaacatccctggactgaaaagcaagcacgcacctctgacccctaaagaagaggagtacctgcaggcccaggtgcggagcagaagcaagctggacgcccctaaggtggatctgctggtgaagaattgcctcctgcccctgagagagtacttcaagtatttcagccagaatagtctgcccctgggcggcccaagcagcggcgcccctcctcccagcggcggcagcccagccggctccccaacctctaccgaggagggcacctctgagtccgccacccccgagagcggccctggcacctccaccgagcccagcgagggcagcgcacccggcagccctgccggcagccccacctccacagaggagggaaccagcaccgagcccagcgaaggcagcgccccaggcaccagcaccgagcctagtgagggcggctctggcggcggcagcgcccaggagattaaacggatcaacaagatcagaagaagacttgtgaaagacagcaacaccaagaaggccggcaagacaggccccatgaaaaccctgctggttagagtgatgacacccgatctgagagagcggctggaaaacctgagaaagaagcctgaaaatatcccccagcccatcagcaatacatctagagccaacctgaataagctgctgaccgattacaccgaaatgaagaaggcgatcctgcatgtgtactgggaagagttccagaaggaccctgtgggcctgatgagccgggtggcccagcctgccagcaagaagatcgatcagaacaagctgaaacctgagatggacgagaagggcaacctgaccaccgccggctttgcctgctctcagtgtggccagcccctgttcgtgtacaagctggagcaggtgtctgagaagggcaaggcttacaccaactacttcggacggtgcaatgtggccgagcacgaaaagctgatcctgctggcccagctgaagcccgagaaggatagcgacgaagccgtgacatatagcctgggaaagtttgggcagagggccctggatttctacagcattcatgtgaccaaggagtccacccaccccgtgaagcccctggcccagatcgccggaaacagatacgcctccggacctgtgggaaaggccctgagcgacgcatgtatgggcacaatcgcctccttcctgtctaagtaccaggacatcatcatcgaacaccagaaggtggtgaagggcaaccagaagagactggagagcctgcgggagctggccggcaaggaaaacctggaataccctagcgtgaccctgccacctcagcctcacaccaaggagggcgttgatgcctacaacgaagtgatcgcccgggtgcgaatgtgggtgaacctgaacctgtggcagaagctgaagctaagcagagatgatgccaagcctctgctgagactgaagggattcccttcctttcctctggtcgagagacaggccaacgaagtggactggtgggacatggtgtgtaacgtgaagaagctgatcaacgagaaaaaggaggatggcaaggtgttttggcagaatctggctggctacaagagacaggaagccctgagaccatacctgagcagcgaggaagatcggaagaagggaaagaaattcgctcggtaccagctgggcgacctgctgctgcacctggaaaagaagcacggcgaggactggggaaaggtgtacgacgaggcctgggagcggattgacaagaaagtggaaggcctgagcaagcacatcaagctggaagaggaacggagaagcgaggacgcccagagcaaggccgccctgaccgactggctgcgggctaaggccagcttcgtgatcgagggcctgaaggaggccgacaaggacgagttctgcagatgcgagctgaagctgcagaagtggtacggggacctgcggggaaagcccttcgccatcgaagccgagaacagcatcctggacatcagcggcttcagcaagcagtacaactgtgccttcatctggcagaaggacggcgtgaagaagctgaacctgtacctgatcatcaactacttcaagggcggcaagctgcggttcaagaagatcaaacctgaagccttcgaagccaacagattctacaccgtgatcaacaaaaagagcggcgagatcgtgcccatggaggtgaacttcaacttcgacgaccccaacctgatcatcctgcctctggcctttggcaagagacagggcagagaattcatctggaacgacctgctgtccctggaaaccggcagcctgaagctggccaacggaagagtgatcgagaagacactgtacaacagaagaacccggcaggatgagcctgccctgttcgtggccctgaccttcgagcggcgggaggtcctggactcctccaatatcaaaccaatgaacctgatcggcgtggcaagaggcgaaaacatccccgccgtgatcgccctgaccgaccccgagggctgcccactgagccggtttaaggatagcctgggaaacccaacccacatcctgagaatcggcgagagctataaggagaagcagcggaccatccaggccaagaaggaggtggagcagcggagagccggcggctacagccggaagtacgccagcaaagccaagaatctggcagacgatatggtgagaaacaccgctagagatctgctgtactacgccgtgacccaggatgccatgctgatcttcgccaacctgagccggggcttcggccggcagggcaagcggaccttcatggccgagagacagtacacacggatggaggactggctgaccgccaagctggcctacgagggcctgagcaagacctacctgtccaagacactggcccagtacacctccaagacatgcagcaactgtgggtttaccatcaccagcgccgactacgacagggtgctggagaagctgaagaagacagcaacaggctggatgaccacaattaacggcaaggagctgaaggtggagggccagattacctactacaacagatacaagagacagaacgtagtcaaggacctgtccgtcgagctggatagactgagcgaagaatctgtgaacaacgacatctcctcctggacaaagggcagaagcggagaagctctgagcctcctgaagaaaagattctcccatagacccgtgcaggagaagttcgtgtgcctgaactgcggcttcgagacacacgcagccgagcaagccgccctgaacatcgccagatcctggctgttcctgcggagccaggagtacaagaaataccagacaaacaagacaaccggcaacaccgataagagagccttcgtcgagacctggcagtccttttaccggaagaagcttaaggaggtgtggaaacctgccgtgcggtctggcggatctggcggaggctccacaagcttcgagagcgtggtgttcgaggacgtggccgtggacttcacccccgaggagtgggccctgctggaccccgcccagaggaacctgtacagggacgtgatgctggagaccttcaggaacctggccagcgtgggcgagaactggaagtgccacagcatcgaggaccagcacaagaaccagggcacccacctgaggtggagggtggtggagatccccagcgagaacaacgagagcaaccagtgcggcaccagccccaagaaaaagagaaaagtctaagctgccttctgcggggcttgccttctggccatgcccttcttctctcccttgcacctgtacctcttggtctttgaataaagcctgagtaggaaggctagcaaaaaaaaaaaaaaaaaaaaaaaaaaaaaaaaaaaaaaaaaaaaaaaaaaaaaaaaaaaaaaaaaaaaaaaaaaaaaaaa

SEQ ID NO: 3684 - RNA, 5419 nt, synthetic construct
  source 1..5419: mol_type = other RNA
aggaaataagagagaaaagaagagtaagaagaaatataagagccaccatggcccctaagaagaagcgtaaagtgagccgggtgaacggcagcggcagcggcggcggcatgaaccacgaccaggagttcgacccccctaaggtgtaccctcccgtccccgccgagaagagaaagcccatccgggtcctgagcctgttcgatggcatcgccaccggtctgctggtgctgaaggacctgggcatccaggtggataggtacattgcctccgaggtgtgcgaggactccatcaccgtgggaatggtgcgtcatcagggcaagatcatgtacgtgggcgacgtgcggagcgtgacacagaagcatatccaggagtggggccctttcgacctggtgatcggcggcagcccttgcaatgacctgagcatcgtgaacccagcccggaagggcctgtacgagggaaccggcagactgttcttcgagttttacagactgctgcacgacgcccggcctaaggaaggcgacgaccggcccttcttttggctgttcgagaatgtggtggccatgggagtcagcgacaagcgggatattagccggttcctggagagcaaccccgtgatgatcgatgccaaggaagtgagcgccgcccaccgggccagatacttctggggcaatctgcctggcatgaacagacccctggccagcaccgtgaacgacaagctggagctgcaggagtgcctggagcacggccggatcgccaagttcagcaaggtgagaaccatcaccacccgaagcaacagcatcaaacaaggcaaggaccagcactttcctgtgttcatgaacgagaaggaggacatcctgtggtgtaccgagatggagagagtgttcgggttcccagtccactacacagatgtcagcaacatgtctagactggccagacagagactgctgggaagaagctggtccgtccctgtgatcagacacctgttcgcccctctgaaggagtacttcgcctgcgtgagcagcggcaacagcaacgccaacagccggggccccagcttctctagcggcctggtgccactgtccctgagagggagccacatgggccccatggagatctacaaaaccgtgagcgcctggaagcggcagcctgtgcgcgtgctgagcctgtttcggaatatcgataaagtcctgaaaagcctgggattcctggagagcggctctggctccggcggtggcaccctgaagtacgtggaggatgtgacaaacgtggtcagacgggatgtggagaagtggggccccttcgatctggtgtacggcagcacccaacccctgggcagctcttgtgaccggtgccctggctggtacatgtttcagttccaccggatcctgcagtacgccctgccgagacaggagtcccagcggccattcttttggattttcatggacaacttgctgctgaccgaggatgaccaggaaactaccactcggttcctgcagaccgaagccgtgaccctgcaggacgtgagaggccgggactaccagaacgccatgcgggtgtggtccaacatccctggactgaaaagcaagcacgcacctctgacccctaaagaagaggagtacctgcaggcccaggtgcggagcagaagcaagctggacgcccctaaggtggatctgctggtgaagaattgcctcctgcccctgagagagtacttcaagtatttcagccagaatagtctgcccctgggcggcccaagcagcggcgcccctcctcccagcggcggcagcccagccggctccccaacctctaccgaggagggcacctctgagtccgccacccccgagagcggccctggcacctccaccgagcccagcgagggcagcgcacccggcagccctgccggcagccccacctccacagaggagggaaccagcaccgagcccagcgaaggcagcgccccaggcaccagcaccgagcctagtgagggcggctctggcggcggcagcgcccaggagattaaacggatcaacaagatcagaagaagacttgtgaaagacagcaacaccaagaaggccggcaagacaggccccatgaaaaccctgctggttagagtgatgacacccgatctgagagagcggctggaaaacctgagaaagaagcctgaaaatatcccccagcccatcagcaatacatctagagccaacctgaataagctgctgaccgattacaccgaaatgaagaaggcgatcctgcatgtgtactgggaagagttccagaaggaccctgtgggcctgatgagccgggtggcccagcctgccagcaagaagatcgatcagaacaagctgaaacctgagatggacgagaagggcaacctgaccaccgccggctttgcctgctctcagtgtggccagcccctgttcgtgtacaagctggagcaggtgtctgagaagggcaaggcttacaccaactacttcggacggtgcaatgtggccgagcacgaaaagctgatcctgctggcccagctgaagcccgagaaggatagcgacgaagccgtgacatatagcctgggaaagtttgggcagagggccctggatttctacagcattcatgtgaccaaggagtccacccaccccgtgaagcccctggcccagatcgccggaaacagatacgcctccggacctgtgggaaaggccctgagcgacgcatgtatgggcacaatcgcctccttcctgtctaagtaccaggacatcatcatcgaacaccagaaggtggtgaagggcaaccagaagagactggagagcctgcgggagctggccggcaaggaaaacctggaataccctagcgtgaccctgccacctcagcctcacaccaaggagggcgttgatgcctacaacgaagtgatcgcccgggtgcgaatgtgggtgaacctgaacctgtggcagaagctgaagctaagcagagatgatgccaagcctctgctgagactgaagggattcccttcctttcctctggtcgagagacaggccaacgaagtggactggtgggacatggtgtgtaacgtgaagaagctgatcaacgagaaaaaggaggatggcaaggtgttttggcagaatctggctggctacaagagacaggaagccctgagaccatacctgagcagcgaggaagatcggaagaagggaaagaaattcgctcggtaccagctgggcgacctgctgctgcacctggaaaagaagcacggcgaggactggggaaaggtgtacgacgaggcctgggagcggattgacaagaaagtggaaggcctgagcaagcacatcaagctggaagaggaacggagaagcgaggacgcccagagcaaggccgccctgaccgactggctgcgggctaaggccagcttcgtgatcgagggcctgaaggaggccgacaaggacgagttctgcagatgcgagctgaagctgcagaagtggtacggggacctgcggggaaagcccttcgccatcgaagccgagaacagcatcctggacatcagcggcttcagcaagcagtacaactgtgccttcatctggcagaaggacggcgtgaagaagctgaacctgtacctgatcatcaactacttcaagggcggcaagctgcggttcaagaagatcaaacctgaagccttcgaagccaacagattctacaccgtgatcaacaaaaagagcggcgagatcgtgcccatggaggtgaacttcaacttcgacgaccccaacctgatcatcctgcctctggcctttggcaagagacagggcagagaattcatctggaacgacctgctgtccctggaaaccggcagcctgaagctggccaacggaagagtgatcgagaagacactgtacaacagaagaacccggcaggatgagcctgccctgttcgtggccctgaccttcgagcggcgggaggtcctggactcctccaatatcaaaccaatgaacctgatcggcgtggcaagaggcgaaaacatccccgccgtgatcgccctgaccgaccccgagggctgcccactgagccggtttaaggatagcctgggaaacccaacccacatcctgagaatcggcgagagctataaggagaagcagcggaccatccaggccaagaaggaggtggagcagcggagagccggcggctacagccggaagtacgccagcaaagccaagaatctggcagacgatatggtgagaaacaccgctagagatctgctgtactacgccgtgacccaggatgccatgctgatcttcgccaacctgagccggggcttcggccggcagggcaagcggaccttcatggccgagagacagtacacacggatggaggactggctgaccgccaagctggcctacgagggcctgagcaagacctacctgtccaagacactggcccagtacacctccaagacatgcagcaactgtgggtttaccatcaccagcgccgactacgacagggtgctggagaagctgaagaagacagcaacaggctggatgaccacaattaacggcaaggagctgaaggtggagggccagattacctactacaacagatacaagagacagaacgtagtcaaggacctgtccgtcgagctggatagactgagcgaagaatctgtgaacaacgacatctcctcctggacaaagggcagaagcggagaagctctgagcctcctgaagaaaagattctcccatagacccgtgcaggagaagttcgtgtgcctgaactgcggcttcgagacacacgcagccgagcaagccgccctgaacatcgccagatcctggctgttcctgcggagccaggagtacaagaaataccagacaaacaagacaaccggcaacaccgataagagagccttcgtcgagacctggcagtccttttaccggaagaagcttaaggaggtgtggaaacctgccgtgcggtctggcggatctggcggaggctccacaagcaggcccagggccctgaagttcgccgacgtggccgtgtacttcagccccgaggagtggggctgcctgaggcccgcccagaggctgctgtacagggaggtgatgagggagacctacggcctgctgggcgccctgggctgcgccggccccacccccgccctgatcagctggctggagaggaacaccgacgactgggagcccgccgccctggacccccaggagtacaggaggtgggccaccttccagaccagccccaagaaaaagagaaaagtctaagctgccttctgcggggcttgccttctggccatgcccttcttctctcccttgcacctgtacctcttggtctttgaataaagcctgagtaggaaggctagcaaaaaaaaaaaaaaaaaaaaaaaaaaaaaaaaaaaaaaaaaaaaaaaaaaaaaaaaaaaaaaaaaaaaaaaaaaaaaaaa

SEQ ID NO: 3685 - RNA, 5419 nt, synthetic construct
  source 1..5419: mol_type = other RNA
aggaaataagagagaaaagaagagtaagaagaaatataagagccaccatggcccctaagaagaagcgtaaagtgagccgggtgaacggcagcggcagcggcggcggcatgaaccacgaccaggagttcgacccccctaaggtgtaccctcccgtccccgccgagaagagaaagcccatccgggtcctgagcctgttcgatggcatcgccaccggtctgctggtgctgaaggacctgggcatccaggtggataggtacattgcctccgaggtgtgcgaggactccatcaccgtgggaatggtgcgtcatcagggcaagatcatgtacgtgggcgacgtgcggagcgtgacacagaagcatatccaggagtggggccctttcgacctggtgatcggcggcagcccttgcaatgacctgagcatcgtgaacccagcccggaagggcctgtacgagggaaccggcagactgttcttcgagttttacagactgctgcacgacgcccggcctaaggaaggcgacgaccggcccttcttttggctgttcgagaatgtggtggccatgggagtcagcgacaagcgggatattagccggttcctggagagcaaccccgtgatgatcgatgccaaggaagtgagcgccgcccaccgggccagatacttctggggcaatctgcctggcatgaacagacccctggccagcaccgtgaacgacaagctggagctgcaggagtgcctggagcacggccggatcgccaagttcagcaaggtgagaaccatcaccacccgaagcaacagcatcaaacaaggcaaggaccagcactttcctgtgttcatgaacgagaaggaggacatcctgtggtgtaccgagatggagagagtgttcgggttcccagtccactacacagatgtcagcaacatgtctagactggccagacagagactgctgggaagaagctggtccgtccctgtgatcagacacctgttcgcccctctgaaggagtacttcgcctgcgtgagcagcggcaacagcaacgccaacagccggggccccagcttctctagcggcctggtgccactgtccctgagagggagccacatgggccccatggagatctacaaaaccgtgagcgcctggaagcggcagcctgtgcgcgtgctgagcctgtttcggaatatcgataaagtcctgaaaagcctgggattcctggagagcggctctggctccggcggtggcaccctgaagtacgtggaggatgtgacaaacgtggtcagacgggatgtggagaagtggggccccttcgatctggtgtacggcagcacccaacccctgggcagctcttgtgaccggtgccctggctggtacatgtttcagttccaccggatcctgcagtacgccctgccgagacaggagtcccagcggccattcttttggattttcatggacaacttgctgctgaccgaggatgaccaggaaactaccactcggttcctgcagaccgaagccgtgaccctgcaggacgtgagaggccgggactaccagaacgccatgcgggtgtggtccaacatccctggactgaaaagcaagcacgcacctctgacccctaaagaagaggagtacctgcaggcccaggtgcggagcagaagcaagctggacgcccctaaggtggatctgctggtgaagaattgcctcctgcccctgagagagtacttcaagtatttcagccagaatagtctgcccctgggcggcccaagcagcggcgcccctcctcccagcggcggcagcccagccggctccccaacctctaccgaggagggcacctctgagtccgccacccccgagagcggccctggcacctccaccgagcccagcgagggcagcgcacccggcagccctgccggcagccccacctccacagaggagggaaccagcaccgagcccagcgaaggcagcgccccaggcaccagcaccgagcctagtgagggcggctctggcggcggcagcgcccaggagattaaacggatcaacaagatcagaagaagacttgtgaaagacagcaacaccaagaaggccggcaagacaggccccatgaaaaccctgctggttagagtgatgacacccgatctgagagagcggctggaaaacctgagaaagaagcctgaaaatatcccccagcccatcagcaatacatctagagccaacctgaataagctgctgaccgattacaccgaaatgaagaaggcgatcctgcatgtgtactgggaagagttccagaaggaccctgtgggcctgatgagccgggtggcccagcctgccagcaagaagatcgatcagaacaagctgaaacctgagatggacgagaagggcaacctgaccaccgccggctttgcctgctctcagtgtggccagcccctgttcgtgtacaagctggagcaggtgtctgagaagggcaaggcttacaccaactacttcggacggtgcaatgtggccgagcacgaaaagctgatcctgctggcccagctgaagcccgagaaggatagcgacgaagccgtgacatatagcctgggaaagtttgggcagagggccctggatttctacagcattcatgtgaccaaggagtccacccaccccgtgaagcccctggcccagatcgccggaaacagatacgcctccggacctgtgggaaaggccctgagcgacgcatgtatgggcacaatcgcctccttcctgtctaagtaccaggacatcatcatcgaacaccagaaggtggtgaagggcaaccagaagagactggagagcctgcgggagctggccggcaaggaaaacctggaataccctagcgtgaccctgccacctcagcctcacaccaaggagggcgttgatgcctacaacgaagtgatcgcccgggtgcgaatgtgggtgaacctgaacctgtggcagaagctgaagctaagcagagatgatgccaagcctctgctgagactgaagggattcccttcctttcctctggtcgagagacaggccaacgaagtggactggtgggacatggtgtgtaacgtgaagaagctgatcaacgagaaaaaggaggatggcaaggtgttttggcagaatctggctggctacaagagacaggaagccctgagaccatacctgagcagcgaggaagatcggaagaagggaaagaaattcgctcggtaccagctgggcgacctgctgctgcacctggaaaagaagcacggcgaggactggggaaaggtgtacgacgaggcctgggagcggattgacaagaaagtggaaggcctgagcaagcacatcaagctggaagaggaacggagaagcgaggacgcccagagcaaggccgccctgaccgactggctgcgggctaaggccagcttcgtgatcgagggcctgaaggaggccgacaaggacgagttctgcagatgcgagctgaagctgcagaagtggtacggggacctgcggggaaagcccttcgccatcgaagccgagaacagcatcctggacatcagcggcttcagcaagcagtacaactgtgccttcatctggcagaaggacggcgtgaagaagctgaacctgtacctgatcatcaactacttcaagggcggcaagctgcggttcaagaagatcaaacctgaagccttcgaagccaacagattctacaccgtgatcaacaaaaagagcggcgagatcgtgcccatggaggtgaacttcaacttcgacgaccccaacctgatcatcctgcctctggcctttggcaagagacagggcagagaattcatctggaacgacctgctgtccctggaaaccggcagcctgaagctggccaacggaagagtgatcgagaagacactgtacaacagaagaacccggcaggatgagcctgccctgttcgtggccctgaccttcgagcggcgggaggtcctggactcctccaatatcaaaccaatgaacctgatcggcgtggcaagaggcgaaaacatccccgccgtgatcgccctgaccgaccccgagggctgcccactgagccggtttaaggatagcctgggaaacccaacccacatcctgagaatcggcgagagctataaggagaagcagcggaccatccaggccaagaaggaggtggagcagcggagagccggcggctacagccggaagtacgccagcaaagccaagaatctggcagacgatatggtgagaaacaccgctagagatctgctgtactacgccgtgacccaggatgccatgctgatcttcgccaacctgagccggggcttcggccggcagggcaagcggaccttcatggccgagagacagtacacacggatggaggactggctgaccgccaagctggcctacgagggcctgagcaagacctacctgtccaagacactggcccagtacacctccaagacatgcagcaactgtgggtttaccatcaccagcgccgactacgacagggtgctggagaagctgaagaagacagcaacaggctggatgaccacaattaacggcaaggagctgaaggtggagggccagattacctactacaacagatacaagagacagaacgtagtcaaggacctgtccgtcgagctggatagactgagcgaagaatctgtgaacaacgacatctcctcctggacaaagggcagaagcggagaagctctgagcctcctgaagaaaagattctcccatagacccgtgcaggagaagttcgtgtgcctgaactgcggcttcgagacacacgcagccgagcaagccgccctgaacatcgccagatcctggctgttcctgcggagccaggagtacaagaaataccagacaaacaagacaaccggcaacaccgataagagagccttcgtcgagacctggcagtccttttaccggaagaagcttaaggaggtgtggaaacctgccgtgcggtctggcggatctggcggaggctccacaagcatccacctgaccgcctggccccagaagagcgtgaccttcgaggacgtggccgtgtacttcacccaggccgagtgggacggcctgagccccgcccagaggaccctgtacagggacgtgatgctggagaactacggcaacgtggccagcctgggcttccccctgctgaagcccgccgtgatcagccagctggagggcggcggcgacctgggcggccccagccccctggccgccggcaccggcctgaccagccccaagaaaaagagaaaagtctaagctgccttctgcggggcttgccttctggccatgcccttcttctctcccttgcacctgtacctcttggtctttgaataaagcctgagtaggaaggctagcaaaaaaaaaaaaaaaaaaaaaaaaaaaaaaaaaaaaaaaaaaaaaaaaaaaaaaaaaaaaaaaaaaaaaaaaaaaaaaaa

SEQ ID NO: 3686 - RNA, 5419 nt, synthetic construct
  source 1..5419: mol_type = other RNA
aggaaataagagagaaaagaagagtaagaagaaatataagagccaccatggcccctaagaagaagcgtaaagtgagccgggtgaacggcagcggcagcggcggcggcatgaaccacgaccaggagttcgacccccctaaggtgtaccctcccgtccccgccgagaagagaaagcccatccgggtcctgagcctgttcgatggcatcgccaccggtctgctggtgctgaaggacctgggcatccaggtggataggtacattgcctccgaggtgtgcgaggactccatcaccgtgggaatggtgcgtcatcagggcaagatcatgtacgtgggcgacgtgcggagcgtgacacagaagcatatccaggagtggggccctttcgacctggtgatcggcggcagcccttgcaatgacctgagcatcgtgaacccagcccggaagggcctgtacgagggaaccggcagactgttcttcgagttttacagactgctgcacgacgcccggcctaaggaaggcgacgaccggcccttcttttggctgttcgagaatgtggtggccatgggagtcagcgacaagcgggatattagccggttcctggagagcaaccccgtgatgatcgatgccaaggaagtgagcgccgcccaccgggccagatacttctggggcaatctgcctggcatgaacagacccctggccagcaccgtgaacgacaagctggagctgcaggagtgcctggagcacggccggatcgccaagttcagcaaggtgagaaccatcaccacccgaagcaacagcatcaaacaaggcaaggaccagcactttcctgtgttcatgaacgagaaggaggacatcctgtggtgtaccgagatggagagagtgttcgggttcccagtccactacacagatgtcagcaacatgtctagactggccagacagagactgctgggaagaagctggtccgtccctgtgatcagacacctgttcgcccctctgaaggagtacttcgcctgcgtgagcagcggcaacagcaacgccaacagccggggccccagcttctctagcggcctggtgccactgtccctgagagggagccacatgggccccatggagatctacaaaaccgtgagcgcctggaagcggcagcctgtgcgcgtgctgagcctgtttcggaatatcgataaagtcctgaaaagcctgggattcctggagagcggctctggctccggcggtggcaccctgaagtacgtggaggatgtgacaaacgtggtcagacgggatgtggagaagtggggccccttcgatctggtgtacggcagcacccaacccctgggcagctcttgtgaccggtgccctggctggtacatgtttcagttccaccggatcctgcagtacgccctgccgagacaggagtcccagcggccattcttttggattttcatggacaacttgctgctgaccgaggatgaccaggaaactaccactcggttcctgcagaccgaagccgtgaccctgcaggacgtgagaggccgggactaccagaacgccatgcgggtgtggtccaacatccctggactgaaaagcaagcacgcacctctgacccctaaagaagaggagtacctgcaggcccaggtgcggagcagaagcaagctggacgcccctaaggtggatctgctggtgaagaattgcctcctgcccctgagagagtacttcaagtatttcagccagaatagtctgcccctgggcggcccaagcagcggcgcccctcctcccagcggcggcagcccagccggctccccaacctctaccgaggagggcacctctgagtccgccacccccgagagcggccctggcacctccaccgagcccagcgagggcagcgcacccggcagccctgccggcagccccacctccacagaggagggaaccagcaccgagcccagcgaaggcagcgccccaggcaccagcaccgagcctagtgagggcggctctggcggcggcagcgcccaggagattaaacggatcaacaagatcagaagaagacttgtgaaagacagcaacaccaagaaggccggcaagacaggccccatgaaaaccctgctggttagagtgatgacacccgatctgagagagcggctggaaaacctgagaaagaagcctgaaaatatcccccagcccatcagcaatacatctagagccaacctgaataagctgctgaccgattacaccgaaatgaagaaggcgatcctgcatgtgtactgggaagagttccagaaggaccctgtgggcctgatgagccgggtggcccagcctgccagcaagaagatcgatcagaacaagctgaaacctgagatggacgagaagggcaacctgaccaccgccggctttgcctgctctcagtgtggccagcccctgttcgtgtacaagctggagcaggtgtctgagaagggcaaggcttacaccaactacttcggacggtgcaatgtggccgagcacgaaaagctgatcctgctggcccagctgaagcccgagaaggatagcgacgaagccgtgacatatagcctgggaaagtttgggcagagggccctggatttctacagcattcatgtgaccaaggagtccacccaccccgtgaagcccctggcccagatcgccggaaacagatacgcctccggacctgtgggaaaggccctgagcgacgcatgtatgggcacaatcgcctccttcctgtctaagtaccaggacatcatcatcgaacaccagaaggtggtgaagggcaaccagaagagactggagagcctgcgggagctggccggcaaggaaaacctggaataccctagcgtgaccctgccacctcagcctcacaccaaggagggcgttgatgcctacaacgaagtgatcgcccgggtgcgaatgtgggtgaacctgaacctgtggcagaagctgaagctaagcagagatgatgccaagcctctgctgagactgaagggattcccttcctttcctctggtcgagagacaggccaacgaagtggactggtgggacatggtgtgtaacgtgaagaagctgatcaacgagaaaaaggaggatggcaaggtgttttggcagaatctggctggctacaagagacaggaagccctgagaccatacctgagcagcgaggaagatcggaagaagggaaagaaattcgctcggtaccagctgggcgacctgctgctgcacctggaaaagaagcacggcgaggactggggaaaggtgtacgacgaggcctgggagcggattgacaagaaagtggaaggcctgagcaagcacatcaagctggaagaggaacggagaagcgaggacgcccagagcaaggccgccctgaccgactggctgcgggctaaggccagcttcgtgatcgagggcctgaaggaggccgacaaggacgagttctgcagatgcgagctgaagctgcagaagtggtacggggacctgcggggaaagcccttcgccatcgaagccgagaacagcatcctggacatcagcggcttcagcaagcagtacaactgtgccttcatctggcagaaggacggcgtgaagaagctgaacctgtacctgatcatcaactacttcaagggcggcaagctgcggttcaagaagatcaaacctgaagccttcgaagccaacagattctacaccgtgatcaacaaaaagagcggcgagatcgtgcccatggaggtgaacttcaacttcgacgaccccaacctgatcatcctgcctctggcctttggcaagagacagggcagagaattcatctggaacgacctgctgtccctggaaaccggcagcctgaagctggccaacggaagagtgatcgagaagacactgtacaacagaagaacccggcaggatgagcctgccctgttcgtggccctgaccttcgagcggcgggaggtcctggactcctccaatatcaaaccaatgaacctgatcggcgtggcaagaggcgaaaacatccccgccgtgatcgccctgaccgaccccgagggctgcccactgagccggtttaaggatagcctgggaaacccaacccacatcctgagaatcggcgagagctataaggagaagcagcggaccatccaggccaagaaggaggtggagcagcggagagccggcggctacagccggaagtacgccagcaaagccaagaatctggcagacgatatggtgagaaacaccgctagagatctgctgtactacgccgtgacccaggatgccatgctgatcttcgccaacctgagccggggcttcggccggcagggcaagcggaccttcatggccgagagacagtacacacggatggaggactggctgaccgccaagctggcctacgagggcctgagcaagacctacctgtccaagacactggcccagtacacctccaagacatgcagcaactgtgggtttaccatcaccagcgccgactacgacagggtgctggagaagctgaagaagacagcaacaggctggatgaccacaattaacggcaaggagctgaaggtggagggccagattacctactacaacagatacaagagacagaacgtagtcaaggacctgtccgtcgagctggatagactgagcgaagaatctgtgaacaacgacatctcctcctggacaaagggcagaagcggagaagctctgagcctcctgaagaaaagattctcccatagacccgtgcaggagaagttcgtgtgcctgaactgcggcttcgagacacacgcagccgagcaagccgccctgaacatcgccagatcctggctgttcctgcggagccaggagtacaagaaataccagacaaacaagacaaccggcaacaccgataagagagccttcgtcgagacctggcagtccttttaccggaagaagcttaaggaggtgtggaaacctgccgtgcggtctggcggatctggcggaggctccacaagcgcccaggtgctggtgaccttccaggacgtggccgtggacttcacccaggaggagtggaggctgctggaccccggccagaaggagctgtacaaggaggtgatgctggagaacgccgagaacatgctgttcctgggcctgcccgtgcccagggaggactggttcttccacttccacgagggcggcgacccctggatgctggagggcaagggccccagcatcagcaggctggacgaggagaggcacaccagccccaagaaaaagagaaaagtctaagctgccttctgcggggcttgccttctggccatgcccttcttctctcccttgcacctgtacctcttggtctttgaataaagcctgagtaggaaggctagcaaaaaaaaaaaaaaaaaaaaaaaaaaaaaaaaaaaaaaaaaaaaaaaaaaaaaaaaaaaaaaaaaaaaaaaaaaaaaaaa

SEQ ID NO: 3687 - RNA, 5419 nt, synthetic construct
  source 1..5419: mol_type = other RNA
aggaaataagagagaaaagaagagtaagaagaaatataagagccaccatggcccctaagaagaagcgtaaagtgagccgggtgaacggcagcggcagcggcggcggcatgaaccacgaccaggagttcgacccccctaaggtgtaccctcccgtccccgccgagaagagaaagcccatccgggtcctgagcctgttcgatggcatcgccaccggtctgctggtgctgaaggacctgggcatccaggtggataggtacattgcctccgaggtgtgcgaggactccatcaccgtgggaatggtgcgtcatcagggcaagatcatgtacgtgggcgacgtgcggagcgtgacacagaagcatatccaggagtggggccctttcgacctggtgatcggcggcagcccttgcaatgacctgagcatcgtgaacccagcccggaagggcctgtacgagggaaccggcagactgttcttcgagttttacagactgctgcacgacgcccggcctaaggaaggcgacgaccggcccttcttttggctgttcgagaatgtggtggccatgggagtcagcgacaagcgggatattagccggttcctggagagcaaccccgtgatgatcgatgccaaggaagtgagcgccgcccaccgggccagatacttctggggcaatctgcctggcatgaacagacccctggccagcaccgtgaacgacaagctggagctgcaggagtgcctggagcacggccggatcgccaagttcagcaaggtgagaaccatcaccacccgaagcaacagcatcaaacaaggcaaggaccagcactttcctgtgttcatgaacgagaaggaggacatcctgtggtgtaccgagatggagagagtgttcgggttcccagtccactacacagatgtcagcaacatgtctagactggccagacagagactgctgggaagaagctggtccgtccctgtgatcagacacctgttcgcccctctgaaggagtacttcgcctgcgtgagcagcggcaacagcaacgccaacagccggggccccagcttctctagcggcctggtgccactgtccctgagagggagccacatgggccccatggagatctacaaaaccgtgagcgcctggaagcggcagcctgtgcgcgtgctgagcctgtttcggaatatcgataaagtcctgaaaagcctgggattcctggagagcggctctggctccggcggtggcaccctgaagtacgtggaggatgtgacaaacgtggtcagacgggatgtggagaagtggggccccttcgatctggtgtacggcagcacccaacccctgggcagctcttgtgaccggtgccctggctggtacatgtttcagttccaccggatcctgcagtacgccctgccgagacaggagtcccagcggccattcttttggattttcatggacaacttgctgctgaccgaggatgaccaggaaactaccactcggttcctgcagaccgaagccgtgaccctgcaggacgtgagaggccgggactaccagaacgccatgcgggtgtggtccaacatccctggactgaaaagcaagcacgcacctctgacccctaaagaagaggagtacctgcaggcccaggtgcggagcagaagcaagctggacgcccctaaggtggatctgctggtgaagaattgcctcctgcccctgagagagtacttcaagtatttcagccagaatagtctgcccctgggcggcccaagcagcggcgcccctcctcccagcggcggcagcccagccggctccccaacctctaccgaggagggcacctctgagtccgccacccccgagagcggccctggcacctccaccgagcccagcgagggcagcgcacccggcagccctgccggcagccccacctccacagaggagggaaccagcaccgagcccagcgaaggcagcgccccaggcaccagcaccgagcctagtgagggcggctctggcggcggcagcgcccaggagattaaacggatcaacaagatcagaagaagacttgtgaaagacagcaacaccaagaaggccggcaagacaggccccatgaaaaccctgctggttagagtgatgacacccgatctgagagagcggctggaaaacctgagaaagaagcctgaaaatatcccccagcccatcagcaatacatctagagccaacctgaataagctgctgaccgattacaccgaaatgaagaaggcgatcctgcatgtgtactgggaagagttccagaaggaccctgtgggcctgatgagccgggtggcccagcctgccagcaagaagatcgatcagaacaagctgaaacctgagatggacgagaagggcaacctgaccaccgccggctttgcctgctctcagtgtggccagcccctgttcgtgtacaagctggagcaggtgtctgagaagggcaaggcttacaccaactacttcggacggtgcaatgtggccgagcacgaaaagctgatcctgctggcccagctgaagcccgagaaggatagcgacgaagccgtgacatatagcctgggaaagtttgggcagagggccctggatttctacagcattcatgtgaccaaggagtccacccaccccgtgaagcccctggcccagatcgccggaaacagatacgcctccggacctgtgggaaaggccctgagcgacgcatgtatgggcacaatcgcctccttcctgtctaagtaccaggacatcatcatcgaacaccagaaggtggtgaagggcaaccagaagagactggagagcctgcgggagctggccggcaaggaaaacctggaataccctagcgtgaccctgccacctcagcctcacaccaaggagggcgttgatgcctacaacgaagtgatcgcccgggtgcgaatgtgggtgaacctgaacctgtggcagaagctgaagctaagcagagatgatgccaagcctctgctgagactgaagggattcccttcctttcctctggtcgagagacaggccaacgaagtggactggtgggacatggtgtgtaacgtgaagaagctgatcaacgagaaaaaggaggatggcaaggtgttttggcagaatctggctggctacaagagacaggaagccctgagaccatacctgagcagcgaggaagatcggaagaagggaaagaaattcgctcggtaccagctgggcgacctgctgctgcacctggaaaagaagcacggcgaggactggggaaaggtgtacgacgaggcctgggagcggattgacaagaaagtggaaggcctgagcaagcacatcaagctggaagaggaacggagaagcgaggacgcccagagcaaggccgccctgaccgactggctgcgggctaaggccagcttcgtgatcgagggcctgaaggaggccgacaaggacgagttctgcagatgcgagctgaagctgcagaagtggtacggggacctgcggggaaagcccttcgccatcgaagccgagaacagcatcctggacatcagcggcttcagcaagcagtacaactgtgccttcatctggcagaaggacggcgtgaagaagctgaacctgtacctgatcatcaactacttcaagggcggcaagctgcggttcaagaagatcaaacctgaagccttcgaagccaacagattctacaccgtgatcaacaaaaagagcggcgagatcgtgcccatggaggtgaacttcaacttcgacgaccccaacctgatcatcctgcctctggcctttggcaagagacagggcagagaattcatctggaacgacctgctgtccctggaaaccggcagcctgaagctggccaacggaagagtgatcgagaagacactgtacaacagaagaacccggcaggatgagcctgccctgttcgtggccctgaccttcgagcggcgggaggtcctggactcctccaatatcaaaccaatgaacctgatcggcgtggcaagaggcgaaaacatccccgccgtgatcgccctgaccgaccccgagggctgcccactgagccggtttaaggatagcctgggaaacccaacccacatcctgagaatcggcgagagctataaggagaagcagcggaccatccaggccaagaaggaggtggagcagcggagagccggcggctacagccggaagtacgccagcaaagccaagaatctggcagacgatatggtgagaaacaccgctagagatctgctgtactacgccgtgacccaggatgccatgctgatcttcgccaacctgagccggggcttcggccggcagggcaagcggaccttcatggccgagagacagtacacacggatggaggactggctgaccgccaagctggcctacgagggcctgagcaagacctacctgtccaagacactggcccagtacacctccaagacatgcagcaactgtgggtttaccatcaccagcgccgactacgacagggtgctggagaagctgaagaagacagcaacaggctggatgaccacaattaacggcaaggagctgaaggtggagggccagattacctactacaacagatacaagagacagaacgtagtcaaggacctgtccgtcgagctggatagactgagcgaagaatctgtgaacaacgacatctcctcctggacaaagggcagaagcggagaagctctgagcctcctgaagaaaagattctcccatagacccgtgcaggagaagttcgtgtgcctgaactgcggcttcgagacacacgcagccgagcaagccgccctgaacatcgccagatcctggctgttcctgcggagccaggagtacaagaaataccagacaaacaagacaaccggcaacaccgataagagagccttcgtcgagacctggcagtccttttaccggaagaagcttaaggaggtgtggaaacctgccgtgcggtctggcggatctggcggaggctccacaagcagcgaggacctggtgaccttcagggacgtggccgtggacttcagccaggaggagtgggagcagctgaacagcgcccagaggggcctgtacagggacgtgatgctggagaactacaggagcctggtgagcctgggcgtgagcgtgagcaagcccgacgtgatcagcctgctggagcagggcaaggagccctgggtggtgaaggagggcaccaggggcacctacagcgactggaagtacgccttcaccagccccaagaaaaagagaaaagtctaagctgccttctgcggggcttgccttctggccatgcccttcttctctcccttgcacctgtacctcttggtctttgaataaagcctgagtaggaaggctagcaaaaaaaaaaaaaaaaaaaaaaaaaaaaaaaaaaaaaaaaaaaaaaaaaaaaaaaaaaaaaaaaaaaaaaaaaaaaaaaa

SEQ ID NO: 3688 - RNA, 5419 nt, synthetic construct
  source 1..5419: mol_type = other RNA
aggaaataagagagaaaagaagagtaagaagaaatataagagccaccatggcccctaagaagaagcgtaaagtgagccgggtgaacggcagcggcagcggcggcggcatgaaccacgaccaggagttcgacccccctaaggtgtaccctcccgtccccgccgagaagagaaagcccatccgggtcctgagcctgttcgatggcatcgccaccggtctgctggtgctgaaggacctgggcatccaggtggataggtacattgcctccgaggtgtgcgaggactccatcaccgtgggaatggtgcgtcatcagggcaagatcatgtacgtgggcgacgtgcggagcgtgacacagaagcatatccaggagtggggccctttcgacctggtgatcggcggcagcccttgcaatgacctgagcatcgtgaacccagcccggaagggcctgtacgagggaaccggcagactgttcttcgagttttacagactgctgcacgacgcccggcctaaggaaggcgacgaccggcccttcttttggctgttcgagaatgtggtggccatgggagtcagcgacaagcgggatattagccggttcctggagagcaaccccgtgatgatcgatgccaaggaagtgagcgccgcccaccgggccagatacttctggggcaatctgcctggcatgaacagacccctggccagcaccgtgaacgacaagctggagctgcaggagtgcctggagcacggccggatcgccaagttcagcaaggtgagaaccatcaccacccgaagcaacagcatcaaacaaggcaaggaccagcactttcctgtgttcatgaacgagaaggaggacatcctgtggtgtaccgagatggagagagtgttcgggttcccagtccactacacagatgtcagcaacatgtctagactggccagacagagactgctgggaagaagctggtccgtccctgtgatcagacacctgttcgcccctctgaaggagtacttcgcctgcgtgagcagcggcaacagcaacgccaacagccggggccccagcttctctagcggcctggtgccactgtccctgagagggagccacatgggccccatggagatctacaaaaccgtgagcgcctggaagcggcagcctgtgcgcgtgctgagcctgtttcggaatatcgataaagtcctgaaaagcctgggattcctggagagcggctctggctccggcggtggcaccctgaagtacgtggaggatgtgacaaacgtggtcagacgggatgtggagaagtggggccccttcgatctggtgtacggcagcacccaacccctgggcagctcttgtgaccggtgccctggctggtacatgtttcagttccaccggatcctgcagtacgccctgccgagacaggagtcccagcggccattcttttggattttcatggacaacttgctgctgaccgaggatgaccaggaaactaccactcggttcctgcagaccgaagccgtgaccctgcaggacgtgagaggccgggactaccagaacgccatgcgggtgtggtccaacatccctggactgaaaagcaagcacgcacctctgacccctaaagaagaggagtacctgcaggcccaggtgcggagcagaagcaagctggacgcccctaaggtggatctgctggtgaagaattgcctcctgcccctgagagagtacttcaagtatttcagccagaatagtctgcccctgggcggcccaagcagcggcgcccctcctcccagcggcggcagcccagccggctccccaacctctaccgaggagggcacctctgagtccgccacccccgagagcggccctggcacctccaccgagcccagcgagggcagcgcacccggcagccctgccggcagccccacctccacagaggagggaaccagcaccgagcccagcgaaggcagcgccccaggcaccagcaccgagcctagtgagggcggctctggcggcggcagcgcccaggagattaaacggatcaacaagatcagaagaagacttgtgaaagacagcaacaccaagaaggccggcaagacaggccccatgaaaaccctgctggttagagtgatgacacccgatctgagagagcggctggaaaacctgagaaagaagcctgaaaatatcccccagcccatcagcaatacatctagagccaacctgaataagctgctgaccgattacaccgaaatgaagaaggcgatcctgcatgtgtactgggaagagttccagaaggaccctgtgggcctgatgagccgggtggcccagcctgccagcaagaagatcgatcagaacaagctgaaacctgagatggacgagaagggcaacctgaccaccgccggctttgcctgctctcagtgtggccagcccctgttcgtgtacaagctggagcaggtgtctgagaagggcaaggcttacaccaactacttcggacggtgcaatgtggccgagcacgaaaagctgatcctgctggcccagctgaagcccgagaaggatagcgacgaagccgtgacatatagcctgggaaagtttgggcagagggccctggatttctacagcattcatgtgaccaaggagtccacccaccccgtgaagcccctggcccagatcgccggaaacagatacgcctccggacctgtgggaaaggccctgagcgacgcatgtatgggcacaatcgcctccttcctgtctaagtaccaggacatcatcatcgaacaccagaaggtggtgaagggcaaccagaagagactggagagcctgcgggagctggccggcaaggaaaacctggaataccctagcgtgaccctgccacctcagcctcacaccaaggagggcgttgatgcctacaacgaagtgatcgcccgggtgcgaatgtgggtgaacctgaacctgtggcagaagctgaagctaagcagagatgatgccaagcctctgctgagactgaagggattcccttcctttcctctggtcgagagacaggccaacgaagtggactggtgggacatggtgtgtaacgtgaagaagctgatcaacgagaaaaaggaggatggcaaggtgttttggcagaatctggctggctacaagagacaggaagccctgagaccatacctgagcagcgaggaagatcggaagaagggaaagaaattcgctcggtaccagctgggcgacctgctgctgcacctggaaaagaagcacggcgaggactggggaaaggtgtacgacgaggcctgggagcggattgacaagaaagtggaaggcctgagcaagcacatcaagctggaagaggaacggagaagcgaggacgcccagagcaaggccgccctgaccgactggctgcgggctaaggccagcttcgtgatcgagggcctgaaggaggccgacaaggacgagttctgcagatgcgagctgaagctgcagaagtggtacggggacctgcggggaaagcccttcgccatcgaagccgagaacagcatcctggacatcagcggcttcagcaagcagtacaactgtgccttcatctggcagaaggacggcgtgaagaagctgaacctgtacctgatcatcaactacttcaagggcggcaagctgcggttcaagaagatcaaacctgaagccttcgaagccaacagattctacaccgtgatcaacaaaaagagcggcgagatcgtgcccatggaggtgaacttcaacttcgacgaccccaacctgatcatcctgcctctggcctttggcaagagacagggcagagaattcatctggaacgacctgctgtccctggaaaccggcagcctgaagctggccaacggaagagtgatcgagaagacactgtacaacagaagaacccggcaggatgagcctgccctgttcgtggccctgaccttcgagcggcgggaggtcctggactcctccaatatcaaaccaatgaacctgatcggcgtggcaagaggcgaaaacatccccgccgtgatcgccctgaccgaccccgagggctgcccactgagccggtttaaggatagcctgggaaacccaacccacatcctgagaatcggcgagagctataaggagaagcagcggaccatccaggccaagaaggaggtggagcagcggagagccggcggctacagccggaagtacgccagcaaagccaagaatctggcagacgatatggtgagaaacaccgctagagatctgctgtactacgccgtgacccaggatgccatgctgatcttcgccaacctgagccggggcttcggccggcagggcaagcggaccttcatggccgagagacagtacacacggatggaggactggctgaccgccaagctggcctacgagggcctgagcaagacctacctgtccaagacactggcccagtacacctccaagacatgcagcaactgtgggtttaccatcaccagcgccgactacgacagggtgctggagaagctgaagaagacagcaacaggctggatgaccacaattaacggcaaggagctgaaggtggagggccagattacctactacaacagatacaagagacagaacgtagtcaaggacctgtccgtcgagctggatagactgagcgaagaatctgtgaacaacgacatctcctcctggacaaagggcagaagcggagaagctctgagcctcctgaagaaaagattctcccatagacccgtgcaggagaagttcgtgtgcctgaactgcggcttcgagacacacgcagccgagcaagccgccctgaacatcgccagatcctggctgttcctgcggagccaggagtacaagaaataccagacaaacaagacaaccggcaacaccgataagagagccttcgtcgagacctggcagtccttttaccggaagaagcttaaggaggtgtggaaacctgccgtgcggtctggcggatctggcggaggctccacaagctgctggggcctgctgagcttcaaggacatcagcatggagttcacctgggacgagtggcagctgctggacagcacccagaagtacctgtacagggacgtgatcctggagaactaccacaacctgatcagcgtgggctaccacggcaccaagcccgacctgatcttcaagctggagcagggcgaggacccctggatcatcaacgccaagatcagcaggcagagcaggcccgacggctgggaggagaccagccccaagaaaaagagaaaagtctaagctgccttctgcggggcttgccttctggccatgcccttcttctctcccttgcacctgtacctcttggtctttgaataaagcctgagtaggaaggctagcaaaaaaaaaaaaaaaaaaaaaaaaaaaaaaaaaaaaaaaaaaaaaaaaaaaaaaaaaaaaaaaaaaaaaaaaaaaaaaaa

SEQ ID NO: 3689 - RNA, 5419 nt, synthetic construct
  source 1..5419: mol_type = other RNA
aggaaataagagagaaaagaagagtaagaagaaatataagagccaccatggcccctaagaagaagcgtaaagtgagccgggtgaacggcagcggcagcggcggcggcatgaaccacgaccaggagttcgacccccctaaggtgtaccctcccgtccccgccgagaagagaaagcccatccgggtcctgagcctgttcgatggcatcgccaccggtctgctggtgctgaaggacctgggcatccaggtggataggtacattgcctccgaggtgtgcgaggactccatcaccgtgggaatggtgcgtcatcagggcaagatcatgtacgtgggcgacgtgcggagcgtgacacagaagcatatccaggagtggggccctttcgacctggtgatcggcggcagcccttgcaatgacctgagcatcgtgaacccagcccggaagggcctgtacgagggaaccggcagactgttcttcgagttttacagactgctgcacgacgcccggcctaaggaaggcgacgaccggcccttcttttggctgttcgagaatgtggtggccatgggagtcagcgacaagcgggatattagccggttcctggagagcaaccccgtgatgatcgatgccaaggaagtgagcgccgcccaccgggccagatacttctggggcaatctgcctggcatgaacagacccctggccagcaccgtgaacgacaagctggagctgcaggagtgcctggagcacggccggatcgccaagttcagcaaggtgagaaccatcaccacccgaagcaacagcatcaaacaaggcaaggaccagcactttcctgtgttcatgaacgagaaggaggacatcctgtggtgtaccgagatggagagagtgttcgggttcccagtccactacacagatgtcagcaacatgtctagactggccagacagagactgctgggaagaagctggtccgtccctgtgatcagacacctgttcgcccctctgaaggagtacttcgcctgcgtgagcagcggcaacagcaacgccaacagccggggccccagcttctctagcggcctggtgccactgtccctgagagggagccacatgggccccatggagatctacaaaaccgtgagcgcctggaagcggcagcctgtgcgcgtgctgagcctgtttcggaatatcgataaagtcctgaaaagcctgggattcctggagagcggctctggctccggcggtggcaccctgaagtacgtggaggatgtgacaaacgtggtcagacgggatgtggagaagtggggccccttcgatctggtgtacggcagcacccaacccctgggcagctcttgtgaccggtgccctggctggtacatgtttcagttccaccggatcctgcagtacgccctgccgagacaggagtcccagcggccattcttttggattttcatggacaacttgctgctgaccgaggatgaccaggaaactaccactcggttcctgcagaccgaagccgtgaccctgcaggacgtgagaggccgggactaccagaacgccatgcgggtgtggtccaacatccctggactgaaaagcaagcacgcacctctgacccctaaagaagaggagtacctgcaggcccaggtgcggagcagaagcaagctggacgcccctaaggtggatctgctggtgaagaattgcctcctgcccctgagagagtacttcaagtatttcagccagaatagtctgcccctgggcggcccaagcagcggcgcccctcctcccagcggcggcagcccagccggctccccaacctctaccgaggagggcacctctgagtccgccacccccgagagcggccctggcacctccaccgagcccagcgagggcagcgcacccggcagccctgccggcagccccacctccacagaggagggaaccagcaccgagcccagcgaaggcagcgccccaggcaccagcaccgagcctagtgagggcggctctggcggcggcagcgcccaggagattaaacggatcaacaagatcagaagaagacttgtgaaagacagcaacaccaagaaggccggcaagacaggccccatgaaaaccctgctggttagagtgatgacacccgatctgagagagcggctggaaaacctgagaaagaagcctgaaaatatcccccagcccatcagcaatacatctagagccaacctgaataagctgctgaccgattacaccgaaatgaagaaggcgatcctgcatgtgtactgggaagagttccagaaggaccctgtgggcctgatgagccgggtggcccagcctgccagcaagaagatcgatcagaacaagctgaaacctgagatggacgagaagggcaacctgaccaccgccggctttgcctgctctcagtgtggccagcccctgttcgtgtacaagctggagcaggtgtctgagaagggcaaggcttacaccaactacttcggacggtgcaatgtggccgagcacgaaaagctgatcctgctggcccagctgaagcccgagaaggatagcgacgaagccgtgacatatagcctgggaaagtttgggcagagggccctggatttctacagcattcatgtgaccaaggagtccacccaccccgtgaagcccctggcccagatcgccggaaacagatacgcctccggacctgtgggaaaggccctgagcgacgcatgtatgggcacaatcgcctccttcctgtctaagtaccaggacatcatcatcgaacaccagaaggtggtgaagggcaaccagaagagactggagagcctgcgggagctggccggcaaggaaaacctggaataccctagcgtgaccctgccacctcagcctcacaccaaggagggcgttgatgcctacaacgaagtgatcgcccgggtgcgaatgtgggtgaacctgaacctgtggcagaagctgaagctaagcagagatgatgccaagcctctgctgagactgaagggattcccttcctttcctctggtcgagagacaggccaacgaagtggactggtgggacatggtgtgtaacgtgaagaagctgatcaacgagaaaaaggaggatggcaaggtgttttggcagaatctggctggctacaagagacaggaagccctgagaccatacctgagcagcgaggaagatcggaagaagggaaagaaattcgctcggtaccagctgggcgacctgctgctgcacctggaaaagaagcacggcgaggactggggaaaggtgtacgacgaggcctgggagcggattgacaagaaagtggaaggcctgagcaagcacatcaagctggaagaggaacggagaagcgaggacgcccagagcaaggccgccctgaccgactggctgcgggctaaggccagcttcgtgatcgagggcctgaaggaggccgacaaggacgagttctgcagatgcgagctgaagctgcagaagtggtacggggacctgcggggaaagcccttcgccatcgaagccgagaacagcatcctggacatcagcggcttcagcaagcagtacaactgtgccttcatctggcagaaggacggcgtgaagaagctgaacctgtacctgatcatcaactacttcaagggcggcaagctgcggttcaagaagatcaaacctgaagccttcgaagccaacagattctacaccgtgatcaacaaaaagagcggcgagatcgtgcccatggaggtgaacttcaacttcgacgaccccaacctgatcatcctgcctctggcctttggcaagagacagggcagagaattcatctggaacgacctgctgtccctggaaaccggcagcctgaagctggccaacggaagagtgatcgagaagacactgtacaacagaagaacccggcaggatgagcctgccctgttcgtggccctgaccttcgagcggcgggaggtcctggactcctccaatatcaaaccaatgaacctgatcggcgtggcaagaggcgaaaacatccccgccgtgatcgccctgaccgaccccgagggctgcccactgagccggtttaaggatagcctgggaaacccaacccacatcctgagaatcggcgagagctataaggagaagcagcggaccatccaggccaagaaggaggtggagcagcggagagccggcggctacagccggaagtacgccagcaaagccaagaatctggcagacgatatggtgagaaacaccgctagagatctgctgtactacgccgtgacccaggatgccatgctgatcttcgccaacctgagccggggcttcggccggcagggcaagcggaccttcatggccgagagacagtacacacggatggaggactggctgaccgccaagctggcctacgagggcctgagcaagacctacctgtccaagacactggcccagtacacctccaagacatgcagcaactgtgggtttaccatcaccagcgccgactacgacagggtgctggagaagctgaagaagacagcaacaggctggatgaccacaattaacggcaaggagctgaaggtggagggccagattacctactacaacagatacaagagacagaacgtagtcaaggacctgtccgtcgagctggatagactgagcgaagaatctgtgaacaacgacatctcctcctggacaaagggcagaagcggagaagctctgagcctcctgaagaaaagattctcccatagacccgtgcaggagaagttcgtgtgcctgaactgcggcttcgagacacacgcagccgagcaagccgccctgaacatcgccagatcctggctgttcctgcggagccaggagtacaagaaataccagacaaacaagacaaccggcaacaccgataagagagccttcgtcgagacctggcagtccttttaccggaagaagcttaaggaggtgtggaaacctgccgtgcggtctggcggatctggcggaggctccacaagccagatgaggctgaggttcgaggacatcagcgtgagcttcagccaggaggagtgggcctacctggacgaggagcagaaggagctgtacagggaggtgatgagggacaactaccagaccctgatcagcctgggcgtgggcttcagcagcgtgacccccgacatcatcagcaggatcgagcagggcgaggagccctacgtgagggacgagcccggcagcgaggagagggagaccggcaggagcagcaccagccccaagaaaaagagaaaagtctaagctgccttctgcggggcttgccttctggccatgcccttcttctctcccttgcacctgtacctcttggtctttgaataaagcctgagtaggaaggctagcaaaaaaaaaaaaaaaaaaaaaaaaaaaaaaaaaaaaaaaaaaaaaaaaaaaaaaaaaaaaaaaaaaaaaaaaaaaaaaaa

SEQ ID NO: 3690 - RNA, 5419 nt, synthetic construct
  source 1..5419: mol_type = other RNA
aggaaataagagagaaaagaagagtaagaagaaatataagagccaccatggcccctaagaagaagcgtaaagtgagccgggtgaacggcagcggcagcggcggcggcatgaaccacgaccaggagttcgacccccctaaggtgtaccctcccgtccccgccgagaagagaaagcccatccgggtcctgagcctgttcgatggcatcgccaccggtctgctggtgctgaaggacctgggcatccaggtggataggtacattgcctccgaggtgtgcgaggactccatcaccgtgggaatggtgcgtcatcagggcaagatcatgtacgtgggcgacgtgcggagcgtgacacagaagcatatccaggagtggggccctttcgacctggtgatcggcggcagcccttgcaatgacctgagcatcgtgaacccagcccggaagggcctgtacgagggaaccggcagactgttcttcgagttttacagactgctgcacgacgcccggcctaaggaaggcgacgaccggcccttcttttggctgttcgagaatgtggtggccatgggagtcagcgacaagcgggatattagccggttcctggagagcaaccccgtgatgatcgatgccaaggaagtgagcgccgcccaccgggccagatacttctggggcaatctgcctggcatgaacagacccctggccagcaccgtgaacgacaagctggagctgcaggagtgcctggagcacggccggatcgccaagttcagcaaggtgagaaccatcaccacccgaagcaacagcatcaaacaaggcaaggaccagcactttcctgtgttcatgaacgagaaggaggacatcctgtggtgtaccgagatggagagagtgttcgggttcccagtccactacacagatgtcagcaacatgtctagactggccagacagagactgctgggaagaagctggtccgtccctgtgatcagacacctgttcgcccctctgaaggagtacttcgcctgcgtgagcagcggcaacagcaacgccaacagccggggccccagcttctctagcggcctggtgccactgtccctgagagggagccacatgggccccatggagatctacaaaaccgtgagcgcctggaagcggcagcctgtgcgcgtgctgagcctgtttcggaatatcgataaagtcctgaaaagcctgggattcctggagagcggctctggctccggcggtggcaccctgaagtacgtggaggatgtgacaaacgtggtcagacgggatgtggagaagtggggccccttcgatctggtgtacggcagcacccaacccctgggcagctcttgtgaccggtgccctggctggtacatgtttcagttccaccggatcctgcagtacgccctgccgagacaggagtcccagcggccattcttttggattttcatggacaacttgctgctgaccgaggatgaccaggaaactaccactcggttcctgcagaccgaagccgtgaccctgcaggacgtgagaggccgggactaccagaacgccatgcgggtgtggtccaacatccctggactgaaaagcaagcacgcacctctgacccctaaagaagaggagtacctgcaggcccaggtgcggagcagaagcaagctggacgcccctaaggtggatctgctggtgaagaattgcctcctgcccctgagagagtacttcaagtatttcagccagaatagtctgcccctgggcggcccaagcagcggcgcccctcctcccagcggcggcagcccagccggctccccaacctctaccgaggagggcacctctgagtccgccacccccgagagcggccctggcacctccaccgagcccagcgagggcagcgcacccggcagccctgccggcagccccacctccacagaggagggaaccagcaccgagcccagcgaaggcagcgccccaggcaccagcaccgagcctagtgagggcggctctggcggcggcagcgcccaggagattaaacggatcaacaagatcagaagaagacttgtgaaagacagcaacaccaagaaggccggcaagacaggccccatgaaaaccctgctggttagagtgatgacacccgatctgagagagcggctggaaaacctgagaaagaagcctgaaaatatcccccagcccatcagcaatacatctagagccaacctgaataagctgctgaccgattacaccgaaatgaagaaggcgatcctgcatgtgtactgggaagagttccagaaggaccctgtgggcctgatgagccgggtggcccagcctgccagcaagaagatcgatcagaacaagctgaaacctgagatggacgagaagggcaacctgaccaccgccggctttgcctgctctcagtgtggccagcccctgttcgtgtacaagctggagcaggtgtctgagaagggcaaggcttacaccaactacttcggacggtgcaatgtggccgagcacgaaaagctgatcctgctggcccagctgaagcccgagaaggatagcgacgaagccgtgacatatagcctgggaaagtttgggcagagggccctggatttctacagcattcatgtgaccaaggagtccacccaccccgtgaagcccctggcccagatcgccggaaacagatacgcctccggacctgtgggaaaggccctgagcgacgcatgtatgggcacaatcgcctccttcctgtctaagtaccaggacatcatcatcgaacaccagaaggtggtgaagggcaaccagaagagactggagagcctgcgggagctggccggcaaggaaaacctggaataccctagcgtgaccctgccacctcagcctcacaccaaggagggcgttgatgcctacaacgaagtgatcgcccgggtgcgaatgtgggtgaacctgaacctgtggcagaagctgaagctaagcagagatgatgccaagcctctgctgagactgaagggattcccttcctttcctctggtcgagagacaggccaacgaagtggactggtgggacatggtgtgtaacgtgaagaagctgatcaacgagaaaaaggaggatggcaaggtgttttggcagaatctggctggctacaagagacaggaagccctgagaccatacctgagcagcgaggaagatcggaagaagggaaagaaattcgctcggtaccagctgggcgacctgctgctgcacctggaaaagaagcacggcgaggactggggaaaggtgtacgacgaggcctgggagcggattgacaagaaagtggaaggcctgagcaagcacatcaagctggaagaggaacggagaagcgaggacgcccagagcaaggccgccctgaccgactggctgcgggctaaggccagcttcgtgatcgagggcctgaaggaggccgacaaggacgagttctgcagatgcgagctgaagctgcagaagtggtacggggacctgcggggaaagcccttcgccatcgaagccgagaacagcatcctggacatcagcggcttcagcaagcagtacaactgtgccttcatctggcagaaggacggcgtgaagaagctgaacctgtacctgatcatcaactacttcaagggcggcaagctgcggttcaagaagatcaaacctgaagccttcgaagccaacagattctacaccgtgatcaacaaaaagagcggcgagatcgtgcccatggaggtgaacttcaacttcgacgaccccaacctgatcatcctgcctctggcctttggcaagagacagggcagagaattcatctggaacgacctgctgtccctggaaaccggcagcctgaagctggccaacggaagagtgatcgagaagacactgtacaacagaagaacccggcaggatgagcctgccctgttcgtggccctgaccttcgagcggcgggaggtcctggactcctccaatatcaaaccaatgaacctgatcggcgtggcaagaggcgaaaacatccccgccgtgatcgccctgaccgaccccgagggctgcccactgagccggtttaaggatagcctgggaaacccaacccacatcctgagaatcggcgagagctataaggagaagcagcggaccatccaggccaagaaggaggtggagcagcggagagccggcggctacagccggaagtacgccagcaaagccaagaatctggcagacgatatggtgagaaacaccgctagagatctgctgtactacgccgtgacccaggatgccatgctgatcttcgccaacctgagccggggcttcggccggcagggcaagcggaccttcatggccgagagacagtacacacggatggaggactggctgaccgccaagctggcctacgagggcctgagcaagacctacctgtccaagacactggcccagtacacctccaagacatgcagcaactgtgggtttaccatcaccagcgccgactacgacagggtgctggagaagctgaagaagacagcaacaggctggatgaccacaattaacggcaaggagctgaaggtggagggccagattacctactacaacagatacaagagacagaacgtagtcaaggacctgtccgtcgagctggatagactgagcgaagaatctgtgaacaacgacatctcctcctggacaaagggcagaagcggagaagctctgagcctcctgaagaaaagattctcccatagacccgtgcaggagaagttcgtgtgcctgaactgcggcttcgagacacacgcagccgagcaagccgccctgaacatcgccagatcctggctgttcctgcggagccaggagtacaagaaataccagacaaacaagacaaccggcaacaccgataagagagccttcgtcgagacctggcagtccttttaccggaagaagcttaaggaggtgtggaaacctgccgtgcggtctggcggatctggcggaggctccacaagcgtgaccttcgaggacgtggccgtgaacttcagcagggaggagtgggccctgctggaccccccccagaggaagctgtacagggacgtgatgtgggagaccctgaggcacctggccgccgtggacgaccagcagagcgaggacgagttcaggaacttccagaagagggtgaggagcgaggaggtggagaaggccagccagtacaccctgtggtaccagcacggcgagatggacagcaggacccccaccagccccaagaaaaagagaaaagtctaagctgccttctgcggggcttgccttctggccatgcccttcttctctcccttgcacctgtacctcttggtctttgaataaagcctgagtaggaaggctagcaaaaaaaaaaaaaaaaaaaaaaaaaaaaaaaaaaaaaaaaaaaaaaaaaaaaaaaaaaaaaaaaaaaaaaaaaaaaaaaa

SEQ ID NO: 3691 - RNA, 5419 nt, synthetic construct
  source 1..5419: mol_type = other RNA
aggaaataagagagaaaagaagagtaagaagaaatataagagccaccatggcccctaagaagaagcgtaaagtgagccgggtgaacggcagcggcagcggcggcggcatgaaccacgaccaggagttcgacccccctaaggtgtaccctcccgtccccgccgagaagagaaagcccatccgggtcctgagcctgttcgatggcatcgccaccggtctgctggtgctgaaggacctgggcatccaggtggataggtacattgcctccgaggtgtgcgaggactccatcaccgtgggaatggtgcgtcatcagggcaagatcatgtacgtgggcgacgtgcggagcgtgacacagaagcatatccaggagtggggccctttcgacctggtgatcggcggcagcccttgcaatgacctgagcatcgtgaacccagcccggaagggcctgtacgagggaaccggcagactgttcttcgagttttacagactgctgcacgacgcccggcctaaggaaggcgacgaccggcccttcttttggctgttcgagaatgtggtggccatgggagtcagcgacaagcgggatattagccggttcctggagagcaaccccgtgatgatcgatgccaaggaagtgagcgccgcccaccgggccagatacttctggggcaatctgcctggcatgaacagacccctggccagcaccgtgaacgacaagctggagctgcaggagtgcctggagcacggccggatcgccaagttcagcaaggtgagaaccatcaccacccgaagcaacagcatcaaacaaggcaaggaccagcactttcctgtgttcatgaacgagaaggaggacatcctgtggtgtaccgagatggagagagtgttcgggttcccagtccactacacagatgtcagcaacatgtctagactggccagacagagactgctgggaagaagctggtccgtccctgtgatcagacacctgttcgcccctctgaaggagtacttcgcctgcgtgagcagcggcaacagcaacgccaacagccggggccccagcttctctagcggcctggtgccactgtccctgagagggagccacatgggccccatggagatctacaaaaccgtgagcgcctggaagcggcagcctgtgcgcgtgctgagcctgtttcggaatatcgataaagtcctgaaaagcctgggattcctggagagcggctctggctccggcggtggcaccctgaagtacgtggaggatgtgacaaacgtggtcagacgggatgtggagaagtggggccccttcgatctggtgtacggcagcacccaacccctgggcagctcttgtgaccggtgccctggctggtacatgtttcagttccaccggatcctgcagtacgccctgccgagacaggagtcccagcggccattcttttggattttcatggacaacttgctgctgaccgaggatgaccaggaaactaccactcggttcctgcagaccgaagccgtgaccctgcaggacgtgagaggccgggactaccagaacgccatgcgggtgtggtccaacatccctggactgaaaagcaagcacgcacctctgacccctaaagaagaggagtacctgcaggcccaggtgcggagcagaagcaagctggacgcccctaaggtggatctgctggtgaagaattgcctcctgcccctgagagagtacttcaagtatttcagccagaatagtctgcccctgggcggcccaagcagcggcgcccctcctcccagcggcggcagcccagccggctccccaacctctaccgaggagggcacctctgagtccgccacccccgagagcggccctggcacctccaccgagcccagcgagggcagcgcacccggcagccctgccggcagccccacctccacagaggagggaaccagcaccgagcccagcgaaggcagcgccccaggcaccagcaccgagcctagtgagggcggctctggcggcggcagcgcccaggagattaaacggatcaacaagatcagaagaagacttgtgaaagacagcaacaccaagaaggccggcaagacaggccccatgaaaaccctgctggttagagtgatgacacccgatctgagagagcggctggaaaacctgagaaagaagcctgaaaatatcccccagcccatcagcaatacatctagagccaacctgaataagctgctgaccgattacaccgaaatgaagaaggcgatcctgcatgtgtactgggaagagttccagaaggaccctgtgggcctgatgagccgggtggcccagcctgccagcaagaagatcgatcagaacaagctgaaacctgagatggacgagaagggcaacctgaccaccgccggctttgcctgctctcagtgtggccagcccctgttcgtgtacaagctggagcaggtgtctgagaagggcaaggcttacaccaactacttcggacggtgcaatgtggccgagcacgaaaagctgatcctgctggcccagctgaagcccgagaaggatagcgacgaagccgtgacatatagcctgggaaagtttgggcagagggccctggatttctacagcattcatgtgaccaaggagtccacccaccccgtgaagcccctggcccagatcgccggaaacagatacgcctccggacctgtgggaaaggccctgagcgacgcatgtatgggcacaatcgcctccttcctgtctaagtaccaggacatcatcatcgaacaccagaaggtggtgaagggcaaccagaagagactggagagcctgcgggagctggccggcaaggaaaacctggaataccctagcgtgaccctgccacctcagcctcacaccaaggagggcgttgatgcctacaacgaagtgatcgcccgggtgcgaatgtgggtgaacctgaacctgtggcagaagctgaagctaagcagagatgatgccaagcctctgctgagactgaagggattcccttcctttcctctggtcgagagacaggccaacgaagtggactggtgggacatggtgtgtaacgtgaagaagctgatcaacgagaaaaaggaggatggcaaggtgttttggcagaatctggctggctacaagagacaggaagccctgagaccatacctgagcagcgaggaagatcggaagaagggaaagaaattcgctcggtaccagctgggcgacctgctgctgcacctggaaaagaagcacggcgaggactggggaaaggtgtacgacgaggcctgggagcggattgacaagaaagtggaaggcctgagcaagcacatcaagctggaagaggaacggagaagcgaggacgcccagagcaaggccgccctgaccgactggctgcgggctaaggccagcttcgtgatcgagggcctgaaggaggccgacaaggacgagttctgcagatgcgagctgaagctgcagaagtggtacggggacctgcggggaaagcccttcgccatcgaagccgagaacagcatcctggacatcagcggcttcagcaagcagtacaactgtgccttcatctggcagaaggacggcgtgaagaagctgaacctgtacctgatcatcaactacttcaagggcggcaagctgcggttcaagaagatcaaacctgaagccttcgaagccaacagattctacaccgtgatcaacaaaaagagcggcgagatcgtgcccatggaggtgaacttcaacttcgacgaccccaacctgatcatcctgcctctggcctttggcaagagacagggcagagaattcatctggaacgacctgctgtccctggaaaccggcagcctgaagctggccaacggaagagtgatcgagaagacactgtacaacagaagaacccggcaggatgagcctgccctgttcgtggccctgaccttcgagcggcgggaggtcctggactcctccaatatcaaaccaatgaacctgatcggcgtggcaagaggcgaaaacatccccgccgtgatcgccctgaccgaccccgagggctgcccactgagccggtttaaggatagcctgggaaacccaacccacatcctgagaatcggcgagagctataaggagaagcagcggaccatccaggccaagaaggaggtggagcagcggagagccggcggctacagccggaagtacgccagcaaagccaagaatctggcagacgatatggtgagaaacaccgctagagatctgctgtactacgccgtgacccaggatgccatgctgatcttcgccaacctgagccggggcttcggccggcagggcaagcggaccttcatggccgagagacagtacacacggatggaggactggctgaccgccaagctggcctacgagggcctgagcaagacctacctgtccaagacactggcccagtacacctccaagacatgcagcaactgtgggtttaccatcaccagcgccgactacgacagggtgctggagaagctgaagaagacagcaacaggctggatgaccacaattaacggcaaggagctgaaggtggagggccagattacctactacaacagatacaagagacagaacgtagtcaaggacctgtccgtcgagctggatagactgagcgaagaatctgtgaacaacgacatctcctcctggacaaagggcagaagcggagaagctctgagcctcctgaagaaaagattctcccatagacccgtgcaggagaagttcgtgtgcctgaactgcggcttcgagacacacgcagccgagcaagccgccctgaacatcgccagatcctggctgttcctgcggagccaggagtacaagaaataccagacaaacaagacaaccggcaacaccgataagagagccttcgtcgagacctggcagtccttttaccggaagaagcttaaggaggtgtggaaacctgccgtgcggtctggcggatctggcggaggctccacaagcgcccagggcctgatggccttcgaggacgtggccgtgtacttcagcagggaggagtggggcctgctggacgccgcccagagggccctgtacaggagggtgatgctggagaacttcaccctgctggccagcctgggcctgagcgtgagcaggccccacgtggtgatccagctggagtgcggcaaggagccctgggtgctgaacggcaccgacgtgaccctggccaggaacgcccagaggaggcccaccagccccaagaaaaagagaaaagtctaagctgccttctgcggggcttgccttctggccatgcccttcttctctcccttgcacctgtacctcttggtctttgaataaagcctgagtaggaaggctagcaaaaaaaaaaaaaaaaaaaaaaaaaaaaaaaaaaaaaaaaaaaaaaaaaaaaaaaaaaaaaaaaaaaaaaaaaaaaaaaa

SEQ ID NO: 3692 - RNA, 5419 nt, synthetic construct
  source 1..5419: mol_type = other RNA
aggaaataagagagaaaagaagagtaagaagaaatataagagccaccatggcccctaagaagaagcgtaaagtgagccgggtgaacggcagcggcagcggcggcggcatgaaccacgaccaggagttcgacccccctaaggtgtaccctcccgtccccgccgagaagagaaagcccatccgggtcctgagcctgttcgatggcatcgccaccggtctgctggtgctgaaggacctgggcatccaggtggataggtacattgcctccgaggtgtgcgaggactccatcaccgtgggaatggtgcgtcatcagggcaagatcatgtacgtgggcgacgtgcggagcgtgacacagaagcatatccaggagtggggccctttcgacctggtgatcggcggcagcccttgcaatgacctgagcatcgtgaacccagcccggaagggcctgtacgagggaaccggcagactgttcttcgagttttacagactgctgcacgacgcccggcctaaggaaggcgacgaccggcccttcttttggctgttcgagaatgtggtggccatgggagtcagcgacaagcgggatattagccggttcctggagagcaaccccgtgatgatcgatgccaaggaagtgagcgccgcccaccgggccagatacttctggggcaatctgcctggcatgaacagacccctggccagcaccgtgaacgacaagctggagctgcaggagtgcctggagcacggccggatcgccaagttcagcaaggtgagaaccatcaccacccgaagcaacagcatcaaacaaggcaaggaccagcactttcctgtgttcatgaacgagaaggaggacatcctgtggtgtaccgagatggagagagtgttcgggttcccagtccactacacagatgtcagcaacatgtctagactggccagacagagactgctgggaagaagctggtccgtccctgtgatcagacacctgttcgcccctctgaaggagtacttcgcctgcgtgagcagcggcaacagcaacgccaacagccggggccccagcttctctagcggcctggtgccactgtccctgagagggagccacatgggccccatggagatctacaaaaccgtgagcgcctggaagcggcagcctgtgcgcgtgctgagcctgtttcggaatatcgataaagtcctgaaaagcctgggattcctggagagcggctctggctccggcggtggcaccctgaagtacgtggaggatgtgacaaacgtggtcagacgggatgtggagaagtggggccccttcgatctggtgtacggcagcacccaacccctgggcagctcttgtgaccggtgccctggctggtacatgtttcagttccaccggatcctgcagtacgccctgccgagacaggagtcccagcggccattcttttggattttcatggacaacttgctgctgaccgaggatgaccaggaaactaccactcggttcctgcagaccgaagccgtgaccctgcaggacgtgagaggccgggactaccagaacgccatgcgggtgtggtccaacatccctggactgaaaagcaagcacgcacctctgacccctaaagaagaggagtacctgcaggcccaggtgcggagcagaagcaagctggacgcccctaaggtggatctgctggtgaagaattgcctcctgcccctgagagagtacttcaagtatttcagccagaatagtctgcccctgggcggcccaagcagcggcgcccctcctcccagcggcggcagcccagccggctccccaacctctaccgaggagggcacctctgagtccgccacccccgagagcggccctggcacctccaccgagcccagcgagggcagcgcacccggcagccctgccggcagccccacctccacagaggagggaaccagcaccgagcccagcgaaggcagcgccccaggcaccagcaccgagcctagtgagggcggctctggcggcggcagcgcccaggagattaaacggatcaacaagatcagaagaagacttgtgaaagacagcaacaccaagaaggccggcaagacaggccccatgaaaaccctgctggttagagtgatgacacccgatctgagagagcggctggaaaacctgagaaagaagcctgaaaatatcccccagcccatcagcaatacatctagagccaacctgaataagctgctgaccgattacaccgaaatgaagaaggcgatcctgcatgtgtactgggaagagttccagaaggaccctgtgggcctgatgagccgggtggcccagcctgccagcaagaagatcgatcagaacaagctgaaacctgagatggacgagaagggcaacctgaccaccgccggctttgcctgctctcagtgtggccagcccctgttcgtgtacaagctggagcaggtgtctgagaagggcaaggcttacaccaactacttcggacggtgcaatgtggccgagcacgaaaagctgatcctgctggcccagctgaagcccgagaaggatagcgacgaagccgtgacatatagcctgggaaagtttgggcagagggccctggatttctacagcattcatgtgaccaaggagtccacccaccccgtgaagcccctggcccagatcgccggaaacagatacgcctccggacctgtgggaaaggccctgagcgacgcatgtatgggcacaatcgcctccttcctgtctaagtaccaggacatcatcatcgaacaccagaaggtggtgaagggcaaccagaagagactggagagcctgcgggagctggccggcaaggaaaacctggaataccctagcgtgaccctgccacctcagcctcacaccaaggagggcgttgatgcctacaacgaagtgatcgcccgggtgcgaatgtgggtgaacctgaacctgtggcagaagctgaagctaagcagagatgatgccaagcctctgctgagactgaagggattcccttcctttcctctggtcgagagacaggccaacgaagtggactggtgggacatggtgtgtaacgtgaagaagctgatcaacgagaaaaaggaggatggcaaggtgttttggcagaatctggctggctacaagagacaggaagccctgagaccatacctgagcagcgaggaagatcggaagaagggaaagaaattcgctcggtaccagctgggcgacctgctgctgcacctggaaaagaagcacggcgaggactggggaaaggtgtacgacgaggcctgggagcggattgacaagaaagtggaaggcctgagcaagcacatcaagctggaagaggaacggagaagcgaggacgcccagagcaaggccgccctgaccgactggctgcgggctaaggccagcttcgtgatcgagggcctgaaggaggccgacaaggacgagttctgcagatgcgagctgaagctgcagaagtggtacggggacctgcggggaaagcccttcgccatcgaagccgagaacagcatcctggacatcagcggcttcagcaagcagtacaactgtgccttcatctggcagaaggacggcgtgaagaagctgaacctgtacctgatcatcaactacttcaagggcggcaagctgcggttcaagaagatcaaacctgaagccttcgaagccaacagattctacaccgtgatcaacaaaaagagcggcgagatcgtgcccatggaggtgaacttcaacttcgacgaccccaacctgatcatcctgcctctggcctttggcaagagacagggcagagaattcatctggaacgacctgctgtccctggaaaccggcagcctgaagctggccaacggaagagtgatcgagaagacactgtacaacagaagaacccggcaggatgagcctgccctgttcgtggccctgaccttcgagcggcgggaggtcctggactcctccaatatcaaaccaatgaacctgatcggcgtggcaagaggcgaaaacatccccgccgtgatcgccctgaccgaccccgagggctgcccactgagccggtttaaggatagcctgggaaacccaacccacatcctgagaatcggcgagagctataaggagaagcagcggaccatccaggccaagaaggaggtggagcagcggagagccggcggctacagccggaagtacgccagcaaagccaagaatctggcagacgatatggtgagaaacaccgctagagatctgctgtactacgccgtgacccaggatgccatgctgatcttcgccaacctgagccggggcttcggccggcagggcaagcggaccttcatggccgagagacagtacacacggatggaggactggctgaccgccaagctggcctacgagggcctgagcaagacctacctgtccaagacactggcccagtacacctccaagacatgcagcaactgtgggtttaccatcaccagcgccgactacgacagggtgctggagaagctgaagaagacagcaacaggctggatgaccacaattaacggcaaggagctgaaggtggagggccagattacctactacaacagatacaagagacagaacgtagtcaaggacctgtccgtcgagctggatagactgagcgaagaatctgtgaacaacgacatctcctcctggacaaagggcagaagcggagaagctctgagcctcctgaagaaaagattctcccatagacccgtgcaggagaagttcgtgtgcctgaactgcggcttcgagacacacgcagccgagcaagccgccctgaacatcgccagatcctggctgttcctgcggagccaggagtacaagaaataccagacaaacaagacaaccggcaacaccgataagagagccttcgtcgagacctggcagtccttttaccggaagaagcttaaggaggtgtggaaacctgccgtgcggtctggcggatctggcggaggctccacaagccccgagaccgtggtgagcttcgaggacgtggccgtgaggttcagccccgacgagtggcacctgctggacgacggccagaggaggctgtacagggacgtgctgagggagaactacagccacgtgaggagcctgggcttccccgtgcccgacctggccgtgatcttcaggatggagaggggcgaggagccctggccccccggcctgcccgccggcaccaagagcgacgaccaggaggaggagaggaccagccccaagaaaaagagaaaagtctaagctgccttctgcggggcttgccttctggccatgcccttcttctctcccttgcacctgtacctcttggtctttgaataaagcctgagtaggaaggctagcaaaaaaaaaaaaaaaaaaaaaaaaaaaaaaaaaaaaaaaaaaaaaaaaaaaaaaaaaaaaaaaaaaaaaaaaaaaaaaaa

SEQ ID NO: 3693 - RNA, 5419 nt, synthetic construct
  source 1..5419: mol_type = other RNA
aggaaataagagagaaaagaagagtaagaagaaatataagagccaccatggcccctaagaagaagcgtaaagtgagccgggtgaacggcagcggcagcggcggcggcatgaaccacgaccaggagttcgacccccctaaggtgtaccctcccgtccccgccgagaagagaaagcccatccgggtcctgagcctgttcgatggcatcgccaccggtctgctggtgctgaaggacctgggcatccaggtggataggtacattgcctccgaggtgtgcgaggactccatcaccgtgggaatggtgcgtcatcagggcaagatcatgtacgtgggcgacgtgcggagcgtgacacagaagcatatccaggagtggggccctttcgacctggtgatcggcggcagcccttgcaatgacctgagcatcgtgaacccagcccggaagggcctgtacgagggaaccggcagactgttcttcgagttttacagactgctgcacgacgcccggcctaaggaaggcgacgaccggcccttcttttggctgttcgagaatgtggtggccatgggagtcagcgacaagcgggatattagccggttcctggagagcaaccccgtgatgatcgatgccaaggaagtgagcgccgcccaccgggccagatacttctggggcaatctgcctggcatgaacagacccctggccagcaccgtgaacgacaagctggagctgcaggagtgcctggagcacggccggatcgccaagttcagcaaggtgagaaccatcaccacccgaagcaacagcatcaaacaaggcaaggaccagcactttcctgtgttcatgaacgagaaggaggacatcctgtggtgtaccgagatggagagagtgttcgggttcccagtccactacacagatgtcagcaacatgtctagactggccagacagagactgctgggaagaagctggtccgtccctgtgatcagacacctgttcgcccctctgaaggagtacttcgcctgcgtgagcagcggcaacagcaacgccaacagccggggccccagcttctctagcggcctggtgccactgtccctgagagggagccacatgggccccatggagatctacaaaaccgtgagcgcctggaagcggcagcctgtgcgcgtgctgagcctgtttcggaatatcgataaagtcctgaaaagcctgggattcctggagagcggctctggctccggcggtggcaccctgaagtacgtggaggatgtgacaaacgtggtcagacgggatgtggagaagtggggccccttcgatctggtgtacggcagcacccaacccctgggcagctcttgtgaccggtgccctggctggtacatgtttcagttccaccggatcctgcagtacgccctgccgagacaggagtcccagcggccattcttttggattttcatggacaacttgctgctgaccgaggatgaccaggaaactaccactcggttcctgcagaccgaagccgtgaccctgcaggacgtgagaggccgggactaccagaacgccatgcgggtgtggtccaacatccctggactgaaaagcaagcacgcacctctgacccctaaagaagaggagtacctgcaggcccaggtgcggagcagaagcaagctggacgcccctaaggtggatctgctggtgaagaattgcctcctgcccctgagagagtacttcaagtatttcagccagaatagtctgcccctgggcggcccaagcagcggcgcccctcctcccagcggcggcagcccagccggctccccaacctctaccgaggagggcacctctgagtccgccacccccgagagcggccctggcacctccaccgagcccagcgagggcagcgcacccggcagccctgccggcagccccacctccacagaggagggaaccagcaccgagcccagcgaaggcagcgccccaggcaccagcaccgagcctagtgagggcggctctggcggcggcagcgcccaggagattaaacggatcaacaagatcagaagaagacttgtgaaagacagcaacaccaagaaggccggcaagacaggccccatgaaaaccctgctggttagagtgatgacacccgatctgagagagcggctggaaaacctgagaaagaagcctgaaaatatcccccagcccatcagcaatacatctagagccaacctgaataagctgctgaccgattacaccgaaatgaagaaggcgatcctgcatgtgtactgggaagagttccagaaggaccctgtgggcctgatgagccgggtggcccagcctgccagcaagaagatcgatcagaacaagctgaaacctgagatggacgagaagggcaacctgaccaccgccggctttgcctgctctcagtgtggccagcccctgttcgtgtacaagctggagcaggtgtctgagaagggcaaggcttacaccaactacttcggacggtgcaatgtggccgagcacgaaaagctgatcctgctggcccagctgaagcccgagaaggatagcgacgaagccgtgacatatagcctgggaaagtttgggcagagggccctggatttctacagcattcatgtgaccaaggagtccacccaccccgtgaagcccctggcccagatcgccggaaacagatacgcctccggacctgtgggaaaggccctgagcgacgcatgtatgggcacaatcgcctccttcctgtctaagtaccaggacatcatcatcgaacaccagaaggtggtgaagggcaaccagaagagactggagagcctgcgggagctggccggcaaggaaaacctggaataccctagcgtgaccctgccacctcagcctcacaccaaggagggcgttgatgcctacaacgaagtgatcgcccgggtgcgaatgtgggtgaacctgaacctgtggcagaagctgaagctaagcagagatgatgccaagcctctgctgagactgaagggattcccttcctttcctctggtcgagagacaggccaacgaagtggactggtgggacatggtgtgtaacgtgaagaagctgatcaacgagaaaaaggaggatggcaaggtgttttggcagaatctggctggctacaagagacaggaagccctgagaccatacctgagcagcgaggaagatcggaagaagggaaagaaattcgctcggtaccagctgggcgacctgctgctgcacctggaaaagaagcacggcgaggactggggaaaggtgtacgacgaggcctgggagcggattgacaagaaagtggaaggcctgagcaagcacatcaagctggaagaggaacggagaagcgaggacgcccagagcaaggccgccctgaccgactggctgcgggctaaggccagcttcgtgatcgagggcctgaaggaggccgacaaggacgagttctgcagatgcgagctgaagctgcagaagtggtacggggacctgcggggaaagcccttcgccatcgaagccgagaacagcatcctggacatcagcggcttcagcaagcagtacaactgtgccttcatctggcagaaggacggcgtgaagaagctgaacctgtacctgatcatcaactacttcaagggcggcaagctgcggttcaagaagatcaaacctgaagccttcgaagccaacagattctacaccgtgatcaacaaaaagagcggcgagatcgtgcccatggaggtgaacttcaacttcgacgaccccaacctgatcatcctgcctctggcctttggcaagagacagggcagagaattcatctggaacgacctgctgtccctggaaaccggcagcctgaagctggccaacggaagagtgatcgagaagacactgtacaacagaagaacccggcaggatgagcctgccctgttcgtggccctgaccttcgagcggcgggaggtcctggactcctccaatatcaaaccaatgaacctgatcggcgtggcaagaggcgaaaacatccccgccgtgatcgccctgaccgaccccgagggctgcccactgagccggtttaaggatagcctgggaaacccaacccacatcctgagaatcggcgagagctataaggagaagcagcggaccatccaggccaagaaggaggtggagcagcggagagccggcggctacagccggaagtacgccagcaaagccaagaatctggcagacgatatggtgagaaacaccgctagagatctgctgtactacgccgtgacccaggatgccatgctgatcttcgccaacctgagccggggcttcggccggcagggcaagcggaccttcatggccgagagacagtacacacggatggaggactggctgaccgccaagctggcctacgagggcctgagcaagacctacctgtccaagacactggcccagtacacctccaagacatgcagcaactgtgggtttaccatcaccagcgccgactacgacagggtgctggagaagctgaagaagacagcaacaggctggatgaccacaattaacggcaaggagctgaaggtggagggccagattacctactacaacagatacaagagacagaacgtagtcaaggacctgtccgtcgagctggatagactgagcgaagaatctgtgaacaacgacatctcctcctggacaaagggcagaagcggagaagctctgagcctcctgaagaaaagattctcccatagacccgtgcaggagaagttcgtgtgcctgaactgcggcttcgagacacacgcagccgagcaagccgccctgaacatcgccagatcctggctgttcctgcggagccaggagtacaagaaataccagacaaacaagacaaccggcaacaccgataagagagccttcgtcgagacctggcagtccttttaccggaagaagcttaaggaggtgtggaaacctgccgtgcggtctggcggatctggcggaggctccacaagcaggcccagggccgtgaagttcggcgacgtggccctgtacttcagcagggaggagtggggctgcctgaggcccgcccagagggccctgtacagggacgtgatgcaggagacctacggccacctgggcgccctgggctgcgccggccccaagcccgccctgatcagctggctggagaggaacaccgacgactgggagaccgccgccctggacccccaggagtgccccaagggcgtggccgtgcagaccagccccaagaaaaagagaaaagtctaagctgccttctgcggggcttgccttctggccatgcccttcttctctcccttgcacctgtacctcttggtctttgaataaagcctgagtaggaaggctagcaaaaaaaaaaaaaaaaaaaaaaaaaaaaaaaaaaaaaaaaaaaaaaaaaaaaaaaaaaaaaaaaaaaaaaaaaaaaaaaa

SEQ ID NO: 3694 - RNA, 5419 nt, synthetic construct
  source 1..5419: mol_type = other RNA
aggaaataagagagaaaagaagagtaagaagaaatataagagccaccatggcccctaagaagaagcgtaaagtgagccgggtgaacggcagcggcagcggcggcggcatgaaccacgaccaggagttcgacccccctaaggtgtaccctcccgtccccgccgagaagagaaagcccatccgggtcctgagcctgttcgatggcatcgccaccggtctgctggtgctgaaggacctgggcatccaggtggataggtacattgcctccgaggtgtgcgaggactccatcaccgtgggaatggtgcgtcatcagggcaagatcatgtacgtgggcgacgtgcggagcgtgacacagaagcatatccaggagtggggccctttcgacctggtgatcggcggcagcccttgcaatgacctgagcatcgtgaacccagcccggaagggcctgtacgagggaaccggcagactgttcttcgagttttacagactgctgcacgacgcccggcctaaggaaggcgacgaccggcccttcttttggctgttcgagaatgtggtggccatgggagtcagcgacaagcgggatattagccggttcctggagagcaaccccgtgatgatcgatgccaaggaagtgagcgccgcccaccgggccagatacttctggggcaatctgcctggcatgaacagacccctggccagcaccgtgaacgacaagctggagctgcaggagtgcctggagcacggccggatcgccaagttcagcaaggtgagaaccatcaccacccgaagcaacagcatcaaacaaggcaaggaccagcactttcctgtgttcatgaacgagaaggaggacatcctgtggtgtaccgagatggagagagtgttcgggttcccagtccactacacagatgtcagcaacatgtctagactggccagacagagactgctgggaagaagctggtccgtccctgtgatcagacacctgttcgcccctctgaaggagtacttcgcctgcgtgagcagcggcaacagcaacgccaacagccggggccccagcttctctagcggcctggtgccactgtccctgagagggagccacatgggccccatggagatctacaaaaccgtgagcgcctggaagcggcagcctgtgcgcgtgctgagcctgtttcggaatatcgataaagtcctgaaaagcctgggattcctggagagcggctctggctccggcggtggcaccctgaagtacgtggaggatgtgacaaacgtggtcagacgggatgtggagaagtggggccccttcgatctggtgtacggcagcacccaacccctgggcagctcttgtgaccggtgccctggctggtacatgtttcagttccaccggatcctgcagtacgccctgccgagacaggagtcccagcggccattcttttggattttcatggacaacttgctgctgaccgaggatgaccaggaaactaccactcggttcctgcagaccgaagccgtgaccctgcaggacgtgagaggccgggactaccagaacgccatgcgggtgtggtccaacatccctggactgaaaagcaagcacgcacctctgacccctaaagaagaggagtacctgcaggcccaggtgcggagcagaagcaagctggacgcccctaaggtggatctgctggtgaagaattgcctcctgcccctgagagagtacttcaagtatttcagccagaatagtctgcccctgggcggcccaagcagcggcgcccctcctcccagcggcggcagcccagccggctccccaacctctaccgaggagggcacctctgagtccgccacccccgagagcggccctggcacctccaccgagcccagcgagggcagcgcacccggcagccctgccggcagccccacctccacagaggagggaaccagcaccgagcccagcgaaggcagcgccccaggcaccagcaccgagcctagtgagggcggctctggcggcggcagcgcccaggagattaaacggatcaacaagatcagaagaagacttgtgaaagacagcaacaccaagaaggccggcaagacaggccccatgaaaaccctgctggttagagtgatgacacccgatctgagagagcggctggaaaacctgagaaagaagcctgaaaatatcccccagcccatcagcaatacatctagagccaacctgaataagctgctgaccgattacaccgaaatgaagaaggcgatcctgcatgtgtactgggaagagttccagaaggaccctgtgggcctgatgagccgggtggcccagcctgccagcaagaagatcgatcagaacaagctgaaacctgagatggacgagaagggcaacctgaccaccgccggctttgcctgctctcagtgtggccagcccctgttcgtgtacaagctggagcaggtgtctgagaagggcaaggcttacaccaactacttcggacggtgcaatgtggccgagcacgaaaagctgatcctgctggcccagctgaagcccgagaaggatagcgacgaagccgtgacatatagcctgggaaagtttgggcagagggccctggatttctacagcattcatgtgaccaaggagtccacccaccccgtgaagcccctggcccagatcgccggaaacagatacgcctccggacctgtgggaaaggccctgagcgacgcatgtatgggcacaatcgcctccttcctgtctaagtaccaggacatcatcatcgaacaccagaaggtggtgaagggcaaccagaagagactggagagcctgcgggagctggccggcaaggaaaacctggaataccctagcgtgaccctgccacctcagcctcacaccaaggagggcgttgatgcctacaacgaagtgatcgcccgggtgcgaatgtgggtgaacctgaacctgtggcagaagctgaagctaagcagagatgatgccaagcctctgctgagactgaagggattcccttcctttcctctggtcgagagacaggccaacgaagtggactggtgggacatggtgtgtaacgtgaagaagctgatcaacgagaaaaaggaggatggcaaggtgttttggcagaatctggctggctacaagagacaggaagccctgagaccatacctgagcagcgaggaagatcggaagaagggaaagaaattcgctcggtaccagctgggcgacctgctgctgcacctggaaaagaagcacggcgaggactggggaaaggtgtacgacgaggcctgggagcggattgacaagaaagtggaaggcctgagcaagcacatcaagctggaagaggaacggagaagcgaggacgcccagagcaaggccgccctgaccgactggctgcgggctaaggccagcttcgtgatcgagggcctgaaggaggccgacaaggacgagttctgcagatgcgagctgaagctgcagaagtggtacggggacctgcggggaaagcccttcgccatcgaagccgagaacagcatcctggacatcagcggcttcagcaagcagtacaactgtgccttcatctggcagaaggacggcgtgaagaagctgaacctgtacctgatcatcaactacttcaagggcggcaagctgcggttcaagaagatcaaacctgaagccttcgaagccaacagattctacaccgtgatcaacaaaaagagcggcgagatcgtgcccatggaggtgaacttcaacttcgacgaccccaacctgatcatcctgcctctggcctttggcaagagacagggcagagaattcatctggaacgacctgctgtccctggaaaccggcagcctgaagctggccaacggaagagtgatcgagaagacactgtacaacagaagaacccggcaggatgagcctgccctgttcgtggccctgaccttcgagcggcgggaggtcctggactcctccaatatcaaaccaatgaacctgatcggcgtggcaagaggcgaaaacatccccgccgtgatcgccctgaccgaccccgagggctgcccactgagccggtttaaggatagcctgggaaacccaacccacatcctgagaatcggcgagagctataaggagaagcagcggaccatccaggccaagaaggaggtggagcagcggagagccggcggctacagccggaagtacgccagcaaagccaagaatctggcagacgatatggtgagaaacaccgctagagatctgctgtactacgccgtgacccaggatgccatgctgatcttcgccaacctgagccggggcttcggccggcagggcaagcggaccttcatggccgagagacagtacacacggatggaggactggctgaccgccaagctggcctacgagggcctgagcaagacctacctgtccaagacactggcccagtacacctccaagacatgcagcaactgtgggtttaccatcaccagcgccgactacgacagggtgctggagaagctgaagaagacagcaacaggctggatgaccacaattaacggcaaggagctgaaggtggagggccagattacctactacaacagatacaagagacagaacgtagtcaaggacctgtccgtcgagctggatagactgagcgaagaatctgtgaacaacgacatctcctcctggacaaagggcagaagcggagaagctctgagcctcctgaagaaaagattctcccatagacccgtgcaggagaagttcgtgtgcctgaactgcggcttcgagacacacgcagccgagcaagccgccctgaacatcgccagatcctggctgttcctgcggagccaggagtacaagaaataccagacaaacaagacaaccggcaacaccgataagagagccttcgtcgagacctggcagtccttttaccggaagaagcttaaggaggtgtggaaacctgccgtgcggtctggcggatctggcggaggctccacaagcaagcccggcgccctgagcttcgccgacgtggccgtgtacttcagccccgaggagtggggctgcctgaggcccgcccagagggccctgtacagggacgtgatgagggagacctacggccacctgggcgccctgggcttccccggccccaagcccgccctgatcagctggatggagcaggagagcgaggcctggagcagcgccgcccaggaccccgagaagggcgagagcctgggcggcgccaggaccagccccaagaaaaagagaaaagtctaagctgccttctgcggggcttgccttctggccatgcccttcttctctcccttgcacctgtacctcttggtctttgaataaagcctgagtaggaaggctagcaaaaaaaaaaaaaaaaaaaaaaaaaaaaaaaaaaaaaaaaaaaaaaaaaaaaaaaaaaaaaaaaaaaaaaaaaaaaaaaa

SEQ ID NO: 3695 - RNA, 5419 nt, synthetic construct
  source 1..5419: mol_type = other RNA
aggaaataagagagaaaagaagagtaagaagaaatataagagccaccatggcccctaagaagaagcgtaaagtgagccgggtgaacggcagcggcagcggcggcggcatgaaccacgaccaggagttcgacccccctaaggtgtaccctcccgtccccgccgagaagagaaagcccatccgggtcctgagcctgttcgatggcatcgccaccggtctgctggtgctgaaggacctgggcatccaggtggataggtacattgcctccgaggtgtgcgaggactccatcaccgtgggaatggtgcgtcatcagggcaagatcatgtacgtgggcgacgtgcggagcgtgacacagaagcatatccaggagtggggccctttcgacctggtgatcggcggcagcccttgcaatgacctgagcatcgtgaacccagcccggaagggcctgtacgagggaaccggcagactgttcttcgagttttacagactgctgcacgacgcccggcctaaggaaggcgacgaccggcccttcttttggctgttcgagaatgtggtggccatgggagtcagcgacaagcgggatattagccggttcctggagagcaaccccgtgatgatcgatgccaaggaagtgagcgccgcccaccgggccagatacttctggggcaatctgcctggcatgaacagacccctggccagcaccgtgaacgacaagctggagctgcaggagtgcctggagcacggccggatcgccaagttcagcaaggtgagaaccatcaccacccgaagcaacagcatcaaacaaggcaaggaccagcactttcctgtgttcatgaacgagaaggaggacatcctgtggtgtaccgagatggagagagtgttcgggttcccagtccactacacagatgtcagcaacatgtctagactggccagacagagactgctgggaagaagctggtccgtccctgtgatcagacacctgttcgcccctctgaaggagtacttcgcctgcgtgagcagcggcaacagcaacgccaacagccggggccccagcttctctagcggcctggtgccactgtccctgagagggagccacatgggccccatggagatctacaaaaccgtgagcgcctggaagcggcagcctgtgcgcgtgctgagcctgtttcggaatatcgataaagtcctgaaaagcctgggattcctggagagcggctctggctccggcggtggcaccctgaagtacgtggaggatgtgacaaacgtggtcagacgggatgtggagaagtggggccccttcgatctggtgtacggcagcacccaacccctgggcagctcttgtgaccggtgccctggctggtacatgtttcagttccaccggatcctgcagtacgccctgccgagacaggagtcccagcggccattcttttggattttcatggacaacttgctgctgaccgaggatgaccaggaaactaccactcggttcctgcagaccgaagccgtgaccctgcaggacgtgagaggccgggactaccagaacgccatgcgggtgtggtccaacatccctggactgaaaagcaagcacgcacctctgacccctaaagaagaggagtacctgcaggcccaggtgcggagcagaagcaagctggacgcccctaaggtggatctgctggtgaagaattgcctcctgcccctgagagagtacttcaagtatttcagccagaatagtctgcccctgggcggcccaagcagcggcgcccctcctcccagcggcggcagcccagccggctccccaacctctaccgaggagggcacctctgagtccgccacccccgagagcggccctggcacctccaccgagcccagcgagggcagcgcacccggcagccctgccggcagccccacctccacagaggagggaaccagcaccgagcccagcgaaggcagcgccccaggcaccagcaccgagcctagtgagggcggctctggcggcggcagcgcccaggagattaaacggatcaacaagatcagaagaagacttgtgaaagacagcaacaccaagaaggccggcaagacaggccccatgaaaaccctgctggttagagtgatgacacccgatctgagagagcggctggaaaacctgagaaagaagcctgaaaatatcccccagcccatcagcaatacatctagagccaacctgaataagctgctgaccgattacaccgaaatgaagaaggcgatcctgcatgtgtactgggaagagttccagaaggaccctgtgggcctgatgagccgggtggcccagcctgccagcaagaagatcgatcagaacaagctgaaacctgagatggacgagaagggcaacctgaccaccgccggctttgcctgctctcagtgtggccagcccctgttcgtgtacaagctggagcaggtgtctgagaagggcaaggcttacaccaactacttcggacggtgcaatgtggccgagcacgaaaagctgatcctgctggcccagctgaagcccgagaaggatagcgacgaagccgtgacatatagcctgggaaagtttgggcagagggccctggatttctacagcattcatgtgaccaaggagtccacccaccccgtgaagcccctggcccagatcgccggaaacagatacgcctccggacctgtgggaaaggccctgagcgacgcatgtatgggcacaatcgcctccttcctgtctaagtaccaggacatcatcatcgaacaccagaaggtggtgaagggcaaccagaagagactggagagcctgcgggagctggccggcaaggaaaacctggaataccctagcgtgaccctgccacctcagcctcacaccaaggagggcgttgatgcctacaacgaagtgatcgcccgggtgcgaatgtgggtgaacctgaacctgtggcagaagctgaagctaagcagagatgatgccaagcctctgctgagactgaagggattcccttcctttcctctggtcgagagacaggccaacgaagtggactggtgggacatggtgtgtaacgtgaagaagctgatcaacgagaaaaaggaggatggcaaggtgttttggcagaatctggctggctacaagagacaggaagccctgagaccatacctgagcagcgaggaagatcggaagaagggaaagaaattcgctcggtaccagctgggcgacctgctgctgcacctggaaaagaagcacggcgaggactggggaaaggtgtacgacgaggcctgggagcggattgacaagaaagtggaaggcctgagcaagcacatcaagctggaagaggaacggagaagcgaggacgcccagagcaaggccgccctgaccgactggctgcgggctaaggccagcttcgtgatcgagggcctgaaggaggccgacaaggacgagttctgcagatgcgagctgaagctgcagaagtggtacggggacctgcggggaaagcccttcgccatcgaagccgagaacagcatcctggacatcagcggcttcagcaagcagtacaactgtgccttcatctggcagaaggacggcgtgaagaagctgaacctgtacctgatcatcaactacttcaagggcggcaagctgcggttcaagaagatcaaacctgaagccttcgaagccaacagattctacaccgtgatcaacaaaaagagcggcgagatcgtgcccatggaggtgaacttcaacttcgacgaccccaacctgatcatcctgcctctggcctttggcaagagacagggcagagaattcatctggaacgacctgctgtccctggaaaccggcagcctgaagctggccaacggaagagtgatcgagaagacactgtacaacagaagaacccggcaggatgagcctgccctgttcgtggccctgaccttcgagcggcgggaggtcctggactcctccaatatcaaaccaatgaacctgatcggcgtggcaagaggcgaaaacatccccgccgtgatcgccctgaccgaccccgagggctgcccactgagccggtttaaggatagcctgggaaacccaacccacatcctgagaatcggcgagagctataaggagaagcagcggaccatccaggccaagaaggaggtggagcagcggagagccggcggctacagccggaagtacgccagcaaagccaagaatctggcagacgatatggtgagaaacaccgctagagatctgctgtactacgccgtgacccaggatgccatgctgatcttcgccaacctgagccggggcttcggccggcagggcaagcggaccttcatggccgagagacagtacacacggatggaggactggctgaccgccaagctggcctacgagggcctgagcaagacctacctgtccaagacactggcccagtacacctccaagacatgcagcaactgtgggtttaccatcaccagcgccgactacgacagggtgctggagaagctgaagaagacagcaacaggctggatgaccacaattaacggcaaggagctgaaggtggagggccagattacctactacaacagatacaagagacagaacgtagtcaaggacctgtccgtcgagctggatagactgagcgaagaatctgtgaacaacgacatctcctcctggacaaagggcagaagcggagaagctctgagcctcctgaagaaaagattctcccatagacccgtgcaggagaagttcgtgtgcctgaactgcggcttcgagacacacgcagccgagcaagccgccctgaacatcgccagatcctggctgttcctgcggagccaggagtacaagaaataccagacaaacaagacaaccggcaacaccgataagagagccttcgtcgagacctggcagtccttttaccggaagaagcttaaggaggtgtggaaacctgccgtgcggtctggcggatctggcggaggctccacaagcgagcccggcgccgtgagcttcgccgacgtggccgtgtacttcagccccgaggagtggggctgcctgaggcccgcccagagggtgctgtacagggacgtgatgagggagacctacggccacctgggcgccctgggcttccccggccccaagcccgccctgatcagctggatggagcaggagagcgaggcctggagcagcgccgcccaggaccccgaggagggcgagagcctgggcggcgccctgaccagccccaagaaaaagagaaaagtctaagctgccttctgcggggcttgccttctggccatgcccttcttctctcccttgcacctgtacctcttggtctttgaataaagcctgagtaggaaggctagcaaaaaaaaaaaaaaaaaaaaaaaaaaaaaaaaaaaaaaaaaaaaaaaaaaaaaaaaaaaaaaaaaaaaaaaaaaaaaaaa

SEQ ID NO: 3696 - RNA, 5422 nt, synthetic construct
  source 1..5422: mol_type = other RNA
aggaaataagagagaaaagaagagtaagaagaaatataagagccaccatggcccctaagaagaagcgtaaagtgagccgggtgaacggcagcggcagcggcggcggcatgaaccacgaccaggagttcgacccccctaaggtgtaccctcccgtccccgccgagaagagaaagcccatccgggtcctgagcctgttcgatggcatcgccaccggtctgctggtgctgaaggacctgggcatccaggtggataggtacattgcctccgaggtgtgcgaggactccatcaccgtgggaatggtgcgtcatcagggcaagatcatgtacgtgggcgacgtgcggagcgtgacacagaagcatatccaggagtggggccctttcgacctggtgatcggcggcagcccttgcaatgacctgagcatcgtgaacccagcccggaagggcctgtacgagggaaccggcagactgttcttcgagttttacagactgctgcacgacgcccggcctaaggaaggcgacgaccggcccttcttttggctgttcgagaatgtggtggccatgggagtcagcgacaagcgggatattagccggttcctggagagcaaccccgtgatgatcgatgccaaggaagtgagcgccgcccaccgggccagatacttctggggcaatctgcctggcatgaacagacccctggccagcaccgtgaacgacaagctggagctgcaggagtgcctggagcacggccggatcgccaagttcagcaaggtgagaaccatcaccacccgaagcaacagcatcaaacaaggcaaggaccagcactttcctgtgttcatgaacgagaaggaggacatcctgtggtgtaccgagatggagagagtgttcgggttcccagtccactacacagatgtcagcaacatgtctagactggccagacagagactgctgggaagaagctggtccgtccctgtgatcagacacctgttcgcccctctgaaggagtacttcgcctgcgtgagcagcggcaacagcaacgccaacagccggggccccagcttctctagcggcctggtgccactgtccctgagagggagccacatgggccccatggagatctacaaaaccgtgagcgcctggaagcggcagcctgtgcgcgtgctgagcctgtttcggaatatcgataaagtcctgaaaagcctgggattcctggagagcggctctggctccggcggtggcaccctgaagtacgtggaggatgtgacaaacgtggtcagacgggatgtggagaagtggggccccttcgatctggtgtacggcagcacccaacccctgggcagctcttgtgaccggtgccctggctggtacatgtttcagttccaccggatcctgcagtacgccctgccgagacaggagtcccagcggccattcttttggattttcatggacaacttgctgctgaccgaggatgaccaggaaactaccactcggttcctgcagaccgaagccgtgaccctgcaggacgtgagaggccgggactaccagaacgccatgcgggtgtggtccaacatccctggactgaaaagcaagcacgcacctctgacccctaaagaagaggagtacctgcaggcccaggtgcggagcagaagcaagctggacgcccctaaggtggatctgctggtgaagaattgcctcctgcccctgagagagtacttcaagtatttcagccagaatagtctgcccctgggcggcccaagcagcggcgcccctcctcccagcggcggcagcccagccggctccccaacctctaccgaggagggcacctctgagtccgccacccccgagagcggccctggcacctccaccgagcccagcgagggcagcgcacccggcagccctgccggcagccccacctccacagaggagggaaccagcaccgagcccagcgaaggcagcgccccaggcaccagcaccgagcctagtgagggcggctctggcggcggcagcgcccaggagattaaacggatcaacaagatcagaagaagacttgtgaaagacagcaacaccaagaaggccggcaagacaggccccatgaaaaccctgctggttagagtgatgacacccgatctgagagagcggctggaaaacctgagaaagaagcctgaaaatatcccccagcccatcagcaatacatctagagccaacctgaataagctgctgaccgattacaccgaaatgaagaaggcgatcctgcatgtgtactgggaagagttccagaaggaccctgtgggcctgatgagccgggtggcccagcctgccagcaagaagatcgatcagaacaagctgaaacctgagatggacgagaagggcaacctgaccaccgccggctttgcctgctctcagtgtggccagcccctgttcgtgtacaagctggagcaggtgtctgagaagggcaaggcttacaccaactacttcggacggtgcaatgtggccgagcacgaaaagctgatcctgctggcccagctgaagcccgagaaggatagcgacgaagccgtgacatatagcctgggaaagtttgggcagagggccctggatttctacagcattcatgtgaccaaggagtccacccaccccgtgaagcccctggcccagatcgccggaaacagatacgcctccggacctgtgggaaaggccctgagcgacgcatgtatgggcacaatcgcctccttcctgtctaagtaccaggacatcatcatcgaacaccagaaggtggtgaagggcaaccagaagagactggagagcctgcgggagctggccggcaaggaaaacctggaataccctagcgtgaccctgccacctcagcctcacaccaaggagggcgttgatgcctacaacgaagtgatcgcccgggtgcgaatgtgggtgaacctgaacctgtggcagaagctgaagctaagcagagatgatgccaagcctctgctgagactgaagggattcccttcctttcctctggtcgagagacaggccaacgaagtggactggtgggacatggtgtgtaacgtgaagaagctgatcaacgagaaaaaggaggatggcaaggtgttttggcagaatctggctggctacaagagacaggaagccctgagaccatacctgagcagcgaggaagatcggaagaagggaaagaaattcgctcggtaccagctgggcgacctgctgctgcacctggaaaagaagcacggcgaggactggggaaaggtgtacgacgaggcctgggagcggattgacaagaaagtggaaggcctgagcaagcacatcaagctggaagaggaacggagaagcgaggacgcccagagcaaggccgccctgaccgactggctgcgggctaaggccagcttcgtgatcgagggcctgaaggaggccgacaaggacgagttctgcagatgcgagctgaagctgcagaagtggtacggggacctgcggggaaagcccttcgccatcgaagccgagaacagcatcctggacatcagcggcttcagcaagcagtacaactgtgccttcatctggcagaaggacggcgtgaagaagctgaacctgtacctgatcatcaactacttcaagggcggcaagctgcggttcaagaagatcaaacctgaagccttcgaagccaacagattctacaccgtgatcaacaaaaagagcggcgagatcgtgcccatggaggtgaacttcaacttcgacgaccccaacctgatcatcctgcctctggcctttggcaagagacagggcagagaattcatctggaacgacctgctgtccctggaaaccggcagcctgaagctggccaacggaagagtgatcgagaagacactgtacaacagaagaacccggcaggatgagcctgccctgttcgtggccctgaccttcgagcggcgggaggtcctggactcctccaatatcaaaccaatgaacctgatcggcgtggcaagaggcgaaaacatccccgccgtgatcgccctgaccgaccccgagggctgcccactgagccggtttaaggatagcctgggaaacccaacccacatcctgagaatcggcgagagctataaggagaagcagcggaccatccaggccaagaaggaggtggagcagcggagagccggcggctacagccggaagtacgccagcaaagccaagaatctggcagacgatatggtgagaaacaccgctagagatctgctgtactacgccgtgacccaggatgccatgctgatcttcgccaacctgagccggggcttcggccggcagggcaagcggaccttcatggccgagagacagtacacacggatggaggactggctgaccgccaagctggcctacgagggcctgagcaagacctacctgtccaagacactggcccagtacacctccaagacatgcagcaactgtgggtttaccatcaccagcgccgactacgacagggtgctggagaagctgaagaagacagcaacaggctggatgaccacaattaacggcaaggagctgaaggtggagggccagattacctactacaacagatacaagagacagaacgtagtcaaggacctgtccgtcgagctggatagactgagcgaagaatctgtgaacaacgacatctcctcctggacaaagggcagaagcggagaagctctgagcctcctgaagaaaagattctcccatagacccgtgcaggagaagttcgtgtgcctgaactgcggcttcgagacacacgcagccgagcaagccgccctgaacatcgccagatcctggctgttcctgcggagccaggagtacaagaaataccagacaaacaagacaaccggcaacaccgataagagagccttcgtcgagacctggcagtccttttaccggaagaagcttaaggaggtgtggaaacctgccgtgcggtctggcggatctggcggaggctccacaagcgtgaccttcgaggacgtggccgtgaacttcaccagcggcgagtgggccctgctggacagcagccagaagaagctgtacagggacgtgatgaaggagaccttcctgaacctgatcagcatcgagaagggcctggagcccaacatcgaggagcactacaaggacttctgcaggaacctgaggacccagctggtggagaaggactggggctacgagtacaacaggcagtgggacgacaacctgcagaccaccagccccaagaaaaagagaaaagtctaagctgccttctgcggggcttgccttctggccatgcccttcttctctcccttgcacctgtacctcttggtctttgaataaagcctgagtaggaaggctagcaaaaaaaaaaaaaaaaaaaaaaaaaaaaaaaaaaaaaaaaaaaaaaaaaaaaaaaaaaaaaaaaaaaaaaaaaaaaaaaa

SEQ ID NO: 3697 - RNA, 5419 nt, synthetic construct
  source 1..5419: mol_type = other RNA
aggaaataagagagaaaagaagagtaagaagaaatataagagccaccatggcccctaagaagaagcgtaaagtgagccgggtgaacggcagcggcagcggcggcggcatgaaccacgaccaggagttcgacccccctaaggtgtaccctcccgtccccgccgagaagagaaagcccatccgggtcctgagcctgttcgatggcatcgccaccggtctgctggtgctgaaggacctgggcatccaggtggataggtacattgcctccgaggtgtgcgaggactccatcaccgtgggaatggtgcgtcatcagggcaagatcatgtacgtgggcgacgtgcggagcgtgacacagaagcatatccaggagtggggccctttcgacctggtgatcggcggcagcccttgcaatgacctgagcatcgtgaacccagcccggaagggcctgtacgagggaaccggcagactgttcttcgagttttacagactgctgcacgacgcccggcctaaggaaggcgacgaccggcccttcttttggctgttcgagaatgtggtggccatgggagtcagcgacaagcgggatattagccggttcctggagagcaaccccgtgatgatcgatgccaaggaagtgagcgccgcccaccgggccagatacttctggggcaatctgcctggcatgaacagacccctggccagcaccgtgaacgacaagctggagctgcaggagtgcctggagcacggccggatcgccaagttcagcaaggtgagaaccatcaccacccgaagcaacagcatcaaacaaggcaaggaccagcactttcctgtgttcatgaacgagaaggaggacatcctgtggtgtaccgagatggagagagtgttcgggttcccagtccactacacagatgtcagcaacatgtctagactggccagacagagactgctgggaagaagctggtccgtccctgtgatcagacacctgttcgcccctctgaaggagtacttcgcctgcgtgagcagcggcaacagcaacgccaacagccggggccccagcttctctagcggcctggtgccactgtccctgagagggagccacatgggccccatggagatctacaaaaccgtgagcgcctggaagcggcagcctgtgcgcgtgctgagcctgtttcggaatatcgataaagtcctgaaaagcctgggattcctggagagcggctctggctccggcggtggcaccctgaagtacgtggaggatgtgacaaacgtggtcagacgggatgtggagaagtggggccccttcgatctggtgtacggcagcacccaacccctgggcagctcttgtgaccggtgccctggctggtacatgtttcagttccaccggatcctgcagtacgccctgccgagacaggagtcccagcggccattcttttggattttcatggacaacttgctgctgaccgaggatgaccaggaaactaccactcggttcctgcagaccgaagccgtgaccctgcaggacgtgagaggccgggactaccagaacgccatgcgggtgtggtccaacatccctggactgaaaagcaagcacgcacctctgacccctaaagaagaggagtacctgcaggcccaggtgcggagcagaagcaagctggacgcccctaaggtggatctgctggtgaagaattgcctcctgcccctgagagagtacttcaagtatttcagccagaatagtctgcccctgggcggcccaagcagcggcgcccctcctcccagcggcggcagcccagccggctccccaacctctaccgaggagggcacctctgagtccgccacccccgagagcggccctggcacctccaccgagcccagcgagggcagcgcacccggcagccctgccggcagccccacctccacagaggagggaaccagcaccgagcccagcgaaggcagcgccccaggcaccagcaccgagcctagtgagggcggctctggcggcggcagcgcccaggagattaaacggatcaacaagatcagaagaagacttgtgaaagacagcaacaccaagaaggccggcaagacaggccccatgaaaaccctgctggttagagtgatgacacccgatctgagagagcggctggaaaacctgagaaagaagcctgaaaatatcccccagcccatcagcaatacatctagagccaacctgaataagctgctgaccgattacaccgaaatgaagaaggcgatcctgcatgtgtactgggaagagttccagaaggaccctgtgggcctgatgagccgggtggcccagcctgccagcaagaagatcgatcagaacaagctgaaacctgagatggacgagaagggcaacctgaccaccgccggctttgcctgctctcagtgtggccagcccctgttcgtgtacaagctggagcaggtgtctgagaagggcaaggcttacaccaactacttcggacggtgcaatgtggccgagcacgaaaagctgatcctgctggcccagctgaagcccgagaaggatagcgacgaagccgtgacatatagcctgggaaagtttgggcagagggccctggatttctacagcattcatgtgaccaaggagtccacccaccccgtgaagcccctggcccagatcgccggaaacagatacgcctccggacctgtgggaaaggccctgagcgacgcatgtatgggcacaatcgcctccttcctgtctaagtaccaggacatcatcatcgaacaccagaaggtggtgaagggcaaccagaagagactggagagcctgcgggagctggccggcaaggaaaacctggaataccctagcgtgaccctgccacctcagcctcacaccaaggagggcgttgatgcctacaacgaagtgatcgcccgggtgcgaatgtgggtgaacctgaacctgtggcagaagctgaagctaagcagagatgatgccaagcctctgctgagactgaagggattcccttcctttcctctggtcgagagacaggccaacgaagtggactggtgggacatggtgtgtaacgtgaagaagctgatcaacgagaaaaaggaggatggcaaggtgttttggcagaatctggctggctacaagagacaggaagccctgagaccatacctgagcagcgaggaagatcggaagaagggaaagaaattcgctcggtaccagctgggcgacctgctgctgcacctggaaaagaagcacggcgaggactggggaaaggtgtacgacgaggcctgggagcggattgacaagaaagtggaaggcctgagcaagcacatcaagctggaagaggaacggagaagcgaggacgcccagagcaaggccgccctgaccgactggctgcgggctaaggccagcttcgtgatcgagggcctgaaggaggccgacaaggacgagttctgcagatgcgagctgaagctgcagaagtggtacggggacctgcggggaaagcccttcgccatcgaagccgagaacagcatcctggacatcagcggcttcagcaagcagtacaactgtgccttcatctggcagaaggacggcgtgaagaagctgaacctgtacctgatcatcaactacttcaagggcggcaagctgcggttcaagaagatcaaacctgaagccttcgaagccaacagattctacaccgtgatcaacaaaaagagcggcgagatcgtgcccatggaggtgaacttcaacttcgacgaccccaacctgatcatcctgcctctggcctttggcaagagacagggcagagaattcatctggaacgacctgctgtccctggaaaccggcagcctgaagctggccaacggaagagtgatcgagaagacactgtacaacagaagaacccggcaggatgagcctgccctgttcgtggccctgaccttcgagcggcgggaggtcctggactcctccaatatcaaaccaatgaacctgatcggcgtggcaagaggcgaaaacatccccgccgtgatcgccctgaccgaccccgagggctgcccactgagccggtttaaggatagcctgggaaacccaacccacatcctgagaatcggcgagagctataaggagaagcagcggaccatccaggccaagaaggaggtggagcagcggagagccggcggctacagccggaagtacgccagcaaagccaagaatctggcagacgatatggtgagaaacaccgctagagatctgctgtactacgccgtgacccaggatgccatgctgatcttcgccaacctgagccggggcttcggccggcagggcaagcggaccttcatggccgagagacagtacacacggatggaggactggctgaccgccaagctggcctacgagggcctgagcaagacctacctgtccaagacactggcccagtacacctccaagacatgcagcaactgtgggtttaccatcaccagcgccgactacgacagggtgctggagaagctgaagaagacagcaacaggctggatgaccacaattaacggcaaggagctgaaggtggagggccagattacctactacaacagatacaagagacagaacgtagtcaaggacctgtccgtcgagctggatagactgagcgaagaatctgtgaacaacgacatctcctcctggacaaagggcagaagcggagaagctctgagcctcctgaagaaaagattctcccatagacccgtgcaggagaagttcgtgtgcctgaactgcggcttcgagacacacgcagccgagcaagccgccctgaacatcgccagatcctggctgttcctgcggagccaggagtacaagaaataccagacaaacaagacaaccggcaacaccgataagagagccttcgtcgagacctggcagtccttttaccggaagaagcttaaggaggtgtggaaacctgccgtgcggtctggcggatctggcggaggctccacaagcatgatgggcctggtgaccttcgaggacgtggccgtggacttcacccaggaggagtggcagtacctgaaccccccccagaggatcctgtacaggggcgtgatgatggagacctacaggaacctggtgttcgtggccggccagcaggccaccaagcccgacctgatcctgaagatggaggtggaggagccctacctggccgaggacaagatccccatctggagctgccccgaggaggcctgccagaccagccccaagaaaaagagaaaagtctaagctgccttctgcggggcttgccttctggccatgcccttcttctctcccttgcacctgtacctcttggtctttgaataaagcctgagtaggaaggctagcaaaaaaaaaaaaaaaaaaaaaaaaaaaaaaaaaaaaaaaaaaaaaaaaaaaaaaaaaaaaaaaaaaaaaaaaaaaaaaaa

SEQ ID NO: 3698 - RNA, 5419 nt, synthetic construct
  source 1..5419: mol_type = other RNA
aggaaataagagagaaaagaagagtaagaagaaatataagagccaccatggcccctaagaagaagcgtaaagtgagccgggtgaacggcagcggcagcggcggcggcatgaaccacgaccaggagttcgacccccctaaggtgtaccctcccgtccccgccgagaagagaaagcccatccgggtcctgagcctgttcgatggcatcgccaccggtctgctggtgctgaaggacctgggcatccaggtggataggtacattgcctccgaggtgtgcgaggactccatcaccgtgggaatggtgcgtcatcagggcaagatcatgtacgtgggcgacgtgcggagcgtgacacagaagcatatccaggagtggggccctttcgacctggtgatcggcggcagcccttgcaatgacctgagcatcgtgaacccagcccggaagggcctgtacgagggaaccggcagactgttcttcgagttttacagactgctgcacgacgcccggcctaaggaaggcgacgaccggcccttcttttggctgttcgagaatgtggtggccatgggagtcagcgacaagcgggatattagccggttcctggagagcaaccccgtgatgatcgatgccaaggaagtgagcgccgcccaccgggccagatacttctggggcaatctgcctggcatgaacagacccctggccagcaccgtgaacgacaagctggagctgcaggagtgcctggagcacggccggatcgccaagttcagcaaggtgagaaccatcaccacccgaagcaacagcatcaaacaaggcaaggaccagcactttcctgtgttcatgaacgagaaggaggacatcctgtggtgtaccgagatggagagagtgttcgggttcccagtccactacacagatgtcagcaacatgtctagactggccagacagagactgctgggaagaagctggtccgtccctgtgatcagacacctgttcgcccctctgaaggagtacttcgcctgcgtgagcagcggcaacagcaacgccaacagccggggccccagcttctctagcggcctggtgccactgtccctgagagggagccacatgggccccatggagatctacaaaaccgtgagcgcctggaagcggcagcctgtgcgcgtgctgagcctgtttcggaatatcgataaagtcctgaaaagcctgggattcctggagagcggctctggctccggcggtggcaccctgaagtacgtggaggatgtgacaaacgtggtcagacgggatgtggagaagtggggccccttcgatctggtgtacggcagcacccaacccctgggcagctcttgtgaccggtgccctggctggtacatgtttcagttccaccggatcctgcagtacgccctgccgagacaggagtcccagcggccattcttttggattttcatggacaacttgctgctgaccgaggatgaccaggaaactaccactcggttcctgcagaccgaagccgtgaccctgcaggacgtgagaggccgggactaccagaacgccatgcgggtgtggtccaacatccctggactgaaaagcaagcacgcacctctgacccctaaagaagaggagtacctgcaggcccaggtgcggagcagaagcaagctggacgcccctaaggtggatctgctggtgaagaattgcctcctgcccctgagagagtacttcaagtatttcagccagaatagtctgcccctgggcggcccaagcagcggcgcccctcctcccagcggcggcagcccagccggctccccaacctctaccgaggagggcacctctgagtccgccacccccgagagcggccctggcacctccaccgagcccagcgagggcagcgcacccggcagccctgccggcagccccacctccacagaggagggaaccagcaccgagcccagcgaaggcagcgccccaggcaccagcaccgagcctagtgagggcggctctggcggcggcagcgcccaggagattaaacggatcaacaagatcagaagaagacttgtgaaagacagcaacaccaagaaggccggcaagacaggccccatgaaaaccctgctggttagagtgatgacacccgatctgagagagcggctggaaaacctgagaaagaagcctgaaaatatcccccagcccatcagcaatacatctagagccaacctgaataagctgctgaccgattacaccgaaatgaagaaggcgatcctgcatgtgtactgggaagagttccagaaggaccctgtgggcctgatgagccgggtggcccagcctgccagcaagaagatcgatcagaacaagctgaaacctgagatggacgagaagggcaacctgaccaccgccggctttgcctgctctcagtgtggccagcccctgttcgtgtacaagctggagcaggtgtctgagaagggcaaggcttacaccaactacttcggacggtgcaatgtggccgagcacgaaaagctgatcctgctggcccagctgaagcccgagaaggatagcgacgaagccgtgacatatagcctgggaaagtttgggcagagggccctggatttctacagcattcatgtgaccaaggagtccacccaccccgtgaagcccctggcccagatcgccggaaacagatacgcctccggacctgtgggaaaggccctgagcgacgcatgtatgggcacaatcgcctccttcctgtctaagtaccaggacatcatcatcgaacaccagaaggtggtgaagggcaaccagaagagactggagagcctgcgggagctggccggcaaggaaaacctggaataccctagcgtgaccctgccacctcagcctcacaccaaggagggcgttgatgcctacaacgaagtgatcgcccgggtgcgaatgtgggtgaacctgaacctgtggcagaagctgaagctaagcagagatgatgccaagcctctgctgagactgaagggattcccttcctttcctctggtcgagagacaggccaacgaagtggactggtgggacatggtgtgtaacgtgaagaagctgatcaacgagaaaaaggaggatggcaaggtgttttggcagaatctggctggctacaagagacaggaagccctgagaccatacctgagcagcgaggaagatcggaagaagggaaagaaattcgctcggtaccagctgggcgacctgctgctgcacctggaaaagaagcacggcgaggactggggaaaggtgtacgacgaggcctgggagcggattgacaagaaagtggaaggcctgagcaagcacatcaagctggaagaggaacggagaagcgaggacgcccagagcaaggccgccctgaccgactggctgcgggctaaggccagcttcgtgatcgagggcctgaaggaggccgacaaggacgagttctgcagatgcgagctgaagctgcagaagtggtacggggacctgcggggaaagcccttcgccatcgaagccgagaacagcatcctggacatcagcggcttcagcaagcagtacaactgtgccttcatctggcagaaggacggcgtgaagaagctgaacctgtacctgatcatcaactacttcaagggcggcaagctgcggttcaagaagatcaaacctgaagccttcgaagccaacagattctacaccgtgatcaacaaaaagagcggcgagatcgtgcccatggaggtgaacttcaacttcgacgaccccaacctgatcatcctgcctctggcctttggcaagagacagggcagagaattcatctggaacgacctgctgtccctggaaaccggcagcctgaagctggccaacggaagagtgatcgagaagacactgtacaacagaagaacccggcaggatgagcctgccctgttcgtggccctgaccttcgagcggcgggaggtcctggactcctccaatatcaaaccaatgaacctgatcggcgtggcaagaggcgaaaacatccccgccgtgatcgccctgaccgaccccgagggctgcccactgagccggtttaaggatagcctgggaaacccaacccacatcctgagaatcggcgagagctataaggagaagcagcggaccatccaggccaagaaggaggtggagcagcggagagccggcggctacagccggaagtacgccagcaaagccaagaatctggcagacgatatggtgagaaacaccgctagagatctgctgtactacgccgtgacccaggatgccatgctgatcttcgccaacctgagccggggcttcggccggcagggcaagcggaccttcatggccgagagacagtacacacggatggaggactggctgaccgccaagctggcctacgagggcctgagcaagacctacctgtccaagacactggcccagtacacctccaagacatgcagcaactgtgggtttaccatcaccagcgccgactacgacagggtgctggagaagctgaagaagacagcaacaggctggatgaccacaattaacggcaaggagctgaaggtggagggccagattacctactacaacagatacaagagacagaacgtagtcaaggacctgtccgtcgagctggatagactgagcgaagaatctgtgaacaacgacatctcctcctggacaaagggcagaagcggagaagctctgagcctcctgaagaaaagattctcccatagacccgtgcaggagaagttcgtgtgcctgaactgcggcttcgagacacacgcagccgagcaagccgccctgaacatcgccagatcctggctgttcctgcggagccaggagtacaagaaataccagacaaacaagacaaccggcaacaccgataagagagccttcgtcgagacctggcagtccttttaccggaagaagcttaaggaggtgtggaaacctgccgtgcggtctggcggatctggcggaggctccacaagcagccaggagcccgtgaccttcgaggacgtggccgtgtacttcacccagaaccagtgggccaacctggacttcacccagagggccctgtacagggaggtgatgctggagaactacgccaacgtggccagcctggccttccccttccccaagcccgacctggtgagccagctggagaggggcgaggccccctggggccccgacccctgggaggccgaggtgctgaggggcgtgtgccccggcggcaccagccccaagaaaaagagaaaagtctaagctgccttctgcggggcttgccttctggccatgcccttcttctctcccttgcacctgtacctcttggtctttgaataaagcctgagtaggaaggctagcaaaaaaaaaaaaaaaaaaaaaaaaaaaaaaaaaaaaaaaaaaaaaaaaaaaaaaaaaaaaaaaaaaaaaaaaaaaaaaaa

SEQ ID NO: 3699 - RNA, 5419 nt, synthetic construct
  source 1..5419: mol_type = other RNA
aggaaataagagagaaaagaagagtaagaagaaatataagagccaccatggcccctaagaagaagcgtaaagtgagccgggtgaacggcagcggcagcggcggcggcatgaaccacgaccaggagttcgacccccctaaggtgtaccctcccgtccccgccgagaagagaaagcccatccgggtcctgagcctgttcgatggcatcgccaccggtctgctggtgctgaaggacctgggcatccaggtggataggtacattgcctccgaggtgtgcgaggactccatcaccgtgggaatggtgcgtcatcagggcaagatcatgtacgtgggcgacgtgcggagcgtgacacagaagcatatccaggagtggggccctttcgacctggtgatcggcggcagcccttgcaatgacctgagcatcgtgaacccagcccggaagggcctgtacgagggaaccggcagactgttcttcgagttttacagactgctgcacgacgcccggcctaaggaaggcgacgaccggcccttcttttggctgttcgagaatgtggtggccatgggagtcagcgacaagcgggatattagccggttcctggagagcaaccccgtgatgatcgatgccaaggaagtgagcgccgcccaccgggccagatacttctggggcaatctgcctggcatgaacagacccctggccagcaccgtgaacgacaagctggagctgcaggagtgcctggagcacggccggatcgccaagttcagcaaggtgagaaccatcaccacccgaagcaacagcatcaaacaaggcaaggaccagcactttcctgtgttcatgaacgagaaggaggacatcctgtggtgtaccgagatggagagagtgttcgggttcccagtccactacacagatgtcagcaacatgtctagactggccagacagagactgctgggaagaagctggtccgtccctgtgatcagacacctgttcgcccctctgaaggagtacttcgcctgcgtgagcagcggcaacagcaacgccaacagccggggccccagcttctctagcggcctggtgccactgtccctgagagggagccacatgggccccatggagatctacaaaaccgtgagcgcctggaagcggcagcctgtgcgcgtgctgagcctgtttcggaatatcgataaagtcctgaaaagcctgggattcctggagagcggctctggctccggcggtggcaccctgaagtacgtggaggatgtgacaaacgtggtcagacgggatgtggagaagtggggccccttcgatctggtgtacggcagcacccaacccctgggcagctcttgtgaccggtgccctggctggtacatgtttcagttccaccggatcctgcagtacgccctgccgagacaggagtcccagcggccattcttttggattttcatggacaacttgctgctgaccgaggatgaccaggaaactaccactcggttcctgcagaccgaagccgtgaccctgcaggacgtgagaggccgggactaccagaacgccatgcgggtgtggtccaacatccctggactgaaaagcaagcacgcacctctgacccctaaagaagaggagtacctgcaggcccaggtgcggagcagaagcaagctggacgcccctaaggtggatctgctggtgaagaattgcctcctgcccctgagagagtacttcaagtatttcagccagaatagtctgcccctgggcggcccaagcagcggcgcccctcctcccagcggcggcagcccagccggctccccaacctctaccgaggagggcacctctgagtccgccacccccgagagcggccctggcacctccaccgagcccagcgagggcagcgcacccggcagccctgccggcagccccacctccacagaggagggaaccagcaccgagcccagcgaaggcagcgccccaggcaccagcaccgagcctagtgagggcggctctggcggcggcagcgcccaggagattaaacggatcaacaagatcagaagaagacttgtgaaagacagcaacaccaagaaggccggcaagacaggccccatgaaaaccctgctggttagagtgatgacacccgatctgagagagcggctggaaaacctgagaaagaagcctgaaaatatcccccagcccatcagcaatacatctagagccaacctgaataagctgctgaccgattacaccgaaatgaagaaggcgatcctgcatgtgtactgggaagagttccagaaggaccctgtgggcctgatgagccgggtggcccagcctgccagcaagaagatcgatcagaacaagctgaaacctgagatggacgagaagggcaacctgaccaccgccggctttgcctgctctcagtgtggccagcccctgttcgtgtacaagctggagcaggtgtctgagaagggcaaggcttacaccaactacttcggacggtgcaatgtggccgagcacgaaaagctgatcctgctggcccagctgaagcccgagaaggatagcgacgaagccgtgacatatagcctgggaaagtttgggcagagggccctggatttctacagcattcatgtgaccaaggagtccacccaccccgtgaagcccctggcccagatcgccggaaacagatacgcctccggacctgtgggaaaggccctgagcgacgcatgtatgggcacaatcgcctccttcctgtctaagtaccaggacatcatcatcgaacaccagaaggtggtgaagggcaaccagaagagactggagagcctgcgggagctggccggcaaggaaaacctggaataccctagcgtgaccctgccacctcagcctcacaccaaggagggcgttgatgcctacaacgaagtgatcgcccgggtgcgaatgtgggtgaacctgaacctgtggcagaagctgaagctaagcagagatgatgccaagcctctgctgagactgaagggattcccttcctttcctctggtcgagagacaggccaacgaagtggactggtgggacatggtgtgtaacgtgaagaagctgatcaacgagaaaaaggaggatggcaaggtgttttggcagaatctggctggctacaagagacaggaagccctgagaccatacctgagcagcgaggaagatcggaagaagggaaagaaattcgctcggtaccagctgggcgacctgctgctgcacctggaaaagaagcacggcgaggactggggaaaggtgtacgacgaggcctgggagcggattgacaagaaagtggaaggcctgagcaagcacatcaagctggaagaggaacggagaagcgaggacgcccagagcaaggccgccctgaccgactggctgcgggctaaggccagcttcgtgatcgagggcctgaaggaggccgacaaggacgagttctgcagatgcgagctgaagctgcagaagtggtacggggacctgcggggaaagcccttcgccatcgaagccgagaacagcatcctggacatcagcggcttcagcaagcagtacaactgtgccttcatctggcagaaggacggcgtgaagaagctgaacctgtacctgatcatcaactacttcaagggcggcaagctgcggttcaagaagatcaaacctgaagccttcgaagccaacagattctacaccgtgatcaacaaaaagagcggcgagatcgtgcccatggaggtgaacttcaacttcgacgaccccaacctgatcatcctgcctctggcctttggcaagagacagggcagagaattcatctggaacgacctgctgtccctggaaaccggcagcctgaagctggccaacggaagagtgatcgagaagacactgtacaacagaagaacccggcaggatgagcctgccctgttcgtggccctgaccttcgagcggcgggaggtcctggactcctccaatatcaaaccaatgaacctgatcggcgtggcaagaggcgaaaacatccccgccgtgatcgccctgaccgaccccgagggctgcccactgagccggtttaaggatagcctgggaaacccaacccacatcctgagaatcggcgagagctataaggagaagcagcggaccatccaggccaagaaggaggtggagcagcggagagccggcggctacagccggaagtacgccagcaaagccaagaatctggcagacgatatggtgagaaacaccgctagagatctgctgtactacgccgtgacccaggatgccatgctgatcttcgccaacctgagccggggcttcggccggcagggcaagcggaccttcatggccgagagacagtacacacggatggaggactggctgaccgccaagctggcctacgagggcctgagcaagacctacctgtccaagacactggcccagtacacctccaagacatgcagcaactgtgggtttaccatcaccagcgccgactacgacagggtgctggagaagctgaagaagacagcaacaggctggatgaccacaattaacggcaaggagctgaaggtggagggccagattacctactacaacagatacaagagacagaacgtagtcaaggacctgtccgtcgagctggatagactgagcgaagaatctgtgaacaacgacatctcctcctggacaaagggcagaagcggagaagctctgagcctcctgaagaaaagattctcccatagacccgtgcaggagaagttcgtgtgcctgaactgcggcttcgagacacacgcagccgagcaagccgccctgaacatcgccagatcctggctgttcctgcggagccaggagtacaagaaataccagacaaacaagacaaccggcaacaccgataagagagccttcgtcgagacctggcagtccttttaccggaagaagcttaaggaggtgtggaaacctgccgtgcggtctggcggatctggcggaggctccacaagcatggccgccgccgccgccctgagggcccacgcccagagcagcgtgaccttcgaggacgtggccgtgaacttcagcatggaggagtggagcctgctgaacgaggcccagaggtgcctgtacagggacgtgatgctggagaccctgaccctgatcagcagcctgggctgctggcacggcggcgaggacgaggccgcccccagcaagcagagcacctgcatctacatctacaaggagcagggcggcaccagccccaagaaaaagagaaaagtctaagctgccttctgcggggcttgccttctggccatgcccttcttctctcccttgcacctgtacctcttggtctttgaataaagcctgagtaggaaggctagcaaaaaaaaaaaaaaaaaaaaaaaaaaaaaaaaaaaaaaaaaaaaaaaaaaaaaaaaaaaaaaaaaaaaaaaaaaaaaaaa

SEQ ID NO: 3700 - RNA, 5419 nt, synthetic construct
  source 1..5419: mol_type = other RNA
aggaaataagagagaaaagaagagtaagaagaaatataagagccaccatggcccctaagaagaagcgtaaagtgagccgggtgaacggcagcggcagcggcggcggcatgaaccacgaccaggagttcgacccccctaaggtgtaccctcccgtccccgccgagaagagaaagcccatccgggtcctgagcctgttcgatggcatcgccaccggtctgctggtgctgaaggacctgggcatccaggtggataggtacattgcctccgaggtgtgcgaggactccatcaccgtgggaatggtgcgtcatcagggcaagatcatgtacgtgggcgacgtgcggagcgtgacacagaagcatatccaggagtggggccctttcgacctggtgatcggcggcagcccttgcaatgacctgagcatcgtgaacccagcccggaagggcctgtacgagggaaccggcagactgttcttcgagttttacagactgctgcacgacgcccggcctaaggaaggcgacgaccggcccttcttttggctgttcgagaatgtggtggccatgggagtcagcgacaagcgggatattagccggttcctggagagcaaccccgtgatgatcgatgccaaggaagtgagcgccgcccaccgggccagatacttctggggcaatctgcctggcatgaacagacccctggccagcaccgtgaacgacaagctggagctgcaggagtgcctggagcacggccggatcgccaagttcagcaaggtgagaaccatcaccacccgaagcaacagcatcaaacaaggcaaggaccagcactttcctgtgttcatgaacgagaaggaggacatcctgtggtgtaccgagatggagagagtgttcgggttcccagtccactacacagatgtcagcaacatgtctagactggccagacagagactgctgggaagaagctggtccgtccctgtgatcagacacctgttcgcccctctgaaggagtacttcgcctgcgtgagcagcggcaacagcaacgccaacagccggggccccagcttctctagcggcctggtgccactgtccctgagagggagccacatgggccccatggagatctacaaaaccgtgagcgcctggaagcggcagcctgtgcgcgtgctgagcctgtttcggaatatcgataaagtcctgaaaagcctgggattcctggagagcggctctggctccggcggtggcaccctgaagtacgtggaggatgtgacaaacgtggtcagacgggatgtggagaagtggggccccttcgatctggtgtacggcagcacccaacccctgggcagctcttgtgaccggtgccctggctggtacatgtttcagttccaccggatcctgcagtacgccctgccgagacaggagtcccagcggccattcttttggattttcatggacaacttgctgctgaccgaggatgaccaggaaactaccactcggttcctgcagaccgaagccgtgaccctgcaggacgtgagaggccgggactaccagaacgccatgcgggtgtggtccaacatccctggactgaaaagcaagcacgcacctctgacccctaaagaagaggagtacctgcaggcccaggtgcggagcagaagcaagctggacgcccctaaggtggatctgctggtgaagaattgcctcctgcccctgagagagtacttcaagtatttcagccagaatagtctgcccctgggcggcccaagcagcggcgcccctcctcccagcggcggcagcccagccggctccccaacctctaccgaggagggcacctctgagtccgccacccccgagagcggccctggcacctccaccgagcccagcgagggcagcgcacccggcagccctgccggcagccccacctccacagaggagggaaccagcaccgagcccagcgaaggcagcgccccaggcaccagcaccgagcctagtgagggcggctctggcggcggcagcgcccaggagattaaacggatcaacaagatcagaagaagacttgtgaaagacagcaacaccaagaaggccggcaagacaggccccatgaaaaccctgctggttagagtgatgacacccgatctgagagagcggctggaaaacctgagaaagaagcctgaaaatatcccccagcccatcagcaatacatctagagccaacctgaataagctgctgaccgattacaccgaaatgaagaaggcgatcctgcatgtgtactgggaagagttccagaaggaccctgtgggcctgatgagccgggtggcccagcctgccagcaagaagatcgatcagaacaagctgaaacctgagatggacgagaagggcaacctgaccaccgccggctttgcctgctctcagtgtggccagcccctgttcgtgtacaagctggagcaggtgtctgagaagggcaaggcttacaccaactacttcggacggtgcaatgtggccgagcacgaaaagctgatcctgctggcccagctgaagcccgagaaggatagcgacgaagccgtgacatatagcctgggaaagtttgggcagagggccctggatttctacagcattcatgtgaccaaggagtccacccaccccgtgaagcccctggcccagatcgccggaaacagatacgcctccggacctgtgggaaaggccctgagcgacgcatgtatgggcacaatcgcctccttcctgtctaagtaccaggacatcatcatcgaacaccagaaggtggtgaagggcaaccagaagagactggagagcctgcgggagctggccggcaaggaaaacctggaataccctagcgtgaccctgccacctcagcctcacaccaaggagggcgttgatgcctacaacgaagtgatcgcccgggtgcgaatgtgggtgaacctgaacctgtggcagaagctgaagctaagcagagatgatgccaagcctctgctgagactgaagggattcccttcctttcctctggtcgagagacaggccaacgaagtggactggtgggacatggtgtgtaacgtgaagaagctgatcaacgagaaaaaggaggatggcaaggtgttttggcagaatctggctggctacaagagacaggaagccctgagaccatacctgagcagcgaggaagatcggaagaagggaaagaaattcgctcggtaccagctgggcgacctgctgctgcacctggaaaagaagcacggcgaggactggggaaaggtgtacgacgaggcctgggagcggattgacaagaaagtggaaggcctgagcaagcacatcaagctggaagaggaacggagaagcgaggacgcccagagcaaggccgccctgaccgactggctgcgggctaaggccagcttcgtgatcgagggcctgaaggaggccgacaaggacgagttctgcagatgcgagctgaagctgcagaagtggtacggggacctgcggggaaagcccttcgccatcgaagccgagaacagcatcctggacatcagcggcttcagcaagcagtacaactgtgccttcatctggcagaaggacggcgtgaagaagctgaacctgtacctgatcatcaactacttcaagggcggcaagctgcggttcaagaagatcaaacctgaagccttcgaagccaacagattctacaccgtgatcaacaaaaagagcggcgagatcgtgcccatggaggtgaacttcaacttcgacgaccccaacctgatcatcctgcctctggcctttggcaagagacagggcagagaattcatctggaacgacctgctgtccctggaaaccggcagcctgaagctggccaacggaagagtgatcgagaagacactgtacaacagaagaacccggcaggatgagcctgccctgttcgtggccctgaccttcgagcggcgggaggtcctggactcctccaatatcaaaccaatgaacctgatcggcgtggcaagaggcgaaaacatccccgccgtgatcgccctgaccgaccccgagggctgcccactgagccggtttaaggatagcctgggaaacccaacccacatcctgagaatcggcgagagctataaggagaagcagcggaccatccaggccaagaaggaggtggagcagcggagagccggcggctacagccggaagtacgccagcaaagccaagaatctggcagacgatatggtgagaaacaccgctagagatctgctgtactacgccgtgacccaggatgccatgctgatcttcgccaacctgagccggggcttcggccggcagggcaagcggaccttcatggccgagagacagtacacacggatggaggactggctgaccgccaagctggcctacgagggcctgagcaagacctacctgtccaagacactggcccagtacacctccaagacatgcagcaactgtgggtttaccatcaccagcgccgactacgacagggtgctggagaagctgaagaagacagcaacaggctggatgaccacaattaacggcaaggagctgaaggtggagggccagattacctactacaacagatacaagagacagaacgtagtcaaggacctgtccgtcgagctggatagactgagcgaagaatctgtgaacaacgacatctcctcctggacaaagggcagaagcggagaagctctgagcctcctgaagaaaagattctcccatagacccgtgcaggagaagttcgtgtgcctgaactgcggcttcgagacacacgcagccgagcaagccgccctgaacatcgccagatcctggctgttcctgcggagccaggagtacaagaaataccagacaaacaagacaaccggcaacaccgataagagagccttcgtcgagacctggcagtccttttaccggaagaagcttaaggaggtgtggaaacctgccgtgcggtctggcggatctggcggaggctccacaagcgccgacatcaccctgatgagccaggcccaggacagcaggagcatcctgttccaggagagcgtgaccttcgaggacgtggccgtgaacttcaccaacagggagtggcagtgcctgacctacgcccagaggcacctgtacaaggacgtgatgctggagaactacggcaacatggtgagcctgggcttccccttccccaagccccccctgatcagccacctggagagggaggtggacccctgcgtgaccagccccaagaaaaagagaaaagtctaagctgccttctgcggggcttgccttctggccatgcccttcttctctcccttgcacctgtacctcttggtctttgaataaagcctgagtaggaaggctagcaaaaaaaaaaaaaaaaaaaaaaaaaaaaaaaaaaaaaaaaaaaaaaaaaaaaaaaaaaaaaaaaaaaaaaaaaaaaaaaa

SEQ ID NO: 3701 - RNA, 5419 nt, synthetic construct
  source 1..5419: mol_type = other RNA
aggaaataagagagaaaagaagagtaagaagaaatataagagccaccatggcccctaagaagaagcgtaaagtgagccgggtgaacggcagcggcagcggcggcggcatgaaccacgaccaggagttcgacccccctaaggtgtaccctcccgtccccgccgagaagagaaagcccatccgggtcctgagcctgttcgatggcatcgccaccggtctgctggtgctgaaggacctgggcatccaggtggataggtacattgcctccgaggtgtgcgaggactccatcaccgtgggaatggtgcgtcatcagggcaagatcatgtacgtgggcgacgtgcggagcgtgacacagaagcatatccaggagtggggccctttcgacctggtgatcggcggcagcccttgcaatgacctgagcatcgtgaacccagcccggaagggcctgtacgagggaaccggcagactgttcttcgagttttacagactgctgcacgacgcccggcctaaggaaggcgacgaccggcccttcttttggctgttcgagaatgtggtggccatgggagtcagcgacaagcgggatattagccggttcctggagagcaaccccgtgatgatcgatgccaaggaagtgagcgccgcccaccgggccagatacttctggggcaatctgcctggcatgaacagacccctggccagcaccgtgaacgacaagctggagctgcaggagtgcctggagcacggccggatcgccaagttcagcaaggtgagaaccatcaccacccgaagcaacagcatcaaacaaggcaaggaccagcactttcctgtgttcatgaacgagaaggaggacatcctgtggtgtaccgagatggagagagtgttcgggttcccagtccactacacagatgtcagcaacatgtctagactggccagacagagactgctgggaagaagctggtccgtccctgtgatcagacacctgttcgcccctctgaaggagtacttcgcctgcgtgagcagcggcaacagcaacgccaacagccggggccccagcttctctagcggcctggtgccactgtccctgagagggagccacatgggccccatggagatctacaaaaccgtgagcgcctggaagcggcagcctgtgcgcgtgctgagcctgtttcggaatatcgataaagtcctgaaaagcctgggattcctggagagcggctctggctccggcggtggcaccctgaagtacgtggaggatgtgacaaacgtggtcagacgggatgtggagaagtggggccccttcgatctggtgtacggcagcacccaacccctgggcagctcttgtgaccggtgccctggctggtacatgtttcagttccaccggatcctgcagtacgccctgccgagacaggagtcccagcggccattcttttggattttcatggacaacttgctgctgaccgaggatgaccaggaaactaccactcggttcctgcagaccgaagccgtgaccctgcaggacgtgagaggccgggactaccagaacgccatgcgggtgtggtccaacatccctggactgaaaagcaagcacgcacctctgacccctaaagaagaggagtacctgcaggcccaggtgcggagcagaagcaagctggacgcccctaaggtggatctgctggtgaagaattgcctcctgcccctgagagagtacttcaagtatttcagccagaatagtctgcccctgggcggcccaagcagcggcgcccctcctcccagcggcggcagcccagccggctccccaacctctaccgaggagggcacctctgagtccgccacccccgagagcggccctggcacctccaccgagcccagcgagggcagcgcacccggcagccctgccggcagccccacctccacagaggagggaaccagcaccgagcccagcgaaggcagcgccccaggcaccagcaccgagcctagtgagggcggctctggcggcggcagcgcccaggagattaaacggatcaacaagatcagaagaagacttgtgaaagacagcaacaccaagaaggccggcaagacaggccccatgaaaaccctgctggttagagtgatgacacccgatctgagagagcggctggaaaacctgagaaagaagcctgaaaatatcccccagcccatcagcaatacatctagagccaacctgaataagctgctgaccgattacaccgaaatgaagaaggcgatcctgcatgtgtactgggaagagttccagaaggaccctgtgggcctgatgagccgggtggcccagcctgccagcaagaagatcgatcagaacaagctgaaacctgagatggacgagaagggcaacctgaccaccgccggctttgcctgctctcagtgtggccagcccctgttcgtgtacaagctggagcaggtgtctgagaagggcaaggcttacaccaactacttcggacggtgcaatgtggccgagcacgaaaagctgatcctgctggcccagctgaagcccgagaaggatagcgacgaagccgtgacatatagcctgggaaagtttgggcagagggccctggatttctacagcattcatgtgaccaaggagtccacccaccccgtgaagcccctggcccagatcgccggaaacagatacgcctccggacctgtgggaaaggccctgagcgacgcatgtatgggcacaatcgcctccttcctgtctaagtaccaggacatcatcatcgaacaccagaaggtggtgaagggcaaccagaagagactggagagcctgcgggagctggccggcaaggaaaacctggaataccctagcgtgaccctgccacctcagcctcacaccaaggagggcgttgatgcctacaacgaagtgatcgcccgggtgcgaatgtgggtgaacctgaacctgtggcagaagctgaagctaagcagagatgatgccaagcctctgctgagactgaagggattcccttcctttcctctggtcgagagacaggccaacgaagtggactggtgggacatggtgtgtaacgtgaagaagctgatcaacgagaaaaaggaggatggcaaggtgttttggcagaatctggctggctacaagagacaggaagccctgagaccatacctgagcagcgaggaagatcggaagaagggaaagaaattcgctcggtaccagctgggcgacctgctgctgcacctggaaaagaagcacggcgaggactggggaaaggtgtacgacgaggcctgggagcggattgacaagaaagtggaaggcctgagcaagcacatcaagctggaagaggaacggagaagcgaggacgcccagagcaaggccgccctgaccgactggctgcgggctaaggccagcttcgtgatcgagggcctgaaggaggccgacaaggacgagttctgcagatgcgagctgaagctgcagaagtggtacggggacctgcggggaaagcccttcgccatcgaagccgagaacagcatcctggacatcagcggcttcagcaagcagtacaactgtgccttcatctggcagaaggacggcgtgaagaagctgaacctgtacctgatcatcaactacttcaagggcggcaagctgcggttcaagaagatcaaacctgaagccttcgaagccaacagattctacaccgtgatcaacaaaaagagcggcgagatcgtgcccatggaggtgaacttcaacttcgacgaccccaacctgatcatcctgcctctggcctttggcaagagacagggcagagaattcatctggaacgacctgctgtccctggaaaccggcagcctgaagctggccaacggaagagtgatcgagaagacactgtacaacagaagaacccggcaggatgagcctgccctgttcgtggccctgaccttcgagcggcgggaggtcctggactcctccaatatcaaaccaatgaacctgatcggcgtggcaagaggcgaaaacatccccgccgtgatcgccctgaccgaccccgagggctgcccactgagccggtttaaggatagcctgggaaacccaacccacatcctgagaatcggcgagagctataaggagaagcagcggaccatccaggccaagaaggaggtggagcagcggagagccggcggctacagccggaagtacgccagcaaagccaagaatctggcagacgatatggtgagaaacaccgctagagatctgctgtactacgccgtgacccaggatgccatgctgatcttcgccaacctgagccggggcttcggccggcagggcaagcggaccttcatggccgagagacagtacacacggatggaggactggctgaccgccaagctggcctacgagggcctgagcaagacctacctgtccaagacactggcccagtacacctccaagacatgcagcaactgtgggtttaccatcaccagcgccgactacgacagggtgctggagaagctgaagaagacagcaacaggctggatgaccacaattaacggcaaggagctgaaggtggagggccagattacctactacaacagatacaagagacagaacgtagtcaaggacctgtccgtcgagctggatagactgagcgaagaatctgtgaacaacgacatctcctcctggacaaagggcagaagcggagaagctctgagcctcctgaagaaaagattctcccatagacccgtgcaggagaagttcgtgtgcctgaactgcggcttcgagacacacgcagccgagcaagccgccctgaacatcgccagatcctggctgttcctgcggagccaggagtacaagaaataccagacaaacaagacaaccggcaacaccgataagagagccttcgtcgagacctggcagtccttttaccggaagaagcttaaggaggtgtggaaacctgccgtgcggtctggcggatctggcggaggctccacaagcgtgttcgacgccgtgaccttcaccgacgtggccgtggacttcagccaggacgagtgggagaggctgaccctggcccagaggaccctgtacaagaaggtgatgctggagaactacagcaacctggccagcctgggcctgtgcatcagcaagcccgacgtgatcagcagcctggagcaggacaaggagccctggaccatgaagggcgagctgaccaggggcccctgcgccgacctggagtacgtgaccagccccaagaaaaagagaaaagtctaagctgccttctgcggggcttgccttctggccatgcccttcttctctcccttgcacctgtacctcttggtctttgaataaagcctgagtaggaaggctagcaaaaaaaaaaaaaaaaaaaaaaaaaaaaaaaaaaaaaaaaaaaaaaaaaaaaaaaaaaaaaaaaaaaaaaaaaaaaaaaa

SEQ ID NO: 3702 - RNA, 5419 nt, synthetic construct
  source 1..5419: mol_type = other RNA
aggaaataagagagaaaagaagagtaagaagaaatataagagccaccatggcccctaagaagaagcgtaaagtgagccgggtgaacggcagcggcagcggcggcggcatgaaccacgaccaggagttcgacccccctaaggtgtaccctcccgtccccgccgagaagagaaagcccatccgggtcctgagcctgttcgatggcatcgccaccggtctgctggtgctgaaggacctgggcatccaggtggataggtacattgcctccgaggtgtgcgaggactccatcaccgtgggaatggtgcgtcatcagggcaagatcatgtacgtgggcgacgtgcggagcgtgacacagaagcatatccaggagtggggccctttcgacctggtgatcggcggcagcccttgcaatgacctgagcatcgtgaacccagcccggaagggcctgtacgagggaaccggcagactgttcttcgagttttacagactgctgcacgacgcccggcctaaggaaggcgacgaccggcccttcttttggctgttcgagaatgtggtggccatgggagtcagcgacaagcgggatattagccggttcctggagagcaaccccgtgatgatcgatgccaaggaagtgagcgccgcccaccgggccagatacttctggggcaatctgcctggcatgaacagacccctggccagcaccgtgaacgacaagctggagctgcaggagtgcctggagcacggccggatcgccaagttcagcaaggtgagaaccatcaccacccgaagcaacagcatcaaacaaggcaaggaccagcactttcctgtgttcatgaacgagaaggaggacatcctgtggtgtaccgagatggagagagtgttcgggttcccagtccactacacagatgtcagcaacatgtctagactggccagacagagactgctgggaagaagctggtccgtccctgtgatcagacacctgttcgcccctctgaaggagtacttcgcctgcgtgagcagcggcaacagcaacgccaacagccggggccccagcttctctagcggcctggtgccactgtccctgagagggagccacatgggccccatggagatctacaaaaccgtgagcgcctggaagcggcagcctgtgcgcgtgctgagcctgtttcggaatatcgataaagtcctgaaaagcctgggattcctggagagcggctctggctccggcggtggcaccctgaagtacgtggaggatgtgacaaacgtggtcagacgggatgtggagaagtggggccccttcgatctggtgtacggcagcacccaacccctgggcagctcttgtgaccggtgccctggctggtacatgtttcagttccaccggatcctgcagtacgccctgccgagacaggagtcccagcggccattcttttggattttcatggacaacttgctgctgaccgaggatgaccaggaaactaccactcggttcctgcagaccgaagccgtgaccctgcaggacgtgagaggccgggactaccagaacgccatgcgggtgtggtccaacatccctggactgaaaagcaagcacgcacctctgacccctaaagaagaggagtacctgcaggcccaggtgcggagcagaagcaagctggacgcccctaaggtggatctgctggtgaagaattgcctcctgcccctgagagagtacttcaagtatttcagccagaatagtctgcccctgggcggcccaagcagcggcgcccctcctcccagcggcggcagcccagccggctccccaacctctaccgaggagggcacctctgagtccgccacccccgagagcggccctggcacctccaccgagcccagcgagggcagcgcacccggcagccctgccggcagccccacctccacagaggagggaaccagcaccgagcccagcgaaggcagcgccccaggcaccagcaccgagcctagtgagggcggctctggcggcggcagcgcccaggagattaaacggatcaacaagatcagaagaagacttgtgaaagacagcaacaccaagaaggccggcaagacaggccccatgaaaaccctgctggttagagtgatgacacccgatctgagagagcggctggaaaacctgagaaagaagcctgaaaatatcccccagcccatcagcaatacatctagagccaacctgaataagctgctgaccgattacaccgaaatgaagaaggcgatcctgcatgtgtactgggaagagttccagaaggaccctgtgggcctgatgagccgggtggcccagcctgccagcaagaagatcgatcagaacaagctgaaacctgagatggacgagaagggcaacctgaccaccgccggctttgcctgctctcagtgtggccagcccctgttcgtgtacaagctggagcaggtgtctgagaagggcaaggcttacaccaactacttcggacggtgcaatgtggccgagcacgaaaagctgatcctgctggcccagctgaagcccgagaaggatagcgacgaagccgtgacatatagcctgggaaagtttgggcagagggccctggatttctacagcattcatgtgaccaaggagtccacccaccccgtgaagcccctggcccagatcgccggaaacagatacgcctccggacctgtgggaaaggccctgagcgacgcatgtatgggcacaatcgcctccttcctgtctaagtaccaggacatcatcatcgaacaccagaaggtggtgaagggcaaccagaagagactggagagcctgcgggagctggccggcaaggaaaacctggaataccctagcgtgaccctgccacctcagcctcacaccaaggagggcgttgatgcctacaacgaagtgatcgcccgggtgcgaatgtgggtgaacctgaacctgtggcagaagctgaagctaagcagagatgatgccaagcctctgctgagactgaagggattcccttcctttcctctggtcgagagacaggccaacgaagtggactggtgggacatggtgtgtaacgtgaagaagctgatcaacgagaaaaaggaggatggcaaggtgttttggcagaatctggctggctacaagagacaggaagccctgagaccatacctgagcagcgaggaagatcggaagaagggaaagaaattcgctcggtaccagctgggcgacctgctgctgcacctggaaaagaagcacggcgaggactggggaaaggtgtacgacgaggcctgggagcggattgacaagaaagtggaaggcctgagcaagcacatcaagctggaagaggaacggagaagcgaggacgcccagagcaaggccgccctgaccgactggctgcgggctaaggccagcttcgtgatcgagggcctgaaggaggccgacaaggacgagttctgcagatgcgagctgaagctgcagaagtggtacggggacctgcggggaaagcccttcgccatcgaagccgagaacagcatcctggacatcagcggcttcagcaagcagtacaactgtgccttcatctggcagaaggacggcgtgaagaagctgaacctgtacctgatcatcaactacttcaagggcggcaagctgcggttcaagaagatcaaacctgaagccttcgaagccaacagattctacaccgtgatcaacaaaaagagcggcgagatcgtgcccatggaggtgaacttcaacttcgacgaccccaacctgatcatcctgcctctggcctttggcaagagacagggcagagaattcatctggaacgacctgctgtccctggaaaccggcagcctgaagctggccaacggaagagtgatcgagaagacactgtacaacagaagaacccggcaggatgagcctgccctgttcgtggccctgaccttcgagcggcgggaggtcctggactcctccaatatcaaaccaatgaacctgatcggcgtggcaagaggcgaaaacatccccgccgtgatcgccctgaccgaccccgagggctgcccactgagccggtttaaggatagcctgggaaacccaacccacatcctgagaatcggcgagagctataaggagaagcagcggaccatccaggccaagaaggaggtggagcagcggagagccggcggctacagccggaagtacgccagcaaagccaagaatctggcagacgatatggtgagaaacaccgctagagatctgctgtactacgccgtgacccaggatgccatgctgatcttcgccaacctgagccggggcttcggccggcagggcaagcggaccttcatggccgagagacagtacacacggatggaggactggctgaccgccaagctggcctacgagggcctgagcaagacctacctgtccaagacactggcccagtacacctccaagacatgcagcaactgtgggtttaccatcaccagcgccgactacgacagggtgctggagaagctgaagaagacagcaacaggctggatgaccacaattaacggcaaggagctgaaggtggagggccagattacctactacaacagatacaagagacagaacgtagtcaaggacctgtccgtcgagctggatagactgagcgaagaatctgtgaacaacgacatctcctcctggacaaagggcagaagcggagaagctctgagcctcctgaagaaaagattctcccatagacccgtgcaggagaagttcgtgtgcctgaactgcggcttcgagacacacgcagccgagcaagccgccctgaacatcgccagatcctggctgttcctgcggagccaggagtacaagaaataccagacaaacaagacaaccggcaacaccgataagagagccttcgtcgagacctggcagtccttttaccggaagaagcttaaggaggtgtggaaacctgccgtgcggtctggcggatctggcggaggctccacaagcaggcaggagcccgtgaccttcgaggacgtggccgtgtacttcacccagaacgagtgggccagcctggacagcgtgcagagggccctgtacagggaggtgatgctggagaactacgccaacgtggccagcctggccttccccttcatcacccccgtgctggtgagccagctggagcagggcgagctgccctggggcctggacccctgggagcccatgggcagggaggccctgaggggcatctgcaccagccccaagaaaaagagaaaagtctaagctgccttctgcggggcttgccttctggccatgcccttcttctctcccttgcacctgtacctcttggtctttgaataaagcctgagtaggaaggctagcaaaaaaaaaaaaaaaaaaaaaaaaaaaaaaaaaaaaaaaaaaaaaaaaaaaaaaaaaaaaaaaaaaaaaaaaaaaaaaaa

SEQ ID NO: 3703 - RNA, 5419 nt, synthetic construct
  source 1..5419: mol_type = other RNA
aggaaataagagagaaaagaagagtaagaagaaatataagagccaccatggcccctaagaagaagcgtaaagtgagccgggtgaacggcagcggcagcggcggcggcatgaaccacgaccaggagttcgacccccctaaggtgtaccctcccgtccccgccgagaagagaaagcccatccgggtcctgagcctgttcgatggcatcgccaccggtctgctggtgctgaaggacctgggcatccaggtggataggtacattgcctccgaggtgtgcgaggactccatcaccgtgggaatggtgcgtcatcagggcaagatcatgtacgtgggcgacgtgcggagcgtgacacagaagcatatccaggagtggggccctttcgacctggtgatcggcggcagcccttgcaatgacctgagcatcgtgaacccagcccggaagggcctgtacgagggaaccggcagactgttcttcgagttttacagactgctgcacgacgcccggcctaaggaaggcgacgaccggcccttcttttggctgttcgagaatgtggtggccatgggagtcagcgacaagcgggatattagccggttcctggagagcaaccccgtgatgatcgatgccaaggaagtgagcgccgcccaccgggccagatacttctggggcaatctgcctggcatgaacagacccctggccagcaccgtgaacgacaagctggagctgcaggagtgcctggagcacggccggatcgccaagttcagcaaggtgagaaccatcaccacccgaagcaacagcatcaaacaaggcaaggaccagcactttcctgtgttcatgaacgagaaggaggacatcctgtggtgtaccgagatggagagagtgttcgggttcccagtccactacacagatgtcagcaacatgtctagactggccagacagagactgctgggaagaagctggtccgtccctgtgatcagacacctgttcgcccctctgaaggagtacttcgcctgcgtgagcagcggcaacagcaacgccaacagccggggccccagcttctctagcggcctggtgccactgtccctgagagggagccacatgggccccatggagatctacaaaaccgtgagcgcctggaagcggcagcctgtgcgcgtgctgagcctgtttcggaatatcgataaagtcctgaaaagcctgggattcctggagagcggctctggctccggcggtggcaccctgaagtacgtggaggatgtgacaaacgtggtcagacgggatgtggagaagtggggccccttcgatctggtgtacggcagcacccaacccctgggcagctcttgtgaccggtgccctggctggtacatgtttcagttccaccggatcctgcagtacgccctgccgagacaggagtcccagcggccattcttttggattttcatggacaacttgctgctgaccgaggatgaccaggaaactaccactcggttcctgcagaccgaagccgtgaccctgcaggacgtgagaggccgggactaccagaacgccatgcgggtgtggtccaacatccctggactgaaaagcaagcacgcacctctgacccctaaagaagaggagtacctgcaggcccaggtgcggagcagaagcaagctggacgcccctaaggtggatctgctggtgaagaattgcctcctgcccctgagagagtacttcaagtatttcagccagaatagtctgcccctgggcggcccaagcagcggcgcccctcctcccagcggcggcagcccagccggctccccaacctctaccgaggagggcacctctgagtccgccacccccgagagcggccctggcacctccaccgagcccagcgagggcagcgcacccggcagccctgccggcagccccacctccacagaggagggaaccagcaccgagcccagcgaaggcagcgccccaggcaccagcaccgagcctagtgagggcggctctggcggcggcagcgcccaggagattaaacggatcaacaagatcagaagaagacttgtgaaagacagcaacaccaagaaggccggcaagacaggccccatgaaaaccctgctggttagagtgatgacacccgatctgagagagcggctggaaaacctgagaaagaagcctgaaaatatcccccagcccatcagcaatacatctagagccaacctgaataagctgctgaccgattacaccgaaatgaagaaggcgatcctgcatgtgtactgggaagagttccagaaggaccctgtgggcctgatgagccgggtggcccagcctgccagcaagaagatcgatcagaacaagctgaaacctgagatggacgagaagggcaacctgaccaccgccggctttgcctgctctcagtgtggccagcccctgttcgtgtacaagctggagcaggtgtctgagaagggcaaggcttacaccaactacttcggacggtgcaatgtggccgagcacgaaaagctgatcctgctggcccagctgaagcccgagaaggatagcgacgaagccgtgacatatagcctgggaaagtttgggcagagggccctggatttctacagcattcatgtgaccaaggagtccacccaccccgtgaagcccctggcccagatcgccggaaacagatacgcctccggacctgtgggaaaggccctgagcgacgcatgtatgggcacaatcgcctccttcctgtctaagtaccaggacatcatcatcgaacaccagaaggtggtgaagggcaaccagaagagactggagagcctgcgggagctggccggcaaggaaaacctggaataccctagcgtgaccctgccacctcagcctcacaccaaggagggcgttgatgcctacaacgaagtgatcgcccgggtgcgaatgtgggtgaacctgaacctgtggcagaagctgaagctaagcagagatgatgccaagcctctgctgagactgaagggattcccttcctttcctctggtcgagagacaggccaacgaagtggactggtgggacatggtgtgtaacgtgaagaagctgatcaacgagaaaaaggaggatggcaaggtgttttggcagaatctggctggctacaagagacaggaagccctgagaccatacctgagcagcgaggaagatcggaagaagggaaagaaattcgctcggtaccagctgggcgacctgctgctgcacctggaaaagaagcacggcgaggactggggaaaggtgtacgacgaggcctgggagcggattgacaagaaagtggaaggcctgagcaagcacatcaagctggaagaggaacggagaagcgaggacgcccagagcaaggccgccctgaccgactggctgcgggctaaggccagcttcgtgatcgagggcctgaaggaggccgacaaggacgagttctgcagatgcgagctgaagctgcagaagtggtacggggacctgcggggaaagcccttcgccatcgaagccgagaacagcatcctggacatcagcggcttcagcaagcagtacaactgtgccttcatctggcagaaggacggcgtgaagaagctgaacctgtacctgatcatcaactacttcaagggcggcaagctgcggttcaagaagatcaaacctgaagccttcgaagccaacagattctacaccgtgatcaacaaaaagagcggcgagatcgtgcccatggaggtgaacttcaacttcgacgaccccaacctgatcatcctgcctctggcctttggcaagagacagggcagagaattcatctggaacgacctgctgtccctggaaaccggcagcctgaagctggccaacggaagagtgatcgagaagacactgtacaacagaagaacccggcaggatgagcctgccctgttcgtggccctgaccttcgagcggcgggaggtcctggactcctccaatatcaaaccaatgaacctgatcggcgtggcaagaggcgaaaacatccccgccgtgatcgccctgaccgaccccgagggctgcccactgagccggtttaaggatagcctgggaaacccaacccacatcctgagaatcggcgagagctataaggagaagcagcggaccatccaggccaagaaggaggtggagcagcggagagccggcggctacagccggaagtacgccagcaaagccaagaatctggcagacgatatggtgagaaacaccgctagagatctgctgtactacgccgtgacccaggatgccatgctgatcttcgccaacctgagccggggcttcggccggcagggcaagcggaccttcatggccgagagacagtacacacggatggaggactggctgaccgccaagctggcctacgagggcctgagcaagacctacctgtccaagacactggcccagtacacctccaagacatgcagcaactgtgggtttaccatcaccagcgccgactacgacagggtgctggagaagctgaagaagacagcaacaggctggatgaccacaattaacggcaaggagctgaaggtggagggccagattacctactacaacagatacaagagacagaacgtagtcaaggacctgtccgtcgagctggatagactgagcgaagaatctgtgaacaacgacatctcctcctggacaaagggcagaagcggagaagctctgagcctcctgaagaaaagattctcccatagacccgtgcaggagaagttcgtgtgcctgaactgcggcttcgagacacacgcagccgagcaagccgccctgaacatcgccagatcctggctgttcctgcggagccaggagtacaagaaataccagacaaacaagacaaccggcaacaccgataagagagccttcgtcgagacctggcagtccttttaccggaagaagcttaaggaggtgtggaaacctgccgtgcggtctggcggatctggcggaggctccacaagcccccagaagagcgtgaccttcgaggacgtggccgtgtacttcacccaggccgagtgggacggcctgagccccgcccagaggaccctgtacagggacgtgatgctggagaactacggcaacgtggccagcctgggcttccccctgctgaagcccgccgtgatcagccagctggagggcggcggcgagctgggcggccccagccccctggccgccggcaccggcctgcacgtgctgaggaccgtgaccagccccaagaaaaagagaaaagtctaagctgccttctgcggggcttgccttctggccatgcccttcttctctcccttgcacctgtacctcttggtctttgaataaagcctgagtaggaaggctagcaaaaaaaaaaaaaaaaaaaaaaaaaaaaaaaaaaaaaaaaaaaaaaaaaaaaaaaaaaaaaaaaaaaaaaaaaaaaaaaa

SEQ ID NO: 3704 - RNA, 5419 nt, synthetic construct
  source 1..5419: mol_type = other RNA
aggaaataagagagaaaagaagagtaagaagaaatataagagccaccatggcccctaagaagaagcgtaaagtgagccgggtgaacggcagcggcagcggcggcggcatgaaccacgaccaggagttcgacccccctaaggtgtaccctcccgtccccgccgagaagagaaagcccatccgggtcctgagcctgttcgatggcatcgccaccggtctgctggtgctgaaggacctgggcatccaggtggataggtacattgcctccgaggtgtgcgaggactccatcaccgtgggaatggtgcgtcatcagggcaagatcatgtacgtgggcgacgtgcggagcgtgacacagaagcatatccaggagtggggccctttcgacctggtgatcggcggcagcccttgcaatgacctgagcatcgtgaacccagcccggaagggcctgtacgagggaaccggcagactgttcttcgagttttacagactgctgcacgacgcccggcctaaggaaggcgacgaccggcccttcttttggctgttcgagaatgtggtggccatgggagtcagcgacaagcgggatattagccggttcctggagagcaaccccgtgatgatcgatgccaaggaagtgagcgccgcccaccgggccagatacttctggggcaatctgcctggcatgaacagacccctggccagcaccgtgaacgacaagctggagctgcaggagtgcctggagcacggccggatcgccaagttcagcaaggtgagaaccatcaccacccgaagcaacagcatcaaacaaggcaaggaccagcactttcctgtgttcatgaacgagaaggaggacatcctgtggtgtaccgagatggagagagtgttcgggttcccagtccactacacagatgtcagcaacatgtctagactggccagacagagactgctgggaagaagctggtccgtccctgtgatcagacacctgttcgcccctctgaaggagtacttcgcctgcgtgagcagcggcaacagcaacgccaacagccggggccccagcttctctagcggcctggtgccactgtccctgagagggagccacatgggccccatggagatctacaaaaccgtgagcgcctggaagcggcagcctgtgcgcgtgctgagcctgtttcggaatatcgataaagtcctgaaaagcctgggattcctggagagcggctctggctccggcggtggcaccctgaagtacgtggaggatgtgacaaacgtggtcagacgggatgtggagaagtggggccccttcgatctggtgtacggcagcacccaacccctgggcagctcttgtgaccggtgccctggctggtacatgtttcagttccaccggatcctgcagtacgccctgccgagacaggagtcccagcggccattcttttggattttcatggacaacttgctgctgaccgaggatgaccaggaaactaccactcggttcctgcagaccgaagccgtgaccctgcaggacgtgagaggccgggactaccagaacgccatgcgggtgtggtccaacatccctggactgaaaagcaagcacgcacctctgacccctaaagaagaggagtacctgcaggcccaggtgcggagcagaagcaagctggacgcccctaaggtggatctgctggtgaagaattgcctcctgcccctgagagagtacttcaagtatttcagccagaatagtctgcccctgggcggcccaagcagcggcgcccctcctcccagcggcggcagcccagccggctccccaacctctaccgaggagggcacctctgagtccgccacccccgagagcggccctggcacctccaccgagcccagcgagggcagcgcacccggcagccctgccggcagccccacctccacagaggagggaaccagcaccgagcccagcgaaggcagcgccccaggcaccagcaccgagcctagtgagggcggctctggcggcggcagcgcccaggagattaaacggatcaacaagatcagaagaagacttgtgaaagacagcaacaccaagaaggccggcaagacaggccccatgaaaaccctgctggttagagtgatgacacccgatctgagagagcggctggaaaacctgagaaagaagcctgaaaatatcccccagcccatcagcaatacatctagagccaacctgaataagctgctgaccgattacaccgaaatgaagaaggcgatcctgcatgtgtactgggaagagttccagaaggaccctgtgggcctgatgagccgggtggcccagcctgccagcaagaagatcgatcagaacaagctgaaacctgagatggacgagaagggcaacctgaccaccgccggctttgcctgctctcagtgtggccagcccctgttcgtgtacaagctggagcaggtgtctgagaagggcaaggcttacaccaactacttcggacggtgcaatgtggccgagcacgaaaagctgatcctgctggcccagctgaagcccgagaaggatagcgacgaagccgtgacatatagcctgggaaagtttgggcagagggccctggatttctacagcattcatgtgaccaaggagtccacccaccccgtgaagcccctggcccagatcgccggaaacagatacgcctccggacctgtgggaaaggccctgagcgacgcatgtatgggcacaatcgcctccttcctgtctaagtaccaggacatcatcatcgaacaccagaaggtggtgaagggcaaccagaagagactggagagcctgcgggagctggccggcaaggaaaacctggaataccctagcgtgaccctgccacctcagcctcacaccaaggagggcgttgatgcctacaacgaagtgatcgcccgggtgcgaatgtgggtgaacctgaacctgtggcagaagctgaagctaagcagagatgatgccaagcctctgctgagactgaagggattcccttcctttcctctggtcgagagacaggccaacgaagtggactggtgggacatggtgtgtaacgtgaagaagctgatcaacgagaaaaaggaggatggcaaggtgttttggcagaatctggctggctacaagagacaggaagccctgagaccatacctgagcagcgaggaagatcggaagaagggaaagaaattcgctcggtaccagctgggcgacctgctgctgcacctggaaaagaagcacggcgaggactggggaaaggtgtacgacgaggcctgggagcggattgacaagaaagtggaaggcctgagcaagcacatcaagctggaagaggaacggagaagcgaggacgcccagagcaaggccgccctgaccgactggctgcgggctaaggccagcttcgtgatcgagggcctgaaggaggccgacaaggacgagttctgcagatgcgagctgaagctgcagaagtggtacggggacctgcggggaaagcccttcgccatcgaagccgagaacagcatcctggacatcagcggcttcagcaagcagtacaactgtgccttcatctggcagaaggacggcgtgaagaagctgaacctgtacctgatcatcaactacttcaagggcggcaagctgcggttcaagaagatcaaacctgaagccttcgaagccaacagattctacaccgtgatcaacaaaaagagcggcgagatcgtgcccatggaggtgaacttcaacttcgacgaccccaacctgatcatcctgcctctggcctttggcaagagacagggcagagaattcatctggaacgacctgctgtccctggaaaccggcagcctgaagctggccaacggaagagtgatcgagaagacactgtacaacagaagaacccggcaggatgagcctgccctgttcgtggccctgaccttcgagcggcgggaggtcctggactcctccaatatcaaaccaatgaacctgatcggcgtggcaagaggcgaaaacatccccgccgtgatcgccctgaccgaccccgagggctgcccactgagccggtttaaggatagcctgggaaacccaacccacatcctgagaatcggcgagagctataaggagaagcagcggaccatccaggccaagaaggaggtggagcagcggagagccggcggctacagccggaagtacgccagcaaagccaagaatctggcagacgatatggtgagaaacaccgctagagatctgctgtactacgccgtgacccaggatgccatgctgatcttcgccaacctgagccggggcttcggccggcagggcaagcggaccttcatggccgagagacagtacacacggatggaggactggctgaccgccaagctggcctacgagggcctgagcaagacctacctgtccaagacactggcccagtacacctccaagacatgcagcaactgtgggtttaccatcaccagcgccgactacgacagggtgctggagaagctgaagaagacagcaacaggctggatgaccacaattaacggcaaggagctgaaggtggagggccagattacctactacaacagatacaagagacagaacgtagtcaaggacctgtccgtcgagctggatagactgagcgaagaatctgtgaacaacgacatctcctcctggacaaagggcagaagcggagaagctctgagcctcctgaagaaaagattctcccatagacccgtgcaggagaagttcgtgtgcctgaactgcggcttcgagacacacgcagccgagcaagccgccctgaacatcgccagatcctggctgttcctgcggagccaggagtacaagaaataccagacaaacaagacaaccggcaacaccgataagagagccttcgtcgagacctggcagtccttttaccggaagaagcttaaggaggtgtggaaacctgccgtgcggtctggcggatctggcggaggctccacaagcaagcccgaggacgtgagcttcgccgaggtggccgtgtacttcagcctggacgagtggggctacctgtggcccgcccagagggccctgtacagggacgtgatgagggagacctacggccacttcggcgagctgggcttccccggccccaagcccgccctgatcagctggatggagcaggagagcgaggcctggagccccgccgcccaggaccccgaggagggcgagagcgtgggcggcgccgtgaccagccccaagaaaaagagaaaagtctaagctgccttctgcggggcttgccttctggccatgcccttcttctctcccttgcacctgtacctcttggtctttgaataaagcctgagtaggaaggctagcaaaaaaaaaaaaaaaaaaaaaaaaaaaaaaaaaaaaaaaaaaaaaaaaaaaaaaaaaaaaaaaaaaaaaaaaaaaaaaaa

SEQ ID NO: 3705 - RNA, 5419 nt, synthetic construct
  source 1..5419: mol_type = other RNA
aggaaataagagagaaaagaagagtaagaagaaatataagagccaccatggcccctaagaagaagcgtaaagtgagccgggtgaacggcagcggcagcggcggcggcatgaaccacgaccaggagttcgacccccctaaggtgtaccctcccgtccccgccgagaagagaaagcccatccgggtcctgagcctgttcgatggcatcgccaccggtctgctggtgctgaaggacctgggcatccaggtggataggtacattgcctccgaggtgtgcgaggactccatcaccgtgggaatggtgcgtcatcagggcaagatcatgtacgtgggcgacgtgcggagcgtgacacagaagcatatccaggagtggggccctttcgacctggtgatcggcggcagcccttgcaatgacctgagcatcgtgaacccagcccggaagggcctgtacgagggaaccggcagactgttcttcgagttttacagactgctgcacgacgcccggcctaaggaaggcgacgaccggcccttcttttggctgttcgagaatgtggtggccatgggagtcagcgacaagcgggatattagccggttcctggagagcaaccccgtgatgatcgatgccaaggaagtgagcgccgcccaccgggccagatacttctggggcaatctgcctggcatgaacagacccctggccagcaccgtgaacgacaagctggagctgcaggagtgcctggagcacggccggatcgccaagttcagcaaggtgagaaccatcaccacccgaagcaacagcatcaaacaaggcaaggaccagcactttcctgtgttcatgaacgagaaggaggacatcctgtggtgtaccgagatggagagagtgttcgggttcccagtccactacacagatgtcagcaacatgtctagactggccagacagagactgctgggaagaagctggtccgtccctgtgatcagacacctgttcgcccctctgaaggagtacttcgcctgcgtgagcagcggcaacagcaacgccaacagccggggccccagcttctctagcggcctggtgccactgtccctgagagggagccacatgggccccatggagatctacaaaaccgtgagcgcctggaagcggcagcctgtgcgcgtgctgagcctgtttcggaatatcgataaagtcctgaaaagcctgggattcctggagagcggctctggctccggcggtggcaccctgaagtacgtggaggatgtgacaaacgtggtcagacgggatgtggagaagtggggccccttcgatctggtgtacggcagcacccaacccctgggcagctcttgtgaccggtgccctggctggtacatgtttcagttccaccggatcctgcagtacgccctgccgagacaggagtcccagcggccattcttttggattttcatggacaacttgctgctgaccgaggatgaccaggaaactaccactcggttcctgcagaccgaagccgtgaccctgcaggacgtgagaggccgggactaccagaacgccatgcgggtgtggtccaacatccctggactgaaaagcaagcacgcacctctgacccctaaagaagaggagtacctgcaggcccaggtgcggagcagaagcaagctggacgcccctaaggtggatctgctggtgaagaattgcctcctgcccctgagagagtacttcaagtatttcagccagaatagtctgcccctgggcggcccaagcagcggcgcccctcctcccagcggcggcagcccagccggctccccaacctctaccgaggagggcacctctgagtccgccacccccgagagcggccctggcacctccaccgagcccagcgagggcagcgcacccggcagccctgccggcagccccacctccacagaggagggaaccagcaccgagcccagcgaaggcagcgccccaggcaccagcaccgagcctagtgagggcggctctggcggcggcagcgcccaggagattaaacggatcaacaagatcagaagaagacttgtgaaagacagcaacaccaagaaggccggcaagacaggccccatgaaaaccctgctggttagagtgatgacacccgatctgagagagcggctggaaaacctgagaaagaagcctgaaaatatcccccagcccatcagcaatacatctagagccaacctgaataagctgctgaccgattacaccgaaatgaagaaggcgatcctgcatgtgtactgggaagagttccagaaggaccctgtgggcctgatgagccgggtggcccagcctgccagcaagaagatcgatcagaacaagctgaaacctgagatggacgagaagggcaacctgaccaccgccggctttgcctgctctcagtgtggccagcccctgttcgtgtacaagctggagcaggtgtctgagaagggcaaggcttacaccaactacttcggacggtgcaatgtggccgagcacgaaaagctgatcctgctggcccagctgaagcccgagaaggatagcgacgaagccgtgacatatagcctgggaaagtttgggcagagggccctggatttctacagcattcatgtgaccaaggagtccacccaccccgtgaagcccctggcccagatcgccggaaacagatacgcctccggacctgtgggaaaggccctgagcgacgcatgtatgggcacaatcgcctccttcctgtctaagtaccaggacatcatcatcgaacaccagaaggtggtgaagggcaaccagaagagactggagagcctgcgggagctggccggcaaggaaaacctggaataccctagcgtgaccctgccacctcagcctcacaccaaggagggcgttgatgcctacaacgaagtgatcgcccgggtgcgaatgtgggtgaacctgaacctgtggcagaagctgaagctaagcagagatgatgccaagcctctgctgagactgaagggattcccttcctttcctctggtcgagagacaggccaacgaagtggactggtgggacatggtgtgtaacgtgaagaagctgatcaacgagaaaaaggaggatggcaaggtgttttggcagaatctggctggctacaagagacaggaagccctgagaccatacctgagcagcgaggaagatcggaagaagggaaagaaattcgctcggtaccagctgggcgacctgctgctgcacctggaaaagaagcacggcgaggactggggaaaggtgtacgacgaggcctgggagcggattgacaagaaagtggaaggcctgagcaagcacatcaagctggaagaggaacggagaagcgaggacgcccagagcaaggccgccctgaccgactggctgcgggctaaggccagcttcgtgatcgagggcctgaaggaggccgacaaggacgagttctgcagatgcgagctgaagctgcagaagtggtacggggacctgcggggaaagcccttcgccatcgaagccgagaacagcatcctggacatcagcggcttcagcaagcagtacaactgtgccttcatctggcagaaggacggcgtgaagaagctgaacctgtacctgatcatcaactacttcaagggcggcaagctgcggttcaagaagatcaaacctgaagccttcgaagccaacagattctacaccgtgatcaacaaaaagagcggcgagatcgtgcccatggaggtgaacttcaacttcgacgaccccaacctgatcatcctgcctctggcctttggcaagagacagggcagagaattcatctggaacgacctgctgtccctggaaaccggcagcctgaagctggccaacggaagagtgatcgagaagacactgtacaacagaagaacccggcaggatgagcctgccctgttcgtggccctgaccttcgagcggcgggaggtcctggactcctccaatatcaaaccaatgaacctgatcggcgtggcaagaggcgaaaacatccccgccgtgatcgccctgaccgaccccgagggctgcccactgagccggtttaaggatagcctgggaaacccaacccacatcctgagaatcggcgagagctataaggagaagcagcggaccatccaggccaagaaggaggtggagcagcggagagccggcggctacagccggaagtacgccagcaaagccaagaatctggcagacgatatggtgagaaacaccgctagagatctgctgtactacgccgtgacccaggatgccatgctgatcttcgccaacctgagccggggcttcggccggcagggcaagcggaccttcatggccgagagacagtacacacggatggaggactggctgaccgccaagctggcctacgagggcctgagcaagacctacctgtccaagacactggcccagtacacctccaagacatgcagcaactgtgggtttaccatcaccagcgccgactacgacagggtgctggagaagctgaagaagacagcaacaggctggatgaccacaattaacggcaaggagctgaaggtggagggccagattacctactacaacagatacaagagacagaacgtagtcaaggacctgtccgtcgagctggatagactgagcgaagaatctgtgaacaacgacatctcctcctggacaaagggcagaagcggagaagctctgagcctcctgaagaaaagattctcccatagacccgtgcaggagaagttcgtgtgcctgaactgcggcttcgagacacacgcagccgagcaagccgccctgaacatcgccagatcctggctgttcctgcggagccaggagtacaagaaataccagacaaacaagacaaccggcaacaccgataagagagccttcgtcgagacctggcagtccttttaccggaagaagcttaaggaggtgtggaaacctgccgtgcggtctggcggatctggcggaggctccacaagcagccagggcagcgtgaccttcagggacgtggccatcgacttcagccaggaggagtggaagtggctgcagcccgcccagagggacctgtacaggtgcgtgatgctggagaactacggccacctggtgagcctgggcctgagcatcagcaagcccgacgtggtgagcctgctggagcagggcaaggagccctggctgggcaagagggaggtgaagagggacctgttcagcgtgagcgagagcagcaccagccccaagaaaaagagaaaagtctaagctgccttctgcggggcttgccttctggccatgcccttcttctctcccttgcacctgtacctcttggtctttgaataaagcctgagtaggaaggctagcaaaaaaaaaaaaaaaaaaaaaaaaaaaaaaaaaaaaaaaaaaaaaaaaaaaaaaaaaaaaaaaaaaaaaaaaaaaaaaaa

SEQ ID NO: 3706 - RNA, 5419 nt, synthetic construct
  source 1..5419: mol_type = other RNA
aggaaataagagagaaaagaagagtaagaagaaatataagagccaccatggcccctaagaagaagcgtaaagtgagccgggtgaacggcagcggcagcggcggcggcatgaaccacgaccaggagttcgacccccctaaggtgtaccctcccgtccccgccgagaagagaaagcccatccgggtcctgagcctgttcgatggcatcgccaccggtctgctggtgctgaaggacctgggcatccaggtggataggtacattgcctccgaggtgtgcgaggactccatcaccgtgggaatggtgcgtcatcagggcaagatcatgtacgtgggcgacgtgcggagcgtgacacagaagcatatccaggagtggggccctttcgacctggtgatcggcggcagcccttgcaatgacctgagcatcgtgaacccagcccggaagggcctgtacgagggaaccggcagactgttcttcgagttttacagactgctgcacgacgcccggcctaaggaaggcgacgaccggcccttcttttggctgttcgagaatgtggtggccatgggagtcagcgacaagcgggatattagccggttcctggagagcaaccccgtgatgatcgatgccaaggaagtgagcgccgcccaccgggccagatacttctggggcaatctgcctggcatgaacagacccctggccagcaccgtgaacgacaagctggagctgcaggagtgcctggagcacggccggatcgccaagttcagcaaggtgagaaccatcaccacccgaagcaacagcatcaaacaaggcaaggaccagcactttcctgtgttcatgaacgagaaggaggacatcctgtggtgtaccgagatggagagagtgttcgggttcccagtccactacacagatgtcagcaacatgtctagactggccagacagagactgctgggaagaagctggtccgtccctgtgatcagacacctgttcgcccctctgaaggagtacttcgcctgcgtgagcagcggcaacagcaacgccaacagccggggccccagcttctctagcggcctggtgccactgtccctgagagggagccacatgggccccatggagatctacaaaaccgtgagcgcctggaagcggcagcctgtgcgcgtgctgagcctgtttcggaatatcgataaagtcctgaaaagcctgggattcctggagagcggctctggctccggcggtggcaccctgaagtacgtggaggatgtgacaaacgtggtcagacgggatgtggagaagtggggccccttcgatctggtgtacggcagcacccaacccctgggcagctcttgtgaccggtgccctggctggtacatgtttcagttccaccggatcctgcagtacgccctgccgagacaggagtcccagcggccattcttttggattttcatggacaacttgctgctgaccgaggatgaccaggaaactaccactcggttcctgcagaccgaagccgtgaccctgcaggacgtgagaggccgggactaccagaacgccatgcgggtgtggtccaacatccctggactgaaaagcaagcacgcacctctgacccctaaagaagaggagtacctgcaggcccaggtgcggagcagaagcaagctggacgcccctaaggtggatctgctggtgaagaattgcctcctgcccctgagagagtacttcaagtatttcagccagaatagtctgcccctgggcggcccaagcagcggcgcccctcctcccagcggcggcagcccagccggctccccaacctctaccgaggagggcacctctgagtccgccacccccgagagcggccctggcacctccaccgagcccagcgagggcagcgcacccggcagccctgccggcagccccacctccacagaggagggaaccagcaccgagcccagcgaaggcagcgccccaggcaccagcaccgagcctagtgagggcggctctggcggcggcagcgcccaggagattaaacggatcaacaagatcagaagaagacttgtgaaagacagcaacaccaagaaggccggcaagacaggccccatgaaaaccctgctggttagagtgatgacacccgatctgagagagcggctggaaaacctgagaaagaagcctgaaaatatcccccagcccatcagcaatacatctagagccaacctgaataagctgctgaccgattacaccgaaatgaagaaggcgatcctgcatgtgtactgggaagagttccagaaggaccctgtgggcctgatgagccgggtggcccagcctgccagcaagaagatcgatcagaacaagctgaaacctgagatggacgagaagggcaacctgaccaccgccggctttgcctgctctcagtgtggccagcccctgttcgtgtacaagctggagcaggtgtctgagaagggcaaggcttacaccaactacttcggacggtgcaatgtggccgagcacgaaaagctgatcctgctggcccagctgaagcccgagaaggatagcgacgaagccgtgacatatagcctgggaaagtttgggcagagggccctggatttctacagcattcatgtgaccaaggagtccacccaccccgtgaagcccctggcccagatcgccggaaacagatacgcctccggacctgtgggaaaggccctgagcgacgcatgtatgggcacaatcgcctccttcctgtctaagtaccaggacatcatcatcgaacaccagaaggtggtgaagggcaaccagaagagactggagagcctgcgggagctggccggcaaggaaaacctggaataccctagcgtgaccctgccacctcagcctcacaccaaggagggcgttgatgcctacaacgaagtgatcgcccgggtgcgaatgtgggtgaacctgaacctgtggcagaagctgaagctaagcagagatgatgccaagcctctgctgagactgaagggattcccttcctttcctctggtcgagagacaggccaacgaagtggactggtgggacatggtgtgtaacgtgaagaagctgatcaacgagaaaaaggaggatggcaaggtgttttggcagaatctggctggctacaagagacaggaagccctgagaccatacctgagcagcgaggaagatcggaagaagggaaagaaattcgctcggtaccagctgggcgacctgctgctgcacctggaaaagaagcacggcgaggactggggaaaggtgtacgacgaggcctgggagcggattgacaagaaagtggaaggcctgagcaagcacatcaagctggaagaggaacggagaagcgaggacgcccagagcaaggccgccctgaccgactggctgcgggctaaggccagcttcgtgatcgagggcctgaaggaggccgacaaggacgagttctgcagatgcgagctgaagctgcagaagtggtacggggacctgcggggaaagcccttcgccatcgaagccgagaacagcatcctggacatcagcggcttcagcaagcagtacaactgtgccttcatctggcagaaggacggcgtgaagaagctgaacctgtacctgatcatcaactacttcaagggcggcaagctgcggttcaagaagatcaaacctgaagccttcgaagccaacagattctacaccgtgatcaacaaaaagagcggcgagatcgtgcccatggaggtgaacttcaacttcgacgaccccaacctgatcatcctgcctctggcctttggcaagagacagggcagagaattcatctggaacgacctgctgtccctggaaaccggcagcctgaagctggccaacggaagagtgatcgagaagacactgtacaacagaagaacccggcaggatgagcctgccctgttcgtggccctgaccttcgagcggcgggaggtcctggactcctccaatatcaaaccaatgaacctgatcggcgtggcaagaggcgaaaacatccccgccgtgatcgccctgaccgaccccgagggctgcccactgagccggtttaaggatagcctgggaaacccaacccacatcctgagaatcggcgagagctataaggagaagcagcggaccatccaggccaagaaggaggtggagcagcggagagccggcggctacagccggaagtacgccagcaaagccaagaatctggcagacgatatggtgagaaacaccgctagagatctgctgtactacgccgtgacccaggatgccatgctgatcttcgccaacctgagccggggcttcggccggcagggcaagcggaccttcatggccgagagacagtacacacggatggaggactggctgaccgccaagctggcctacgagggcctgagcaagacctacctgtccaagacactggcccagtacacctccaagacatgcagcaactgtgggtttaccatcaccagcgccgactacgacagggtgctggagaagctgaagaagacagcaacaggctggatgaccacaattaacggcaaggagctgaaggtggagggccagattacctactacaacagatacaagagacagaacgtagtcaaggacctgtccgtcgagctggatagactgagcgaagaatctgtgaacaacgacatctcctcctggacaaagggcagaagcggagaagctctgagcctcctgaagaaaagattctcccatagacccgtgcaggagaagttcgtgtgcctgaactgcggcttcgagacacacgcagccgagcaagccgccctgaacatcgccagatcctggctgttcctgcggagccaggagtacaagaaataccagacaaacaagacaaccggcaacaccgataagagagccttcgtcgagacctggcagtccttttaccggaagaagcttaaggaggtgtggaaacctgccgtgcggtctggcggatctggcggaggctccacaagcatgggcccccagggcgccaggaggcaggccttcctggccttcggcgacgtgaccgtggacttcacccagaaggagtggaggctgctgagccccacccagagggccctgtacagggaggtgaccctggagaactacagccacctggtgagcctgggcatcctgcacagcaagcccgagctgatcaggaggctggagcagggcgaggccccctggggcgaggagaggaggaggaggcccggccccaccagccccaagaaaaagagaaaagtctaagctgccttctgcggggcttgccttctggccatgcccttcttctctcccttgcacctgtacctcttggtctttgaataaagcctgagtaggaaggctagcaaaaaaaaaaaaaaaaaaaaaaaaaaaaaaaaaaaaaaaaaaaaaaaaaaaaaaaaaaaaaaaaaaaaaaaaaaaaaaaa

SEQ ID NO: 3707 - RNA, 5419 nt, synthetic construct
  source 1..5419: mol_type = other RNA
aggaaataagagagaaaagaagagtaagaagaaatataagagccaccatggcccctaagaagaagcgtaaagtgagccgggtgaacggcagcggcagcggcggcggcatgaaccacgaccaggagttcgacccccctaaggtgtaccctcccgtccccgccgagaagagaaagcccatccgggtcctgagcctgttcgatggcatcgccaccggtctgctggtgctgaaggacctgggcatccaggtggataggtacattgcctccgaggtgtgcgaggactccatcaccgtgggaatggtgcgtcatcagggcaagatcatgtacgtgggcgacgtgcggagcgtgacacagaagcatatccaggagtggggccctttcgacctggtgatcggcggcagcccttgcaatgacctgagcatcgtgaacccagcccggaagggcctgtacgagggaaccggcagactgttcttcgagttttacagactgctgcacgacgcccggcctaaggaaggcgacgaccggcccttcttttggctgttcgagaatgtggtggccatgggagtcagcgacaagcgggatattagccggttcctggagagcaaccccgtgatgatcgatgccaaggaagtgagcgccgcccaccgggccagatacttctggggcaatctgcctggcatgaacagacccctggccagcaccgtgaacgacaagctggagctgcaggagtgcctggagcacggccggatcgccaagttcagcaaggtgagaaccatcaccacccgaagcaacagcatcaaacaaggcaaggaccagcactttcctgtgttcatgaacgagaaggaggacatcctgtggtgtaccgagatggagagagtgttcgggttcccagtccactacacagatgtcagcaacatgtctagactggccagacagagactgctgggaagaagctggtccgtccctgtgatcagacacctgttcgcccctctgaaggagtacttcgcctgcgtgagcagcggcaacagcaacgccaacagccggggccccagcttctctagcggcctggtgccactgtccctgagagggagccacatgggccccatggagatctacaaaaccgtgagcgcctggaagcggcagcctgtgcgcgtgctgagcctgtttcggaatatcgataaagtcctgaaaagcctgggattcctggagagcggctctggctccggcggtggcaccctgaagtacgtggaggatgtgacaaacgtggtcagacgggatgtggagaagtggggccccttcgatctggtgtacggcagcacccaacccctgggcagctcttgtgaccggtgccctggctggtacatgtttcagttccaccggatcctgcagtacgccctgccgagacaggagtcccagcggccattcttttggattttcatggacaacttgctgctgaccgaggatgaccaggaaactaccactcggttcctgcagaccgaagccgtgaccctgcaggacgtgagaggccgggactaccagaacgccatgcgggtgtggtccaacatccctggactgaaaagcaagcacgcacctctgacccctaaagaagaggagtacctgcaggcccaggtgcggagcagaagcaagctggacgcccctaaggtggatctgctggtgaagaattgcctcctgcccctgagagagtacttcaagtatttcagccagaatagtctgcccctgggcggcccaagcagcggcgcccctcctcccagcggcggcagcccagccggctccccaacctctaccgaggagggcacctctgagtccgccacccccgagagcggccctggcacctccaccgagcccagcgagggcagcgcacccggcagccctgccggcagccccacctccacagaggagggaaccagcaccgagcccagcgaaggcagcgccccaggcaccagcaccgagcctagtgagggcggctctggcggcggcagcgcccaggagattaaacggatcaacaagatcagaagaagacttgtgaaagacagcaacaccaagaaggccggcaagacaggccccatgaaaaccctgctggttagagtgatgacacccgatctgagagagcggctggaaaacctgagaaagaagcctgaaaatatcccccagcccatcagcaatacatctagagccaacctgaataagctgctgaccgattacaccgaaatgaagaaggcgatcctgcatgtgtactgggaagagttccagaaggaccctgtgggcctgatgagccgggtggcccagcctgccagcaagaagatcgatcagaacaagctgaaacctgagatggacgagaagggcaacctgaccaccgccggctttgcctgctctcagtgtggccagcccctgttcgtgtacaagctggagcaggtgtctgagaagggcaaggcttacaccaactacttcggacggtgcaatgtggccgagcacgaaaagctgatcctgctggcccagctgaagcccgagaaggatagcgacgaagccgtgacatatagcctgggaaagtttgggcagagggccctggatttctacagcattcatgtgaccaaggagtccacccaccccgtgaagcccctggcccagatcgccggaaacagatacgcctccggacctgtgggaaaggccctgagcgacgcatgtatgggcacaatcgcctccttcctgtctaagtaccaggacatcatcatcgaacaccagaaggtggtgaagggcaaccagaagagactggagagcctgcgggagctggccggcaaggaaaacctggaataccctagcgtgaccctgccacctcagcctcacaccaaggagggcgttgatgcctacaacgaagtgatcgcccgggtgcgaatgtgggtgaacctgaacctgtggcagaagctgaagctaagcagagatgatgccaagcctctgctgagactgaagggattcccttcctttcctctggtcgagagacaggccaacgaagtggactggtgggacatggtgtgtaacgtgaagaagctgatcaacgagaaaaaggaggatggcaaggtgttttggcagaatctggctggctacaagagacaggaagccctgagaccatacctgagcagcgaggaagatcggaagaagggaaagaaattcgctcggtaccagctgggcgacctgctgctgcacctggaaaagaagcacggcgaggactggggaaaggtgtacgacgaggcctgggagcggattgacaagaaagtggaaggcctgagcaagcacatcaagctggaagaggaacggagaagcgaggacgcccagagcaaggccgccctgaccgactggctgcgggctaaggccagcttcgtgatcgagggcctgaaggaggccgacaaggacgagttctgcagatgcgagctgaagctgcagaagtggtacggggacctgcggggaaagcccttcgccatcgaagccgagaacagcatcctggacatcagcggcttcagcaagcagtacaactgtgccttcatctggcagaaggacggcgtgaagaagctgaacctgtacctgatcatcaactacttcaagggcggcaagctgcggttcaagaagatcaaacctgaagccttcgaagccaacagattctacaccgtgatcaacaaaaagagcggcgagatcgtgcccatggaggtgaacttcaacttcgacgaccccaacctgatcatcctgcctctggcctttggcaagagacagggcagagaattcatctggaacgacctgctgtccctggaaaccggcagcctgaagctggccaacggaagagtgatcgagaagacactgtacaacagaagaacccggcaggatgagcctgccctgttcgtggccctgaccttcgagcggcgggaggtcctggactcctccaatatcaaaccaatgaacctgatcggcgtggcaagaggcgaaaacatccccgccgtgatcgccctgaccgaccccgagggctgcccactgagccggtttaaggatagcctgggaaacccaacccacatcctgagaatcggcgagagctataaggagaagcagcggaccatccaggccaagaaggaggtggagcagcggagagccggcggctacagccggaagtacgccagcaaagccaagaatctggcagacgatatggtgagaaacaccgctagagatctgctgtactacgccgtgacccaggatgccatgctgatcttcgccaacctgagccggggcttcggccggcagggcaagcggaccttcatggccgagagacagtacacacggatggaggactggctgaccgccaagctggcctacgagggcctgagcaagacctacctgtccaagacactggcccagtacacctccaagacatgcagcaactgtgggtttaccatcaccagcgccgactacgacagggtgctggagaagctgaagaagacagcaacaggctggatgaccacaattaacggcaaggagctgaaggtggagggccagattacctactacaacagatacaagagacagaacgtagtcaaggacctgtccgtcgagctggatagactgagcgaagaatctgtgaacaacgacatctcctcctggacaaagggcagaagcggagaagctctgagcctcctgaagaaaagattctcccatagacccgtgcaggagaagttcgtgtgcctgaactgcggcttcgagacacacgcagccgagcaagccgccctgaacatcgccagatcctggctgttcctgcggagccaggagtacaagaaataccagacaaacaagacaaccggcaacaccgataagagagccttcgtcgagacctggcagtccttttaccggaagaagcttaaggaggtgtggaaacctgccgtgcggtctggcggatctggcggaggctccacaagcagccaggtgagcgtgaccttcgaggacgtggccgtgctgttcagcagggacgagtggaggaggctgggccccagccagaagaacctgtaccaggacgtgatgctggagaactacagcaacctggtgagcctgggcctgcccttcagcaagcccaaggtgatcagcctgctgcagcagggcgaggacccctggaaggtggagaaggagagccccggcagcttccccggctgcaagagcagccccaccagccccaagaaaaagagaaaagtctaagctgccttctgcggggcttgccttctggccatgcccttcttctctcccttgcacctgtacctcttggtctttgaataaagcctgagtaggaaggctagcaaaaaaaaaaaaaaaaaaaaaaaaaaaaaaaaaaaaaaaaaaaaaaaaaaaaaaaaaaaaaaaaaaaaaaaaaaaaaaaa

SEQ ID NO: 3708 - RNA, 5419 nt, synthetic construct
  source 1..5419: mol_type = other RNA
aggaaataagagagaaaagaagagtaagaagaaatataagagccaccatggcccctaagaagaagcgtaaagtgagccgggtgaacggcagcggcagcggcggcggcatgaaccacgaccaggagttcgacccccctaaggtgtaccctcccgtccccgccgagaagagaaagcccatccgggtcctgagcctgttcgatggcatcgccaccggtctgctggtgctgaaggacctgggcatccaggtggataggtacattgcctccgaggtgtgcgaggactccatcaccgtgggaatggtgcgtcatcagggcaagatcatgtacgtgggcgacgtgcggagcgtgacacagaagcatatccaggagtggggccctttcgacctggtgatcggcggcagcccttgcaatgacctgagcatcgtgaacccagcccggaagggcctgtacgagggaaccggcagactgttcttcgagttttacagactgctgcacgacgcccggcctaaggaaggcgacgaccggcccttcttttggctgttcgagaatgtggtggccatgggagtcagcgacaagcgggatattagccggttcctggagagcaaccccgtgatgatcgatgccaaggaagtgagcgccgcccaccgggccagatacttctggggcaatctgcctggcatgaacagacccctggccagcaccgtgaacgacaagctggagctgcaggagtgcctggagcacggccggatcgccaagttcagcaaggtgagaaccatcaccacccgaagcaacagcatcaaacaaggcaaggaccagcactttcctgtgttcatgaacgagaaggaggacatcctgtggtgtaccgagatggagagagtgttcgggttcccagtccactacacagatgtcagcaacatgtctagactggccagacagagactgctgggaagaagctggtccgtccctgtgatcagacacctgttcgcccctctgaaggagtacttcgcctgcgtgagcagcggcaacagcaacgccaacagccggggccccagcttctctagcggcctggtgccactgtccctgagagggagccacatgggccccatggagatctacaaaaccgtgagcgcctggaagcggcagcctgtgcgcgtgctgagcctgtttcggaatatcgataaagtcctgaaaagcctgggattcctggagagcggctctggctccggcggtggcaccctgaagtacgtggaggatgtgacaaacgtggtcagacgggatgtggagaagtggggccccttcgatctggtgtacggcagcacccaacccctgggcagctcttgtgaccggtgccctggctggtacatgtttcagttccaccggatcctgcagtacgccctgccgagacaggagtcccagcggccattcttttggattttcatggacaacttgctgctgaccgaggatgaccaggaaactaccactcggttcctgcagaccgaagccgtgaccctgcaggacgtgagaggccgggactaccagaacgccatgcgggtgtggtccaacatccctggactgaaaagcaagcacgcacctctgacccctaaagaagaggagtacctgcaggcccaggtgcggagcagaagcaagctggacgcccctaaggtggatctgctggtgaagaattgcctcctgcccctgagagagtacttcaagtatttcagccagaatagtctgcccctgggcggcccaagcagcggcgcccctcctcccagcggcggcagcccagccggctccccaacctctaccgaggagggcacctctgagtccgccacccccgagagcggccctggcacctccaccgagcccagcgagggcagcgcacccggcagccctgccggcagccccacctccacagaggagggaaccagcaccgagcccagcgaaggcagcgccccaggcaccagcaccgagcctagtgagggcggctctggcggcggcagcgcccaggagattaaacggatcaacaagatcagaagaagacttgtgaaagacagcaacaccaagaaggccggcaagacaggccccatgaaaaccctgctggttagagtgatgacacccgatctgagagagcggctggaaaacctgagaaagaagcctgaaaatatcccccagcccatcagcaatacatctagagccaacctgaataagctgctgaccgattacaccgaaatgaagaaggcgatcctgcatgtgtactgggaagagttccagaaggaccctgtgggcctgatgagccgggtggcccagcctgccagcaagaagatcgatcagaacaagctgaaacctgagatggacgagaagggcaacctgaccaccgccggctttgcctgctctcagtgtggccagcccctgttcgtgtacaagctggagcaggtgtctgagaagggcaaggcttacaccaactacttcggacggtgcaatgtggccgagcacgaaaagctgatcctgctggcccagctgaagcccgagaaggatagcgacgaagccgtgacatatagcctgggaaagtttgggcagagggccctggatttctacagcattcatgtgaccaaggagtccacccaccccgtgaagcccctggcccagatcgccggaaacagatacgcctccggacctgtgggaaaggccctgagcgacgcatgtatgggcacaatcgcctccttcctgtctaagtaccaggacatcatcatcgaacaccagaaggtggtgaagggcaaccagaagagactggagagcctgcgggagctggccggcaaggaaaacctggaataccctagcgtgaccctgccacctcagcctcacaccaaggagggcgttgatgcctacaacgaagtgatcgcccgggtgcgaatgtgggtgaacctgaacctgtggcagaagctgaagctaagcagagatgatgccaagcctctgctgagactgaagggattcccttcctttcctctggtcgagagacaggccaacgaagtggactggtgggacatggtgtgtaacgtgaagaagctgatcaacgagaaaaaggaggatggcaaggtgttttggcagaatctggctggctacaagagacaggaagccctgagaccatacctgagcagcgaggaagatcggaagaagggaaagaaattcgctcggtaccagctgggcgacctgctgctgcacctggaaaagaagcacggcgaggactggggaaaggtgtacgacgaggcctgggagcggattgacaagaaagtggaaggcctgagcaagcacatcaagctggaagaggaacggagaagcgaggacgcccagagcaaggccgccctgaccgactggctgcgggctaaggccagcttcgtgatcgagggcctgaaggaggccgacaaggacgagttctgcagatgcgagctgaagctgcagaagtggtacggggacctgcggggaaagcccttcgccatcgaagccgagaacagcatcctggacatcagcggcttcagcaagcagtacaactgtgccttcatctggcagaaggacggcgtgaagaagctgaacctgtacctgatcatcaactacttcaagggcggcaagctgcggttcaagaagatcaaacctgaagccttcgaagccaacagattctacaccgtgatcaacaaaaagagcggcgagatcgtgcccatggaggtgaacttcaacttcgacgaccccaacctgatcatcctgcctctggcctttggcaagagacagggcagagaattcatctggaacgacctgctgtccctggaaaccggcagcctgaagctggccaacggaagagtgatcgagaagacactgtacaacagaagaacccggcaggatgagcctgccctgttcgtggccctgaccttcgagcggcgggaggtcctggactcctccaatatcaaaccaatgaacctgatcggcgtggcaagaggcgaaaacatccccgccgtgatcgccctgaccgaccccgagggctgcccactgagccggtttaaggatagcctgggaaacccaacccacatcctgagaatcggcgagagctataaggagaagcagcggaccatccaggccaagaaggaggtggagcagcggagagccggcggctacagccggaagtacgccagcaaagccaagaatctggcagacgatatggtgagaaacaccgctagagatctgctgtactacgccgtgacccaggatgccatgctgatcttcgccaacctgagccggggcttcggccggcagggcaagcggaccttcatggccgagagacagtacacacggatggaggactggctgaccgccaagctggcctacgagggcctgagcaagacctacctgtccaagacactggcccagtacacctccaagacatgcagcaactgtgggtttaccatcaccagcgccgactacgacagggtgctggagaagctgaagaagacagcaacaggctggatgaccacaattaacggcaaggagctgaaggtggagggccagattacctactacaacagatacaagagacagaacgtagtcaaggacctgtccgtcgagctggatagactgagcgaagaatctgtgaacaacgacatctcctcctggacaaagggcagaagcggagaagctctgagcctcctgaagaaaagattctcccatagacccgtgcaggagaagttcgtgtgcctgaactgcggcttcgagacacacgcagccgagcaagccgccctgaacatcgccagatcctggctgttcctgcggagccaggagtacaagaaataccagacaaacaagacaaccggcaacaccgataagagagccttcgtcgagacctggcagtccttttaccggaagaagcttaaggaggtgtggaaacctgccgtgcggtctggcggatctggcggaggctccacaagcaagcccggcaccgtgagcttcgccgacgtggccgtgtacttcagcagggaggagtggggctacctgaggcccgcccagagggccctgtacagggacgtgatgagggagacctactgccacctgggcgccctgggcgtgggcggcagcaagcccgccctgatcagctgggtggaggaggaggccgagctgtgggaccccgccgccagggaccccgaggtgaccaagggcctgaccgagaccgacaccagccccaagaaaaagagaaaagtctaagctgccttctgcggggcttgccttctggccatgcccttcttctctcccttgcacctgtacctcttggtctttgaataaagcctgagtaggaaggctagcaaaaaaaaaaaaaaaaaaaaaaaaaaaaaaaaaaaaaaaaaaaaaaaaaaaaaaaaaaaaaaaaaaaaaaaaaaaaaaaa

SEQ ID NO: 3709 - RNA, 5419 nt, synthetic construct
  source 1..5419: mol_type = other RNA
aggaaataagagagaaaagaagagtaagaagaaatataagagccaccatggcccctaagaagaagcgtaaagtgagccgggtgaacggcagcggcagcggcggcggcatgaaccacgaccaggagttcgacccccctaaggtgtaccctcccgtccccgccgagaagagaaagcccatccgggtcctgagcctgttcgatggcatcgccaccggtctgctggtgctgaaggacctgggcatccaggtggataggtacattgcctccgaggtgtgcgaggactccatcaccgtgggaatggtgcgtcatcagggcaagatcatgtacgtgggcgacgtgcggagcgtgacacagaagcatatccaggagtggggccctttcgacctggtgatcggcggcagcccttgcaatgacctgagcatcgtgaacccagcccggaagggcctgtacgagggaaccggcagactgttcttcgagttttacagactgctgcacgacgcccggcctaaggaaggcgacgaccggcccttcttttggctgttcgagaatgtggtggccatgggagtcagcgacaagcgggatattagccggttcctggagagcaaccccgtgatgatcgatgccaaggaagtgagcgccgcccaccgggccagatacttctggggcaatctgcctggcatgaacagacccctggccagcaccgtgaacgacaagctggagctgcaggagtgcctggagcacggccggatcgccaagttcagcaaggtgagaaccatcaccacccgaagcaacagcatcaaacaaggcaaggaccagcactttcctgtgttcatgaacgagaaggaggacatcctgtggtgtaccgagatggagagagtgttcgggttcccagtccactacacagatgtcagcaacatgtctagactggccagacagagactgctgggaagaagctggtccgtccctgtgatcagacacctgttcgcccctctgaaggagtacttcgcctgcgtgagcagcggcaacagcaacgccaacagccggggccccagcttctctagcggcctggtgccactgtccctgagagggagccacatgggccccatggagatctacaaaaccgtgagcgcctggaagcggcagcctgtgcgcgtgctgagcctgtttcggaatatcgataaagtcctgaaaagcctgggattcctggagagcggctctggctccggcggtggcaccctgaagtacgtggaggatgtgacaaacgtggtcagacgggatgtggagaagtggggccccttcgatctggtgtacggcagcacccaacccctgggcagctcttgtgaccggtgccctggctggtacatgtttcagttccaccggatcctgcagtacgccctgccgagacaggagtcccagcggccattcttttggattttcatggacaacttgctgctgaccgaggatgaccaggaaactaccactcggttcctgcagaccgaagccgtgaccctgcaggacgtgagaggccgggactaccagaacgccatgcgggtgtggtccaacatccctggactgaaaagcaagcacgcacctctgacccctaaagaagaggagtacctgcaggcccaggtgcggagcagaagcaagctggacgcccctaaggtggatctgctggtgaagaattgcctcctgcccctgagagagtacttcaagtatttcagccagaatagtctgcccctgggcggcccaagcagcggcgcccctcctcccagcggcggcagcccagccggctccccaacctctaccgaggagggcacctctgagtccgccacccccgagagcggccctggcacctccaccgagcccagcgagggcagcgcacccggcagccctgccggcagccccacctccacagaggagggaaccagcaccgagcccagcgaaggcagcgccccaggcaccagcaccgagcctagtgagggcggctctggcggcggcagcgcccaggagattaaacggatcaacaagatcagaagaagacttgtgaaagacagcaacaccaagaaggccggcaagacaggccccatgaaaaccctgctggttagagtgatgacacccgatctgagagagcggctggaaaacctgagaaagaagcctgaaaatatcccccagcccatcagcaatacatctagagccaacctgaataagctgctgaccgattacaccgaaatgaagaaggcgatcctgcatgtgtactgggaagagttccagaaggaccctgtgggcctgatgagccgggtggcccagcctgccagcaagaagatcgatcagaacaagctgaaacctgagatggacgagaagggcaacctgaccaccgccggctttgcctgctctcagtgtggccagcccctgttcgtgtacaagctggagcaggtgtctgagaagggcaaggcttacaccaactacttcggacggtgcaatgtggccgagcacgaaaagctgatcctgctggcccagctgaagcccgagaaggatagcgacgaagccgtgacatatagcctgggaaagtttgggcagagggccctggatttctacagcattcatgtgaccaaggagtccacccaccccgtgaagcccctggcccagatcgccggaaacagatacgcctccggacctgtgggaaaggccctgagcgacgcatgtatgggcacaatcgcctccttcctgtctaagtaccaggacatcatcatcgaacaccagaaggtggtgaagggcaaccagaagagactggagagcctgcgggagctggccggcaaggaaaacctggaataccctagcgtgaccctgccacctcagcctcacaccaaggagggcgttgatgcctacaacgaagtgatcgcccgggtgcgaatgtgggtgaacctgaacctgtggcagaagctgaagctaagcagagatgatgccaagcctctgctgagactgaagggattcccttcctttcctctggtcgagagacaggccaacgaagtggactggtgggacatggtgtgtaacgtgaagaagctgatcaacgagaaaaaggaggatggcaaggtgttttggcagaatctggctggctacaagagacaggaagccctgagaccatacctgagcagcgaggaagatcggaagaagggaaagaaattcgctcggtaccagctgggcgacctgctgctgcacctggaaaagaagcacggcgaggactggggaaaggtgtacgacgaggcctgggagcggattgacaagaaagtggaaggcctgagcaagcacatcaagctggaagaggaacggagaagcgaggacgcccagagcaaggccgccctgaccgactggctgcgggctaaggccagcttcgtgatcgagggcctgaaggaggccgacaaggacgagttctgcagatgcgagctgaagctgcagaagtggtacggggacctgcggggaaagcccttcgccatcgaagccgagaacagcatcctggacatcagcggcttcagcaagcagtacaactgtgccttcatctggcagaaggacggcgtgaagaagctgaacctgtacctgatcatcaactacttcaagggcggcaagctgcggttcaagaagatcaaacctgaagccttcgaagccaacagattctacaccgtgatcaacaaaaagagcggcgagatcgtgcccatggaggtgaacttcaacttcgacgaccccaacctgatcatcctgcctctggcctttggcaagagacagggcagagaattcatctggaacgacctgctgtccctggaaaccggcagcctgaagctggccaacggaagagtgatcgagaagacactgtacaacagaagaacccggcaggatgagcctgccctgttcgtggccctgaccttcgagcggcgggaggtcctggactcctccaatatcaaaccaatgaacctgatcggcgtggcaagaggcgaaaacatccccgccgtgatcgccctgaccgaccccgagggctgcccactgagccggtttaaggatagcctgggaaacccaacccacatcctgagaatcggcgagagctataaggagaagcagcggaccatccaggccaagaaggaggtggagcagcggagagccggcggctacagccggaagtacgccagcaaagccaagaatctggcagacgatatggtgagaaacaccgctagagatctgctgtactacgccgtgacccaggatgccatgctgatcttcgccaacctgagccggggcttcggccggcagggcaagcggaccttcatggccgagagacagtacacacggatggaggactggctgaccgccaagctggcctacgagggcctgagcaagacctacctgtccaagacactggcccagtacacctccaagacatgcagcaactgtgggtttaccatcaccagcgccgactacgacagggtgctggagaagctgaagaagacagcaacaggctggatgaccacaattaacggcaaggagctgaaggtggagggccagattacctactacaacagatacaagagacagaacgtagtcaaggacctgtccgtcgagctggatagactgagcgaagaatctgtgaacaacgacatctcctcctggacaaagggcagaagcggagaagctctgagcctcctgaagaaaagattctcccatagacccgtgcaggagaagttcgtgtgcctgaactgcggcttcgagacacacgcagccgagcaagccgccctgaacatcgccagatcctggctgttcctgcggagccaggagtacaagaaataccagacaaacaagacaaccggcaacaccgataagagagccttcgtcgagacctggcagtccttttaccggaagaagcttaaggaggtgtggaaacctgccgtgcggtctggcggatctggcggaggctccacaagcatgttcagcgacgtgagcgtggacttcagccaggaggagtgggagtgcctggaccccggccagagggacctgtacagggacgtgatgctggagaactacagcaacctgctgagcatgggcctgtacatccccaagccccaggtgatcagcctgctggagcagggcaaggagccctggatggtgggcagggagctgaccaggggcctgtgcagcgacctggagagcatgtgcgagaccaagctgaccagccccaagaaaaagagaaaagtctaagctgccttctgcggggcttgccttctggccatgcccttcttctctcccttgcacctgtacctcttggtctttgaataaagcctgagtaggaaggctagcaaaaaaaaaaaaaaaaaaaaaaaaaaaaaaaaaaaaaaaaaaaaaaaaaaaaaaaaaaaaaaaaaaaaaaaaaaaaaaaa

SEQ ID NO: 3710 - RNA, 5419 nt, synthetic construct
  source 1..5419: mol_type = other RNA
aggaaataagagagaaaagaagagtaagaagaaatataagagccaccatggcccctaagaagaagcgtaaagtgagccgggtgaacggcagcggcagcggcggcggcatgaaccacgaccaggagttcgacccccctaaggtgtaccctcccgtccccgccgagaagagaaagcccatccgggtcctgagcctgttcgatggcatcgccaccggtctgctggtgctgaaggacctgggcatccaggtggataggtacattgcctccgaggtgtgcgaggactccatcaccgtgggaatggtgcgtcatcagggcaagatcatgtacgtgggcgacgtgcggagcgtgacacagaagcatatccaggagtggggccctttcgacctggtgatcggcggcagcccttgcaatgacctgagcatcgtgaacccagcccggaagggcctgtacgagggaaccggcagactgttcttcgagttttacagactgctgcacgacgcccggcctaaggaaggcgacgaccggcccttcttttggctgttcgagaatgtggtggccatgggagtcagcgacaagcgggatattagccggttcctggagagcaaccccgtgatgatcgatgccaaggaagtgagcgccgcccaccgggccagatacttctggggcaatctgcctggcatgaacagacccctggccagcaccgtgaacgacaagctggagctgcaggagtgcctggagcacggccggatcgccaagttcagcaaggtgagaaccatcaccacccgaagcaacagcatcaaacaaggcaaggaccagcactttcctgtgttcatgaacgagaaggaggacatcctgtggtgtaccgagatggagagagtgttcgggttcccagtccactacacagatgtcagcaacatgtctagactggccagacagagactgctgggaagaagctggtccgtccctgtgatcagacacctgttcgcccctctgaaggagtacttcgcctgcgtgagcagcggcaacagcaacgccaacagccggggccccagcttctctagcggcctggtgccactgtccctgagagggagccacatgggccccatggagatctacaaaaccgtgagcgcctggaagcggcagcctgtgcgcgtgctgagcctgtttcggaatatcgataaagtcctgaaaagcctgggattcctggagagcggctctggctccggcggtggcaccctgaagtacgtggaggatgtgacaaacgtggtcagacgggatgtggagaagtggggccccttcgatctggtgtacggcagcacccaacccctgggcagctcttgtgaccggtgccctggctggtacatgtttcagttccaccggatcctgcagtacgccctgccgagacaggagtcccagcggccattcttttggattttcatggacaacttgctgctgaccgaggatgaccaggaaactaccactcggttcctgcagaccgaagccgtgaccctgcaggacgtgagaggccgggactaccagaacgccatgcgggtgtggtccaacatccctggactgaaaagcaagcacgcacctctgacccctaaagaagaggagtacctgcaggcccaggtgcggagcagaagcaagctggacgcccctaaggtggatctgctggtgaagaattgcctcctgcccctgagagagtacttcaagtatttcagccagaatagtctgcccctgggcggcccaagcagcggcgcccctcctcccagcggcggcagcccagccggctccccaacctctaccgaggagggcacctctgagtccgccacccccgagagcggccctggcacctccaccgagcccagcgagggcagcgcacccggcagccctgccggcagccccacctccacagaggagggaaccagcaccgagcccagcgaaggcagcgccccaggcaccagcaccgagcctagtgagggcggctctggcggcggcagcgcccaggagattaaacggatcaacaagatcagaagaagacttgtgaaagacagcaacaccaagaaggccggcaagacaggccccatgaaaaccctgctggttagagtgatgacacccgatctgagagagcggctggaaaacctgagaaagaagcctgaaaatatcccccagcccatcagcaatacatctagagccaacctgaataagctgctgaccgattacaccgaaatgaagaaggcgatcctgcatgtgtactgggaagagttccagaaggaccctgtgggcctgatgagccgggtggcccagcctgccagcaagaagatcgatcagaacaagctgaaacctgagatggacgagaagggcaacctgaccaccgccggctttgcctgctctcagtgtggccagcccctgttcgtgtacaagctggagcaggtgtctgagaagggcaaggcttacaccaactacttcggacggtgcaatgtggccgagcacgaaaagctgatcctgctggcccagctgaagcccgagaaggatagcgacgaagccgtgacatatagcctgggaaagtttgggcagagggccctggatttctacagcattcatgtgaccaaggagtccacccaccccgtgaagcccctggcccagatcgccggaaacagatacgcctccggacctgtgggaaaggccctgagcgacgcatgtatgggcacaatcgcctccttcctgtctaagtaccaggacatcatcatcgaacaccagaaggtggtgaagggcaaccagaagagactggagagcctgcgggagctggccggcaaggaaaacctggaataccctagcgtgaccctgccacctcagcctcacaccaaggagggcgttgatgcctacaacgaagtgatcgcccgggtgcgaatgtgggtgaacctgaacctgtggcagaagctgaagctaagcagagatgatgccaagcctctgctgagactgaagggattcccttcctttcctctggtcgagagacaggccaacgaagtggactggtgggacatggtgtgtaacgtgaagaagctgatcaacgagaaaaaggaggatggcaaggtgttttggcagaatctggctggctacaagagacaggaagccctgagaccatacctgagcagcgaggaagatcggaagaagggaaagaaattcgctcggtaccagctgggcgacctgctgctgcacctggaaaagaagcacggcgaggactggggaaaggtgtacgacgaggcctgggagcggattgacaagaaagtggaaggcctgagcaagcacatcaagctggaagaggaacggagaagcgaggacgcccagagcaaggccgccctgaccgactggctgcgggctaaggccagcttcgtgatcgagggcctgaaggaggccgacaaggacgagttctgcagatgcgagctgaagctgcagaagtggtacggggacctgcggggaaagcccttcgccatcgaagccgagaacagcatcctggacatcagcggcttcagcaagcagtacaactgtgccttcatctggcagaaggacggcgtgaagaagctgaacctgtacctgatcatcaactacttcaagggcggcaagctgcggttcaagaagatcaaacctgaagccttcgaagccaacagattctacaccgtgatcaacaaaaagagcggcgagatcgtgcccatggaggtgaacttcaacttcgacgaccccaacctgatcatcctgcctctggcctttggcaagagacagggcagagaattcatctggaacgacctgctgtccctggaaaccggcagcctgaagctggccaacggaagagtgatcgagaagacactgtacaacagaagaacccggcaggatgagcctgccctgttcgtggccctgaccttcgagcggcgggaggtcctggactcctccaatatcaaaccaatgaacctgatcggcgtggcaagaggcgaaaacatccccgccgtgatcgccctgaccgaccccgagggctgcccactgagccggtttaaggatagcctgggaaacccaacccacatcctgagaatcggcgagagctataaggagaagcagcggaccatccaggccaagaaggaggtggagcagcggagagccggcggctacagccggaagtacgccagcaaagccaagaatctggcagacgatatggtgagaaacaccgctagagatctgctgtactacgccgtgacccaggatgccatgctgatcttcgccaacctgagccggggcttcggccggcagggcaagcggaccttcatggccgagagacagtacacacggatggaggactggctgaccgccaagctggcctacgagggcctgagcaagacctacctgtccaagacactggcccagtacacctccaagacatgcagcaactgtgggtttaccatcaccagcgccgactacgacagggtgctggagaagctgaagaagacagcaacaggctggatgaccacaattaacggcaaggagctgaaggtggagggccagattacctactacaacagatacaagagacagaacgtagtcaaggacctgtccgtcgagctggatagactgagcgaagaatctgtgaacaacgacatctcctcctggacaaagggcagaagcggagaagctctgagcctcctgaagaaaagattctcccatagacccgtgcaggagaagttcgtgtgcctgaactgcggcttcgagacacacgcagccgagcaagccgccctgaacatcgccagatcctggctgttcctgcggagccaggagtacaagaaataccagacaaacaagacaaccggcaacaccgataagagagccttcgtcgagacctggcagtccttttaccggaagaagcttaaggaggtgtggaaacctgccgtgcggtctggcggatctggcggaggctccacaagcaagcagggcggcgtgaccttcgaggacgtggccgtgtacttcagccaggaggagtggagcctgctgaacgaggcccagaggaggctgtaccacgacgtgatgctggagaacttcgccctgatcagcagcctgggctgctgctgcagggccgaggccgtggagacccccttcgagcagagcatcagcgtgggcgtgagccaggccaagacccccaaggagcccaggagcagccagaagacccacaccagccccaagaaaaagagaaaagtctaagctgccttctgcggggcttgccttctggccatgcccttcttctctcccttgcacctgtacctcttggtctttgaataaagcctgagtaggaaggctagcaaaaaaaaaaaaaaaaaaaaaaaaaaaaaaaaaaaaaaaaaaaaaaaaaaaaaaaaaaaaaaaaaaaaaaaaaaaaaaaa

SEQ ID NO: 3711 - RNA, 5419 nt, synthetic construct
  source 1..5419: mol_type = other RNA
aggaaataagagagaaaagaagagtaagaagaaatataagagccaccatggcccctaagaagaagcgtaaagtgagccgggtgaacggcagcggcagcggcggcggcatgaaccacgaccaggagttcgacccccctaaggtgtaccctcccgtccccgccgagaagagaaagcccatccgggtcctgagcctgttcgatggcatcgccaccggtctgctggtgctgaaggacctgggcatccaggtggataggtacattgcctccgaggtgtgcgaggactccatcaccgtgggaatggtgcgtcatcagggcaagatcatgtacgtgggcgacgtgcggagcgtgacacagaagcatatccaggagtggggccctttcgacctggtgatcggcggcagcccttgcaatgacctgagcatcgtgaacccagcccggaagggcctgtacgagggaaccggcagactgttcttcgagttttacagactgctgcacgacgcccggcctaaggaaggcgacgaccggcccttcttttggctgttcgagaatgtggtggccatgggagtcagcgacaagcgggatattagccggttcctggagagcaaccccgtgatgatcgatgccaaggaagtgagcgccgcccaccgggccagatacttctggggcaatctgcctggcatgaacagacccctggccagcaccgtgaacgacaagctggagctgcaggagtgcctggagcacggccggatcgccaagttcagcaaggtgagaaccatcaccacccgaagcaacagcatcaaacaaggcaaggaccagcactttcctgtgttcatgaacgagaaggaggacatcctgtggtgtaccgagatggagagagtgttcgggttcccagtccactacacagatgtcagcaacatgtctagactggccagacagagactgctgggaagaagctggtccgtccctgtgatcagacacctgttcgcccctctgaaggagtacttcgcctgcgtgagcagcggcaacagcaacgccaacagccggggccccagcttctctagcggcctggtgccactgtccctgagagggagccacatgggccccatggagatctacaaaaccgtgagcgcctggaagcggcagcctgtgcgcgtgctgagcctgtttcggaatatcgataaagtcctgaaaagcctgggattcctggagagcggctctggctccggcggtggcaccctgaagtacgtggaggatgtgacaaacgtggtcagacgggatgtggagaagtggggccccttcgatctggtgtacggcagcacccaacccctgggcagctcttgtgaccggtgccctggctggtacatgtttcagttccaccggatcctgcagtacgccctgccgagacaggagtcccagcggccattcttttggattttcatggacaacttgctgctgaccgaggatgaccaggaaactaccactcggttcctgcagaccgaagccgtgaccctgcaggacgtgagaggccgggactaccagaacgccatgcgggtgtggtccaacatccctggactgaaaagcaagcacgcacctctgacccctaaagaagaggagtacctgcaggcccaggtgcggagcagaagcaagctggacgcccctaaggtggatctgctggtgaagaattgcctcctgcccctgagagagtacttcaagtatttcagccagaatagtctgcccctgggcggcccaagcagcggcgcccctcctcccagcggcggcagcccagccggctccccaacctctaccgaggagggcacctctgagtccgccacccccgagagcggccctggcacctccaccgagcccagcgagggcagcgcacccggcagccctgccggcagccccacctccacagaggagggaaccagcaccgagcccagcgaaggcagcgccccaggcaccagcaccgagcctagtgagggcggctctggcggcggcagcgcccaggagattaaacggatcaacaagatcagaagaagacttgtgaaagacagcaacaccaagaaggccggcaagacaggccccatgaaaaccctgctggttagagtgatgacacccgatctgagagagcggctggaaaacctgagaaagaagcctgaaaatatcccccagcccatcagcaatacatctagagccaacctgaataagctgctgaccgattacaccgaaatgaagaaggcgatcctgcatgtgtactgggaagagttccagaaggaccctgtgggcctgatgagccgggtggcccagcctgccagcaagaagatcgatcagaacaagctgaaacctgagatggacgagaagggcaacctgaccaccgccggctttgcctgctctcagtgtggccagcccctgttcgtgtacaagctggagcaggtgtctgagaagggcaaggcttacaccaactacttcggacggtgcaatgtggccgagcacgaaaagctgatcctgctggcccagctgaagcccgagaaggatagcgacgaagccgtgacatatagcctgggaaagtttgggcagagggccctggatttctacagcattcatgtgaccaaggagtccacccaccccgtgaagcccctggcccagatcgccggaaacagatacgcctccggacctgtgggaaaggccctgagcgacgcatgtatgggcacaatcgcctccttcctgtctaagtaccaggacatcatcatcgaacaccagaaggtggtgaagggcaaccagaagagactggagagcctgcgggagctggccggcaaggaaaacctggaataccctagcgtgaccctgccacctcagcctcacaccaaggagggcgttgatgcctacaacgaagtgatcgcccgggtgcgaatgtgggtgaacctgaacctgtggcagaagctgaagctaagcagagatgatgccaagcctctgctgagactgaagggattcccttcctttcctctggtcgagagacaggccaacgaagtggactggtgggacatggtgtgtaacgtgaagaagctgatcaacgagaaaaaggaggatggcaaggtgttttggcagaatctggctggctacaagagacaggaagccctgagaccatacctgagcagcgaggaagatcggaagaagggaaagaaattcgctcggtaccagctgggcgacctgctgctgcacctggaaaagaagcacggcgaggactggggaaaggtgtacgacgaggcctgggagcggattgacaagaaagtggaaggcctgagcaagcacatcaagctggaagaggaacggagaagcgaggacgcccagagcaaggccgccctgaccgactggctgcgggctaaggccagcttcgtgatcgagggcctgaaggaggccgacaaggacgagttctgcagatgcgagctgaagctgcagaagtggtacggggacctgcggggaaagcccttcgccatcgaagccgagaacagcatcctggacatcagcggcttcagcaagcagtacaactgtgccttcatctggcagaaggacggcgtgaagaagctgaacctgtacctgatcatcaactacttcaagggcggcaagctgcggttcaagaagatcaaacctgaagccttcgaagccaacagattctacaccgtgatcaacaaaaagagcggcgagatcgtgcccatggaggtgaacttcaacttcgacgaccccaacctgatcatcctgcctctggcctttggcaagagacagggcagagaattcatctggaacgacctgctgtccctggaaaccggcagcctgaagctggccaacggaagagtgatcgagaagacactgtacaacagaagaacccggcaggatgagcctgccctgttcgtggccctgaccttcgagcggcgggaggtcctggactcctccaatatcaaaccaatgaacctgatcggcgtggcaagaggcgaaaacatccccgccgtgatcgccctgaccgaccccgagggctgcccactgagccggtttaaggatagcctgggaaacccaacccacatcctgagaatcggcgagagctataaggagaagcagcggaccatccaggccaagaaggaggtggagcagcggagagccggcggctacagccggaagtacgccagcaaagccaagaatctggcagacgatatggtgagaaacaccgctagagatctgctgtactacgccgtgacccaggatgccatgctgatcttcgccaacctgagccggggcttcggccggcagggcaagcggaccttcatggccgagagacagtacacacggatggaggactggctgaccgccaagctggcctacgagggcctgagcaagacctacctgtccaagacactggcccagtacacctccaagacatgcagcaactgtgggtttaccatcaccagcgccgactacgacagggtgctggagaagctgaagaagacagcaacaggctggatgaccacaattaacggcaaggagctgaaggtggagggccagattacctactacaacagatacaagagacagaacgtagtcaaggacctgtccgtcgagctggatagactgagcgaagaatctgtgaacaacgacatctcctcctggacaaagggcagaagcggagaagctctgagcctcctgaagaaaagattctcccatagacccgtgcaggagaagttcgtgtgcctgaactgcggcttcgagacacacgcagccgagcaagccgccctgaacatcgccagatcctggctgttcctgcggagccaggagtacaagaaataccagacaaacaagacaaccggcaacaccgataagagagccttcgtcgagacctggcagtccttttaccggaagaagcttaaggaggtgtggaaacctgccgtgcggtctggcggatctggcggaggctccacaagctgcagccacaggagctgcagggaggaccccggcaccagcgagagcagggagatggaccccgtggccttcaaggacgtggccgtgaacttcacccaggaggagtgggccctgctggacatcagccagaggaagctgtacagggaggtgatgctggagaccttcaggaacctgaccagcatcggcaagaagtggaaggaccagaacatcgagttcgagtaccagaaccccaggaggaacttcaggaccagccccaagaaaaagagaaaagtctaagctgccttctgcggggcttgccttctggccatgcccttcttctctcccttgcacctgtacctcttggtctttgaataaagcctgagtaggaaggctagcaaaaaaaaaaaaaaaaaaaaaaaaaaaaaaaaaaaaaaaaaaaaaaaaaaaaaaaaaaaaaaaaaaaaaaaaaaaaaaaa

SEQ ID NO: 3712 - RNA, 5419 nt, synthetic construct
  source 1..5419: mol_type = other RNA
aggaaataagagagaaaagaagagtaagaagaaatataagagccaccatggcccctaagaagaagcgtaaagtgagccgggtgaacggcagcggcagcggcggcggcatgaaccacgaccaggagttcgacccccctaaggtgtaccctcccgtccccgccgagaagagaaagcccatccgggtcctgagcctgttcgatggcatcgccaccggtctgctggtgctgaaggacctgggcatccaggtggataggtacattgcctccgaggtgtgcgaggactccatcaccgtgggaatggtgcgtcatcagggcaagatcatgtacgtgggcgacgtgcggagcgtgacacagaagcatatccaggagtggggccctttcgacctggtgatcggcggcagcccttgcaatgacctgagcatcgtgaacccagcccggaagggcctgtacgagggaaccggcagactgttcttcgagttttacagactgctgcacgacgcccggcctaaggaaggcgacgaccggcccttcttttggctgttcgagaatgtggtggccatgggagtcagcgacaagcgggatattagccggttcctggagagcaaccccgtgatgatcgatgccaaggaagtgagcgccgcccaccgggccagatacttctggggcaatctgcctggcatgaacagacccctggccagcaccgtgaacgacaagctggagctgcaggagtgcctggagcacggccggatcgccaagttcagcaaggtgagaaccatcaccacccgaagcaacagcatcaaacaaggcaaggaccagcactttcctgtgttcatgaacgagaaggaggacatcctgtggtgtaccgagatggagagagtgttcgggttcccagtccactacacagatgtcagcaacatgtctagactggccagacagagactgctgggaagaagctggtccgtccctgtgatcagacacctgttcgcccctctgaaggagtacttcgcctgcgtgagcagcggcaacagcaacgccaacagccggggccccagcttctctagcggcctggtgccactgtccctgagagggagccacatgggccccatggagatctacaaaaccgtgagcgcctggaagcggcagcctgtgcgcgtgctgagcctgtttcggaatatcgataaagtcctgaaaagcctgggattcctggagagcggctctggctccggcggtggcaccctgaagtacgtggaggatgtgacaaacgtggtcagacgggatgtggagaagtggggccccttcgatctggtgtacggcagcacccaacccctgggcagctcttgtgaccggtgccctggctggtacatgtttcagttccaccggatcctgcagtacgccctgccgagacaggagtcccagcggccattcttttggattttcatggacaacttgctgctgaccgaggatgaccaggaaactaccactcggttcctgcagaccgaagccgtgaccctgcaggacgtgagaggccgggactaccagaacgccatgcgggtgtggtccaacatccctggactgaaaagcaagcacgcacctctgacccctaaagaagaggagtacctgcaggcccaggtgcggagcagaagcaagctggacgcccctaaggtggatctgctggtgaagaattgcctcctgcccctgagagagtacttcaagtatttcagccagaatagtctgcccctgggcggcccaagcagcggcgcccctcctcccagcggcggcagcccagccggctccccaacctctaccgaggagggcacctctgagtccgccacccccgagagcggccctggcacctccaccgagcccagcgagggcagcgcacccggcagccctgccggcagccccacctccacagaggagggaaccagcaccgagcccagcgaaggcagcgccccaggcaccagcaccgagcctagtgagggcggctctggcggcggcagcgcccaggagattaaacggatcaacaagatcagaagaagacttgtgaaagacagcaacaccaagaaggccggcaagacaggccccatgaaaaccctgctggttagagtgatgacacccgatctgagagagcggctggaaaacctgagaaagaagcctgaaaatatcccccagcccatcagcaatacatctagagccaacctgaataagctgctgaccgattacaccgaaatgaagaaggcgatcctgcatgtgtactgggaagagttccagaaggaccctgtgggcctgatgagccgggtggcccagcctgccagcaagaagatcgatcagaacaagctgaaacctgagatggacgagaagggcaacctgaccaccgccggctttgcctgctctcagtgtggccagcccctgttcgtgtacaagctggagcaggtgtctgagaagggcaaggcttacaccaactacttcggacggtgcaatgtggccgagcacgaaaagctgatcctgctggcccagctgaagcccgagaaggatagcgacgaagccgtgacatatagcctgggaaagtttgggcagagggccctggatttctacagcattcatgtgaccaaggagtccacccaccccgtgaagcccctggcccagatcgccggaaacagatacgcctccggacctgtgggaaaggccctgagcgacgcatgtatgggcacaatcgcctccttcctgtctaagtaccaggacatcatcatcgaacaccagaaggtggtgaagggcaaccagaagagactggagagcctgcgggagctggccggcaaggaaaacctggaataccctagcgtgaccctgccacctcagcctcacaccaaggagggcgttgatgcctacaacgaagtgatcgcccgggtgcgaatgtgggtgaacctgaacctgtggcagaagctgaagctaagcagagatgatgccaagcctctgctgagactgaagggattcccttcctttcctctggtcgagagacaggccaacgaagtggactggtgggacatggtgtgtaacgtgaagaagctgatcaacgagaaaaaggaggatggcaaggtgttttggcagaatctggctggctacaagagacaggaagccctgagaccatacctgagcagcgaggaagatcggaagaagggaaagaaattcgctcggtaccagctgggcgacctgctgctgcacctggaaaagaagcacggcgaggactggggaaaggtgtacgacgaggcctgggagcggattgacaagaaagtggaaggcctgagcaagcacatcaagctggaagaggaacggagaagcgaggacgcccagagcaaggccgccctgaccgactggctgcgggctaaggccagcttcgtgatcgagggcctgaaggaggccgacaaggacgagttctgcagatgcgagctgaagctgcagaagtggtacggggacctgcggggaaagcccttcgccatcgaagccgagaacagcatcctggacatcagcggcttcagcaagcagtacaactgtgccttcatctggcagaaggacggcgtgaagaagctgaacctgtacctgatcatcaactacttcaagggcggcaagctgcggttcaagaagatcaaacctgaagccttcgaagccaacagattctacaccgtgatcaacaaaaagagcggcgagatcgtgcccatggaggtgaacttcaacttcgacgaccccaacctgatcatcctgcctctggcctttggcaagagacagggcagagaattcatctggaacgacctgctgtccctggaaaccggcagcctgaagctggccaacggaagagtgatcgagaagacactgtacaacagaagaacccggcaggatgagcctgccctgttcgtggccctgaccttcgagcggcgggaggtcctggactcctccaatatcaaaccaatgaacctgatcggcgtggcaagaggcgaaaacatccccgccgtgatcgccctgaccgaccccgagggctgcccactgagccggtttaaggatagcctgggaaacccaacccacatcctgagaatcggcgagagctataaggagaagcagcggaccatccaggccaagaaggaggtggagcagcggagagccggcggctacagccggaagtacgccagcaaagccaagaatctggcagacgatatggtgagaaacaccgctagagatctgctgtactacgccgtgacccaggatgccatgctgatcttcgccaacctgagccggggcttcggccggcagggcaagcggaccttcatggccgagagacagtacacacggatggaggactggctgaccgccaagctggcctacgagggcctgagcaagacctacctgtccaagacactggcccagtacacctccaagacatgcagcaactgtgggtttaccatcaccagcgccgactacgacagggtgctggagaagctgaagaagacagcaacaggctggatgaccacaattaacggcaaggagctgaaggtggagggccagattacctactacaacagatacaagagacagaacgtagtcaaggacctgtccgtcgagctggatagactgagcgaagaatctgtgaacaacgacatctcctcctggacaaagggcagaagcggagaagctctgagcctcctgaagaaaagattctcccatagacccgtgcaggagaagttcgtgtgcctgaactgcggcttcgagacacacgcagccgagcaagccgccctgaacatcgccagatcctggctgttcctgcggagccaggagtacaagaaataccagacaaacaagacaaccggcaacaccgataagagagccttcgtcgagacctggcagtccttttaccggaagaagcttaaggaggtgtggaaacctgccgtgcggtctggcggatctggcggaggctccacaagcagccagggcagcatcaccttcaaggacgtggccgtggacttcacccaggaggagtggtgcctgctggaccccagccagaaggagctgtacagggaggtgatgctggagaacgtgcagaacctgctgttcgtggagaccaacttcgaggtgaaggagatcagcaccaagcagagcctgttcgtggagggcagcggcccccccaggggcaagaacaagggcccctgcgacttcctgctgagggagaccagccccaagaaaaagagaaaagtctaagctgccttctgcggggcttgccttctggccatgcccttcttctctcccttgcacctgtacctcttggtctttgaataaagcctgagtaggaaggctagcaaaaaaaaaaaaaaaaaaaaaaaaaaaaaaaaaaaaaaaaaaaaaaaaaaaaaaaaaaaaaaaaaaaaaaaaaaaaaaaa

SEQ ID NO: 3713 - RNA, 5419 nt, synthetic construct
  source 1..5419: mol_type = other RNA
aggaaataagagagaaaagaagagtaagaagaaatataagagccaccatggcccctaagaagaagcgtaaagtgagccgggtgaacggcagcggcagcggcggcggcatgaaccacgaccaggagttcgacccccctaaggtgtaccctcccgtccccgccgagaagagaaagcccatccgggtcctgagcctgttcgatggcatcgccaccggtctgctggtgctgaaggacctgggcatccaggtggataggtacattgcctccgaggtgtgcgaggactccatcaccgtgggaatggtgcgtcatcagggcaagatcatgtacgtgggcgacgtgcggagcgtgacacagaagcatatccaggagtggggccctttcgacctggtgatcggcggcagcccttgcaatgacctgagcatcgtgaacccagcccggaagggcctgtacgagggaaccggcagactgttcttcgagttttacagactgctgcacgacgcccggcctaaggaaggcgacgaccggcccttcttttggctgttcgagaatgtggtggccatgggagtcagcgacaagcgggatattagccggttcctggagagcaaccccgtgatgatcgatgccaaggaagtgagcgccgcccaccgggccagatacttctggggcaatctgcctggcatgaacagacccctggccagcaccgtgaacgacaagctggagctgcaggagtgcctggagcacggccggatcgccaagttcagcaaggtgagaaccatcaccacccgaagcaacagcatcaaacaaggcaaggaccagcactttcctgtgttcatgaacgagaaggaggacatcctgtggtgtaccgagatggagagagtgttcgggttcccagtccactacacagatgtcagcaacatgtctagactggccagacagagactgctgggaagaagctggtccgtccctgtgatcagacacctgttcgcccctctgaaggagtacttcgcctgcgtgagcagcggcaacagcaacgccaacagccggggccccagcttctctagcggcctggtgccactgtccctgagagggagccacatgggccccatggagatctacaaaaccgtgagcgcctggaagcggcagcctgtgcgcgtgctgagcctgtttcggaatatcgataaagtcctgaaaagcctgggattcctggagagcggctctggctccggcggtggcaccctgaagtacgtggaggatgtgacaaacgtggtcagacgggatgtggagaagtggggccccttcgatctggtgtacggcagcacccaacccctgggcagctcttgtgaccggtgccctggctggtacatgtttcagttccaccggatcctgcagtacgccctgccgagacaggagtcccagcggccattcttttggattttcatggacaacttgctgctgaccgaggatgaccaggaaactaccactcggttcctgcagaccgaagccgtgaccctgcaggacgtgagaggccgggactaccagaacgccatgcgggtgtggtccaacatccctggactgaaaagcaagcacgcacctctgacccctaaagaagaggagtacctgcaggcccaggtgcggagcagaagcaagctggacgcccctaaggtggatctgctggtgaagaattgcctcctgcccctgagagagtacttcaagtatttcagccagaatagtctgcccctgggcggcccaagcagcggcgcccctcctcccagcggcggcagcccagccggctccccaacctctaccgaggagggcacctctgagtccgccacccccgagagcggccctggcacctccaccgagcccagcgagggcagcgcacccggcagccctgccggcagccccacctccacagaggagggaaccagcaccgagcccagcgaaggcagcgccccaggcaccagcaccgagcctagtgagggcggctctggcggcggcagcgcccaggagattaaacggatcaacaagatcagaagaagacttgtgaaagacagcaacaccaagaaggccggcaagacaggccccatgaaaaccctgctggttagagtgatgacacccgatctgagagagcggctggaaaacctgagaaagaagcctgaaaatatcccccagcccatcagcaatacatctagagccaacctgaataagctgctgaccgattacaccgaaatgaagaaggcgatcctgcatgtgtactgggaagagttccagaaggaccctgtgggcctgatgagccgggtggcccagcctgccagcaagaagatcgatcagaacaagctgaaacctgagatggacgagaagggcaacctgaccaccgccggctttgcctgctctcagtgtggccagcccctgttcgtgtacaagctggagcaggtgtctgagaagggcaaggcttacaccaactacttcggacggtgcaatgtggccgagcacgaaaagctgatcctgctggcccagctgaagcccgagaaggatagcgacgaagccgtgacatatagcctgggaaagtttgggcagagggccctggatttctacagcattcatgtgaccaaggagtccacccaccccgtgaagcccctggcccagatcgccggaaacagatacgcctccggacctgtgggaaaggccctgagcgacgcatgtatgggcacaatcgcctccttcctgtctaagtaccaggacatcatcatcgaacaccagaaggtggtgaagggcaaccagaagagactggagagcctgcgggagctggccggcaaggaaaacctggaataccctagcgtgaccctgccacctcagcctcacaccaaggagggcgttgatgcctacaacgaagtgatcgcccgggtgcgaatgtgggtgaacctgaacctgtggcagaagctgaagctaagcagagatgatgccaagcctctgctgagactgaagggattcccttcctttcctctggtcgagagacaggccaacgaagtggactggtgggacatggtgtgtaacgtgaagaagctgatcaacgagaaaaaggaggatggcaaggtgttttggcagaatctggctggctacaagagacaggaagccctgagaccatacctgagcagcgaggaagatcggaagaagggaaagaaattcgctcggtaccagctgggcgacctgctgctgcacctggaaaagaagcacggcgaggactggggaaaggtgtacgacgaggcctgggagcggattgacaagaaagtggaaggcctgagcaagcacatcaagctggaagaggaacggagaagcgaggacgcccagagcaaggccgccctgaccgactggctgcgggctaaggccagcttcgtgatcgagggcctgaaggaggccgacaaggacgagttctgcagatgcgagctgaagctgcagaagtggtacggggacctgcggggaaagcccttcgccatcgaagccgagaacagcatcctggacatcagcggcttcagcaagcagtacaactgtgccttcatctggcagaaggacggcgtgaagaagctgaacctgtacctgatcatcaactacttcaagggcggcaagctgcggttcaagaagatcaaacctgaagccttcgaagccaacagattctacaccgtgatcaacaaaaagagcggcgagatcgtgcccatggaggtgaacttcaacttcgacgaccccaacctgatcatcctgcctctggcctttggcaagagacagggcagagaattcatctggaacgacctgctgtccctggaaaccggcagcctgaagctggccaacggaagagtgatcgagaagacactgtacaacagaagaacccggcaggatgagcctgccctgttcgtggccctgaccttcgagcggcgggaggtcctggactcctccaatatcaaaccaatgaacctgatcggcgtggcaagaggcgaaaacatccccgccgtgatcgccctgaccgaccccgagggctgcccactgagccggtttaaggatagcctgggaaacccaacccacatcctgagaatcggcgagagctataaggagaagcagcggaccatccaggccaagaaggaggtggagcagcggagagccggcggctacagccggaagtacgccagcaaagccaagaatctggcagacgatatggtgagaaacaccgctagagatctgctgtactacgccgtgacccaggatgccatgctgatcttcgccaacctgagccggggcttcggccggcagggcaagcggaccttcatggccgagagacagtacacacggatggaggactggctgaccgccaagctggcctacgagggcctgagcaagacctacctgtccaagacactggcccagtacacctccaagacatgcagcaactgtgggtttaccatcaccagcgccgactacgacagggtgctggagaagctgaagaagacagcaacaggctggatgaccacaattaacggcaaggagctgaaggtggagggccagattacctactacaacagatacaagagacagaacgtagtcaaggacctgtccgtcgagctggatagactgagcgaagaatctgtgaacaacgacatctcctcctggacaaagggcagaagcggagaagctctgagcctcctgaagaaaagattctcccatagacccgtgcaggagaagttcgtgtgcctgaactgcggcttcgagacacacgcagccgagcaagccgccctgaacatcgccagatcctggctgttcctgcggagccaggagtacaagaaataccagacaaacaagacaaccggcaacaccgataagagagccttcgtcgagacctggcagtccttttaccggaagaagcttaaggaggtgtggaaacctgccgtgcggtctggcggatctggcggaggctccacaagccccctggagagcgtgaccttcgaggacgtggccatcaacttcacccaggaggagtgggccctgctggacaccagccagaggaacctgttcaggaacgtgatgctggagaacatcagccacctggtgagcatcggctaccagatcagcaagagcgacgtgatcagccagctgaagcagggcaaggagctgaggaagagcaccgtgagcaagcagtgcggcaagagcctgagccagggcagcttcaccagccccaagaaaaagagaaaagtctaagctgccttctgcggggcttgccttctggccatgcccttcttctctcccttgcacctgtacctcttggtctttgaataaagcctgagtaggaaggctagcaaaaaaaaaaaaaaaaaaaaaaaaaaaaaaaaaaaaaaaaaaaaaaaaaaaaaaaaaaaaaaaaaaaaaaaaaaaaaaaa

SEQ ID NO: 3714 - RNA, 5419 nt, synthetic construct
  source 1..5419: mol_type = other RNA
aggaaataagagagaaaagaagagtaagaagaaatataagagccaccatggcccctaagaagaagcgtaaagtgagccgggtgaacggcagcggcagcggcggcggcatgaaccacgaccaggagttcgacccccctaaggtgtaccctcccgtccccgccgagaagagaaagcccatccgggtcctgagcctgttcgatggcatcgccaccggtctgctggtgctgaaggacctgggcatccaggtggataggtacattgcctccgaggtgtgcgaggactccatcaccgtgggaatggtgcgtcatcagggcaagatcatgtacgtgggcgacgtgcggagcgtgacacagaagcatatccaggagtggggccctttcgacctggtgatcggcggcagcccttgcaatgacctgagcatcgtgaacccagcccggaagggcctgtacgagggaaccggcagactgttcttcgagttttacagactgctgcacgacgcccggcctaaggaaggcgacgaccggcccttcttttggctgttcgagaatgtggtggccatgggagtcagcgacaagcgggatattagccggttcctggagagcaaccccgtgatgatcgatgccaaggaagtgagcgccgcccaccgggccagatacttctggggcaatctgcctggcatgaacagacccctggccagcaccgtgaacgacaagctggagctgcaggagtgcctggagcacggccggatcgccaagttcagcaaggtgagaaccatcaccacccgaagcaacagcatcaaacaaggcaaggaccagcactttcctgtgttcatgaacgagaaggaggacatcctgtggtgtaccgagatggagagagtgttcgggttcccagtccactacacagatgtcagcaacatgtctagactggccagacagagactgctgggaagaagctggtccgtccctgtgatcagacacctgttcgcccctctgaaggagtacttcgcctgcgtgagcagcggcaacagcaacgccaacagccggggccccagcttctctagcggcctggtgccactgtccctgagagggagccacatgggccccatggagatctacaaaaccgtgagcgcctggaagcggcagcctgtgcgcgtgctgagcctgtttcggaatatcgataaagtcctgaaaagcctgggattcctggagagcggctctggctccggcggtggcaccctgaagtacgtggaggatgtgacaaacgtggtcagacgggatgtggagaagtggggccccttcgatctggtgtacggcagcacccaacccctgggcagctcttgtgaccggtgccctggctggtacatgtttcagttccaccggatcctgcagtacgccctgccgagacaggagtcccagcggccattcttttggattttcatggacaacttgctgctgaccgaggatgaccaggaaactaccactcggttcctgcagaccgaagccgtgaccctgcaggacgtgagaggccgggactaccagaacgccatgcgggtgtggtccaacatccctggactgaaaagcaagcacgcacctctgacccctaaagaagaggagtacctgcaggcccaggtgcggagcagaagcaagctggacgcccctaaggtggatctgctggtgaagaattgcctcctgcccctgagagagtacttcaagtatttcagccagaatagtctgcccctgggcggcccaagcagcggcgcccctcctcccagcggcggcagcccagccggctccccaacctctaccgaggagggcacctctgagtccgccacccccgagagcggccctggcacctccaccgagcccagcgagggcagcgcacccggcagccctgccggcagccccacctccacagaggagggaaccagcaccgagcccagcgaaggcagcgccccaggcaccagcaccgagcctagtgagggcggctctggcggcggcagcgcccaggagattaaacggatcaacaagatcagaagaagacttgtgaaagacagcaacaccaagaaggccggcaagacaggccccatgaaaaccctgctggttagagtgatgacacccgatctgagagagcggctggaaaacctgagaaagaagcctgaaaatatcccccagcccatcagcaatacatctagagccaacctgaataagctgctgaccgattacaccgaaatgaagaaggcgatcctgcatgtgtactgggaagagttccagaaggaccctgtgggcctgatgagccgggtggcccagcctgccagcaagaagatcgatcagaacaagctgaaacctgagatggacgagaagggcaacctgaccaccgccggctttgcctgctctcagtgtggccagcccctgttcgtgtacaagctggagcaggtgtctgagaagggcaaggcttacaccaactacttcggacggtgcaatgtggccgagcacgaaaagctgatcctgctggcccagctgaagcccgagaaggatagcgacgaagccgtgacatatagcctgggaaagtttgggcagagggccctggatttctacagcattcatgtgaccaaggagtccacccaccccgtgaagcccctggcccagatcgccggaaacagatacgcctccggacctgtgggaaaggccctgagcgacgcatgtatgggcacaatcgcctccttcctgtctaagtaccaggacatcatcatcgaacaccagaaggtggtgaagggcaaccagaagagactggagagcctgcgggagctggccggcaaggaaaacctggaataccctagcgtgaccctgccacctcagcctcacaccaaggagggcgttgatgcctacaacgaagtgatcgcccgggtgcgaatgtgggtgaacctgaacctgtggcagaagctgaagctaagcagagatgatgccaagcctctgctgagactgaagggattcccttcctttcctctggtcgagagacaggccaacgaagtggactggtgggacatggtgtgtaacgtgaagaagctgatcaacgagaaaaaggaggatggcaaggtgttttggcagaatctggctggctacaagagacaggaagccctgagaccatacctgagcagcgaggaagatcggaagaagggaaagaaattcgctcggtaccagctgggcgacctgctgctgcacctggaaaagaagcacggcgaggactggggaaaggtgtacgacgaggcctgggagcggattgacaagaaagtggaaggcctgagcaagcacatcaagctggaagaggaacggagaagcgaggacgcccagagcaaggccgccctgaccgactggctgcgggctaaggccagcttcgtgatcgagggcctgaaggaggccgacaaggacgagttctgcagatgcgagctgaagctgcagaagtggtacggggacctgcggggaaagcccttcgccatcgaagccgagaacagcatcctggacatcagcggcttcagcaagcagtacaactgtgccttcatctggcagaaggacggcgtgaagaagctgaacctgtacctgatcatcaactacttcaagggcggcaagctgcggttcaagaagatcaaacctgaagccttcgaagccaacagattctacaccgtgatcaacaaaaagagcggcgagatcgtgcccatggaggtgaacttcaacttcgacgaccccaacctgatcatcctgcctctggcctttggcaagagacagggcagagaattcatctggaacgacctgctgtccctggaaaccggcagcctgaagctggccaacggaagagtgatcgagaagacactgtacaacagaagaacccggcaggatgagcctgccctgttcgtggccctgaccttcgagcggcgggaggtcctggactcctccaatatcaaaccaatgaacctgatcggcgtggcaagaggcgaaaacatccccgccgtgatcgccctgaccgaccccgagggctgcccactgagccggtttaaggatagcctgggaaacccaacccacatcctgagaatcggcgagagctataaggagaagcagcggaccatccaggccaagaaggaggtggagcagcggagagccggcggctacagccggaagtacgccagcaaagccaagaatctggcagacgatatggtgagaaacaccgctagagatctgctgtactacgccgtgacccaggatgccatgctgatcttcgccaacctgagccggggcttcggccggcagggcaagcggaccttcatggccgagagacagtacacacggatggaggactggctgaccgccaagctggcctacgagggcctgagcaagacctacctgtccaagacactggcccagtacacctccaagacatgcagcaactgtgggtttaccatcaccagcgccgactacgacagggtgctggagaagctgaagaagacagcaacaggctggatgaccacaattaacggcaaggagctgaaggtggagggccagattacctactacaacagatacaagagacagaacgtagtcaaggacctgtccgtcgagctggatagactgagcgaagaatctgtgaacaacgacatctcctcctggacaaagggcagaagcggagaagctctgagcctcctgaagaaaagattctcccatagacccgtgcaggagaagttcgtgtgcctgaactgcggcttcgagacacacgcagccgagcaagccgccctgaacatcgccagatcctggctgttcctgcggagccaggagtacaagaaataccagacaaacaagacaaccggcaacaccgataagagagccttcgtcgagacctggcagtccttttaccggaagaagcttaaggaggtgtggaaacctgccgtgcggtctggcggatctggcggaggctccacaagcatgagcctgggcagcgagctgttcagggacgtggccatcgtgttcagccaggaggagtggcagtgcctggcccccgcccagagggacctgtacagggacgtgatgctggagacctacaacaacctggtgagcctgggcctggccatcagcaagcccgacgtgatcagcttcctggagcagggcaaggagccctggatggtggagagggtggtgagcggcggcctgtgccccgtgctggagagcaccagccccaagaaaaagagaaaagtctaagctgccttctgcggggcttgccttctggccatgcccttcttctctcccttgcacctgtacctcttggtctttgaataaagcctgagtaggaaggctagcaaaaaaaaaaaaaaaaaaaaaaaaaaaaaaaaaaaaaaaaaaaaaaaaaaaaaaaaaaaaaaaaaaaaaaaaaaaaaaaa

SEQ ID NO: 3715 - RNA, 5419 nt, synthetic construct
  source 1..5419: mol_type = other RNA
aggaaataagagagaaaagaagagtaagaagaaatataagagccaccatggcccctaagaagaagcgtaaagtgagccgggtgaacggcagcggcagcggcggcggcatgaaccacgaccaggagttcgacccccctaaggtgtaccctcccgtccccgccgagaagagaaagcccatccgggtcctgagcctgttcgatggcatcgccaccggtctgctggtgctgaaggacctgggcatccaggtggataggtacattgcctccgaggtgtgcgaggactccatcaccgtgggaatggtgcgtcatcagggcaagatcatgtacgtgggcgacgtgcggagcgtgacacagaagcatatccaggagtggggccctttcgacctggtgatcggcggcagcccttgcaatgacctgagcatcgtgaacccagcccggaagggcctgtacgagggaaccggcagactgttcttcgagttttacagactgctgcacgacgcccggcctaaggaaggcgacgaccggcccttcttttggctgttcgagaatgtggtggccatgggagtcagcgacaagcgggatattagccggttcctggagagcaaccccgtgatgatcgatgccaaggaagtgagcgccgcccaccgggccagatacttctggggcaatctgcctggcatgaacagacccctggccagcaccgtgaacgacaagctggagctgcaggagtgcctggagcacggccggatcgccaagttcagcaaggtgagaaccatcaccacccgaagcaacagcatcaaacaaggcaaggaccagcactttcctgtgttcatgaacgagaaggaggacatcctgtggtgtaccgagatggagagagtgttcgggttcccagtccactacacagatgtcagcaacatgtctagactggccagacagagactgctgggaagaagctggtccgtccctgtgatcagacacctgttcgcccctctgaaggagtacttcgcctgcgtgagcagcggcaacagcaacgccaacagccggggccccagcttctctagcggcctggtgccactgtccctgagagggagccacatgggccccatggagatctacaaaaccgtgagcgcctggaagcggcagcctgtgcgcgtgctgagcctgtttcggaatatcgataaagtcctgaaaagcctgggattcctggagagcggctctggctccggcggtggcaccctgaagtacgtggaggatgtgacaaacgtggtcagacgggatgtggagaagtggggccccttcgatctggtgtacggcagcacccaacccctgggcagctcttgtgaccggtgccctggctggtacatgtttcagttccaccggatcctgcagtacgccctgccgagacaggagtcccagcggccattcttttggattttcatggacaacttgctgctgaccgaggatgaccaggaaactaccactcggttcctgcagaccgaagccgtgaccctgcaggacgtgagaggccgggactaccagaacgccatgcgggtgtggtccaacatccctggactgaaaagcaagcacgcacctctgacccctaaagaagaggagtacctgcaggcccaggtgcggagcagaagcaagctggacgcccctaaggtggatctgctggtgaagaattgcctcctgcccctgagagagtacttcaagtatttcagccagaatagtctgcccctgggcggcccaagcagcggcgcccctcctcccagcggcggcagcccagccggctccccaacctctaccgaggagggcacctctgagtccgccacccccgagagcggccctggcacctccaccgagcccagcgagggcagcgcacccggcagccctgccggcagccccacctccacagaggagggaaccagcaccgagcccagcgaaggcagcgccccaggcaccagcaccgagcctagtgagggcggctctggcggcggcagcgcccaggagattaaacggatcaacaagatcagaagaagacttgtgaaagacagcaacaccaagaaggccggcaagacaggccccatgaaaaccctgctggttagagtgatgacacccgatctgagagagcggctggaaaacctgagaaagaagcctgaaaatatcccccagcccatcagcaatacatctagagccaacctgaataagctgctgaccgattacaccgaaatgaagaaggcgatcctgcatgtgtactgggaagagttccagaaggaccctgtgggcctgatgagccgggtggcccagcctgccagcaagaagatcgatcagaacaagctgaaacctgagatggacgagaagggcaacctgaccaccgccggctttgcctgctctcagtgtggccagcccctgttcgtgtacaagctggagcaggtgtctgagaagggcaaggcttacaccaactacttcggacggtgcaatgtggccgagcacgaaaagctgatcctgctggcccagctgaagcccgagaaggatagcgacgaagccgtgacatatagcctgggaaagtttgggcagagggccctggatttctacagcattcatgtgaccaaggagtccacccaccccgtgaagcccctggcccagatcgccggaaacagatacgcctccggacctgtgggaaaggccctgagcgacgcatgtatgggcacaatcgcctccttcctgtctaagtaccaggacatcatcatcgaacaccagaaggtggtgaagggcaaccagaagagactggagagcctgcgggagctggccggcaaggaaaacctggaataccctagcgtgaccctgccacctcagcctcacaccaaggagggcgttgatgcctacaacgaagtgatcgcccgggtgcgaatgtgggtgaacctgaacctgtggcagaagctgaagctaagcagagatgatgccaagcctctgctgagactgaagggattcccttcctttcctctggtcgagagacaggccaacgaagtggactggtgggacatggtgtgtaacgtgaagaagctgatcaacgagaaaaaggaggatggcaaggtgttttggcagaatctggctggctacaagagacaggaagccctgagaccatacctgagcagcgaggaagatcggaagaagggaaagaaattcgctcggtaccagctgggcgacctgctgctgcacctggaaaagaagcacggcgaggactggggaaaggtgtacgacgaggcctgggagcggattgacaagaaagtggaaggcctgagcaagcacatcaagctggaagaggaacggagaagcgaggacgcccagagcaaggccgccctgaccgactggctgcgggctaaggccagcttcgtgatcgagggcctgaaggaggccgacaaggacgagttctgcagatgcgagctgaagctgcagaagtggtacggggacctgcggggaaagcccttcgccatcgaagccgagaacagcatcctggacatcagcggcttcagcaagcagtacaactgtgccttcatctggcagaaggacggcgtgaagaagctgaacctgtacctgatcatcaactacttcaagggcggcaagctgcggttcaagaagatcaaacctgaagccttcgaagccaacagattctacaccgtgatcaacaaaaagagcggcgagatcgtgcccatggaggtgaacttcaacttcgacgaccccaacctgatcatcctgcctctggcctttggcaagagacagggcagagaattcatctggaacgacctgctgtccctggaaaccggcagcctgaagctggccaacggaagagtgatcgagaagacactgtacaacagaagaacccggcaggatgagcctgccctgttcgtggccctgaccttcgagcggcgggaggtcctggactcctccaatatcaaaccaatgaacctgatcggcgtggcaagaggcgaaaacatccccgccgtgatcgccctgaccgaccccgagggctgcccactgagccggtttaaggatagcctgggaaacccaacccacatcctgagaatcggcgagagctataaggagaagcagcggaccatccaggccaagaaggaggtggagcagcggagagccggcggctacagccggaagtacgccagcaaagccaagaatctggcagacgatatggtgagaaacaccgctagagatctgctgtactacgccgtgacccaggatgccatgctgatcttcgccaacctgagccggggcttcggccggcagggcaagcggaccttcatggccgagagacagtacacacggatggaggactggctgaccgccaagctggcctacgagggcctgagcaagacctacctgtccaagacactggcccagtacacctccaagacatgcagcaactgtgggtttaccatcaccagcgccgactacgacagggtgctggagaagctgaagaagacagcaacaggctggatgaccacaattaacggcaaggagctgaaggtggagggccagattacctactacaacagatacaagagacagaacgtagtcaaggacctgtccgtcgagctggatagactgagcgaagaatctgtgaacaacgacatctcctcctggacaaagggcagaagcggagaagctctgagcctcctgaagaaaagattctcccatagacccgtgcaggagaagttcgtgtgcctgaactgcggcttcgagacacacgcagccgagcaagccgccctgaacatcgccagatcctggctgttcctgcggagccaggagtacaagaaataccagacaaacaagacaaccggcaacaccgataagagagccttcgtcgagacctggcagtccttttaccggaagaagcttaaggaggtgtggaaacctgccgtgcggtctggcggatctggcggaggctccacaagcatgctgcagaccgtgtggttccaggagcccgtgaccttcgaggacgtggccgtgtacttcacccagaacgagtgggccagcctgcaccccacccagagggccctgtacagggaggtgatgctggagaactacgccaacgtgaccagcctgagcgccttccccttccccaagcccgacctgatcttccagctggagcagggcgaggccgcctggggccccgacccctggaccctggccggcggcaccagccccaagaaaaagagaaaagtctaagctgccttctgcggggcttgccttctggccatgcccttcttctctcccttgcacctgtacctcttggtctttgaataaagcctgagtaggaaggctagcaaaaaaaaaaaaaaaaaaaaaaaaaaaaaaaaaaaaaaaaaaaaaaaaaaaaaaaaaaaaaaaaaaaaaaaaaaaaaaaa

SEQ ID NO: 3716 - RNA, 5419 nt, synthetic construct
  source 1..5419: mol_type = other RNA
aggaaataagagagaaaagaagagtaagaagaaatataagagccaccatggcccctaagaagaagcgtaaagtgagccgggtgaacggcagcggcagcggcggcggcatgaaccacgaccaggagttcgacccccctaaggtgtaccctcccgtccccgccgagaagagaaagcccatccgggtcctgagcctgttcgatggcatcgccaccggtctgctggtgctgaaggacctgggcatccaggtggataggtacattgcctccgaggtgtgcgaggactccatcaccgtgggaatggtgcgtcatcagggcaagatcatgtacgtgggcgacgtgcggagcgtgacacagaagcatatccaggagtggggccctttcgacctggtgatcggcggcagcccttgcaatgacctgagcatcgtgaacccagcccggaagggcctgtacgagggaaccggcagactgttcttcgagttttacagactgctgcacgacgcccggcctaaggaaggcgacgaccggcccttcttttggctgttcgagaatgtggtggccatgggagtcagcgacaagcgggatattagccggttcctggagagcaaccccgtgatgatcgatgccaaggaagtgagcgccgcccaccgggccagatacttctggggcaatctgcctggcatgaacagacccctggccagcaccgtgaacgacaagctggagctgcaggagtgcctggagcacggccggatcgccaagttcagcaaggtgagaaccatcaccacccgaagcaacagcatcaaacaaggcaaggaccagcactttcctgtgttcatgaacgagaaggaggacatcctgtggtgtaccgagatggagagagtgttcgggttcccagtccactacacagatgtcagcaacatgtctagactggccagacagagactgctgggaagaagctggtccgtccctgtgatcagacacctgttcgcccctctgaaggagtacttcgcctgcgtgagcagcggcaacagcaacgccaacagccggggccccagcttctctagcggcctggtgccactgtccctgagagggagccacatgggccccatggagatctacaaaaccgtgagcgcctggaagcggcagcctgtgcgcgtgctgagcctgtttcggaatatcgataaagtcctgaaaagcctgggattcctggagagcggctctggctccggcggtggcaccctgaagtacgtggaggatgtgacaaacgtggtcagacgggatgtggagaagtggggccccttcgatctggtgtacggcagcacccaacccctgggcagctcttgtgaccggtgccctggctggtacatgtttcagttccaccggatcctgcagtacgccctgccgagacaggagtcccagcggccattcttttggattttcatggacaacttgctgctgaccgaggatgaccaggaaactaccactcggttcctgcagaccgaagccgtgaccctgcaggacgtgagaggccgggactaccagaacgccatgcgggtgtggtccaacatccctggactgaaaagcaagcacgcacctctgacccctaaagaagaggagtacctgcaggcccaggtgcggagcagaagcaagctggacgcccctaaggtggatctgctggtgaagaattgcctcctgcccctgagagagtacttcaagtatttcagccagaatagtctgcccctgggcggcccaagcagcggcgcccctcctcccagcggcggcagcccagccggctccccaacctctaccgaggagggcacctctgagtccgccacccccgagagcggccctggcacctccaccgagcccagcgagggcagcgcacccggcagccctgccggcagccccacctccacagaggagggaaccagcaccgagcccagcgaaggcagcgccccaggcaccagcaccgagcctagtgagggcggctctggcggcggcagcgcccaggagattaaacggatcaacaagatcagaagaagacttgtgaaagacagcaacaccaagaaggccggcaagacaggccccatgaaaaccctgctggttagagtgatgacacccgatctgagagagcggctggaaaacctgagaaagaagcctgaaaatatcccccagcccatcagcaatacatctagagccaacctgaataagctgctgaccgattacaccgaaatgaagaaggcgatcctgcatgtgtactgggaagagttccagaaggaccctgtgggcctgatgagccgggtggcccagcctgccagcaagaagatcgatcagaacaagctgaaacctgagatggacgagaagggcaacctgaccaccgccggctttgcctgctctcagtgtggccagcccctgttcgtgtacaagctggagcaggtgtctgagaagggcaaggcttacaccaactacttcggacggtgcaatgtggccgagcacgaaaagctgatcctgctggcccagctgaagcccgagaaggatagcgacgaagccgtgacatatagcctgggaaagtttgggcagagggccctggatttctacagcattcatgtgaccaaggagtccacccaccccgtgaagcccctggcccagatcgccggaaacagatacgcctccggacctgtgggaaaggccctgagcgacgcatgtatgggcacaatcgcctccttcctgtctaagtaccaggacatcatcatcgaacaccagaaggtggtgaagggcaaccagaagagactggagagcctgcgggagctggccggcaaggaaaacctggaataccctagcgtgaccctgccacctcagcctcacaccaaggagggcgttgatgcctacaacgaagtgatcgcccgggtgcgaatgtgggtgaacctgaacctgtggcagaagctgaagctaagcagagatgatgccaagcctctgctgagactgaagggattcccttcctttcctctggtcgagagacaggccaacgaagtggactggtgggacatggtgtgtaacgtgaagaagctgatcaacgagaaaaaggaggatggcaaggtgttttggcagaatctggctggctacaagagacaggaagccctgagaccatacctgagcagcgaggaagatcggaagaagggaaagaaattcgctcggtaccagctgggcgacctgctgctgcacctggaaaagaagcacggcgaggactggggaaaggtgtacgacgaggcctgggagcggattgacaagaaagtggaaggcctgagcaagcacatcaagctggaagaggaacggagaagcgaggacgcccagagcaaggccgccctgaccgactggctgcgggctaaggccagcttcgtgatcgagggcctgaaggaggccgacaaggacgagttctgcagatgcgagctgaagctgcagaagtggtacggggacctgcggggaaagcccttcgccatcgaagccgagaacagcatcctggacatcagcggcttcagcaagcagtacaactgtgccttcatctggcagaaggacggcgtgaagaagctgaacctgtacctgatcatcaactacttcaagggcggcaagctgcggttcaagaagatcaaacctgaagccttcgaagccaacagattctacaccgtgatcaacaaaaagagcggcgagatcgtgcccatggaggtgaacttcaacttcgacgaccccaacctgatcatcctgcctctggcctttggcaagagacagggcagagaattcatctggaacgacctgctgtccctggaaaccggcagcctgaagctggccaacggaagagtgatcgagaagacactgtacaacagaagaacccggcaggatgagcctgccctgttcgtggccctgaccttcgagcggcgggaggtcctggactcctccaatatcaaaccaatgaacctgatcggcgtggcaagaggcgaaaacatccccgccgtgatcgccctgaccgaccccgagggctgcccactgagccggtttaaggatagcctgggaaacccaacccacatcctgagaatcggcgagagctataaggagaagcagcggaccatccaggccaagaaggaggtggagcagcggagagccggcggctacagccggaagtacgccagcaaagccaagaatctggcagacgatatggtgagaaacaccgctagagatctgctgtactacgccgtgacccaggatgccatgctgatcttcgccaacctgagccggggcttcggccggcagggcaagcggaccttcatggccgagagacagtacacacggatggaggactggctgaccgccaagctggcctacgagggcctgagcaagacctacctgtccaagacactggcccagtacacctccaagacatgcagcaactgtgggtttaccatcaccagcgccgactacgacagggtgctggagaagctgaagaagacagcaacaggctggatgaccacaattaacggcaaggagctgaaggtggagggccagattacctactacaacagatacaagagacagaacgtagtcaaggacctgtccgtcgagctggatagactgagcgaagaatctgtgaacaacgacatctcctcctggacaaagggcagaagcggagaagctctgagcctcctgaagaaaagattctcccatagacccgtgcaggagaagttcgtgtgcctgaactgcggcttcgagacacacgcagccgagcaagccgccctgaacatcgccagatcctggctgttcctgcggagccaggagtacaagaaataccagacaaacaagacaaccggcaacaccgataagagagccttcgtcgagacctggcagtccttttaccggaagaagcttaaggaggtgtggaaacctgccgtgcggtctggcggatctggcggaggctccacaagcttccaggagctggtgaccttcgaggacgtgtgcgtggacttcaccagcgaggagctgagctgcctgagcaccagccagaggaccctgtacagggaggtgatgctggagaactacaggaacctggtgagcctgggccaccagttcagcaagcccgagctgatcagcaggctggaggaggaggagttccaggccatggccgccgacagcagcgccgtggccggcgacagcggcgccgtggccggcaccagccccaagaaaaagagaaaagtctaagctgccttctgcggggcttgccttctggccatgcccttcttctctcccttgcacctgtacctcttggtctttgaataaagcctgagtaggaaggctagcaaaaaaaaaaaaaaaaaaaaaaaaaaaaaaaaaaaaaaaaaaaaaaaaaaaaaaaaaaaaaaaaaaaaaaaaaaaaaaaa

SEQ ID NO: 3717 - RNA, 5419 nt, synthetic construct
  source 1..5419: mol_type = other RNA
aggaaataagagagaaaagaagagtaagaagaaatataagagccaccatggcccctaagaagaagcgtaaagtgagccgggtgaacggcagcggcagcggcggcggcatgaaccacgaccaggagttcgacccccctaaggtgtaccctcccgtccccgccgagaagagaaagcccatccgggtcctgagcctgttcgatggcatcgccaccggtctgctggtgctgaaggacctgggcatccaggtggataggtacattgcctccgaggtgtgcgaggactccatcaccgtgggaatggtgcgtcatcagggcaagatcatgtacgtgggcgacgtgcggagcgtgacacagaagcatatccaggagtggggccctttcgacctggtgatcggcggcagcccttgcaatgacctgagcatcgtgaacccagcccggaagggcctgtacgagggaaccggcagactgttcttcgagttttacagactgctgcacgacgcccggcctaaggaaggcgacgaccggcccttcttttggctgttcgagaatgtggtggccatgggagtcagcgacaagcgggatattagccggttcctggagagcaaccccgtgatgatcgatgccaaggaagtgagcgccgcccaccgggccagatacttctggggcaatctgcctggcatgaacagacccctggccagcaccgtgaacgacaagctggagctgcaggagtgcctggagcacggccggatcgccaagttcagcaaggtgagaaccatcaccacccgaagcaacagcatcaaacaaggcaaggaccagcactttcctgtgttcatgaacgagaaggaggacatcctgtggtgtaccgagatggagagagtgttcgggttcccagtccactacacagatgtcagcaacatgtctagactggccagacagagactgctgggaagaagctggtccgtccctgtgatcagacacctgttcgcccctctgaaggagtacttcgcctgcgtgagcagcggcaacagcaacgccaacagccggggccccagcttctctagcggcctggtgccactgtccctgagagggagccacatgggccccatggagatctacaaaaccgtgagcgcctggaagcggcagcctgtgcgcgtgctgagcctgtttcggaatatcgataaagtcctgaaaagcctgggattcctggagagcggctctggctccggcggtggcaccctgaagtacgtggaggatgtgacaaacgtggtcagacgggatgtggagaagtggggccccttcgatctggtgtacggcagcacccaacccctgggcagctcttgtgaccggtgccctggctggtacatgtttcagttccaccggatcctgcagtacgccctgccgagacaggagtcccagcggccattcttttggattttcatggacaacttgctgctgaccgaggatgaccaggaaactaccactcggttcctgcagaccgaagccgtgaccctgcaggacgtgagaggccgggactaccagaacgccatgcgggtgtggtccaacatccctggactgaaaagcaagcacgcacctctgacccctaaagaagaggagtacctgcaggcccaggtgcggagcagaagcaagctggacgcccctaaggtggatctgctggtgaagaattgcctcctgcccctgagagagtacttcaagtatttcagccagaatagtctgcccctgggcggcccaagcagcggcgcccctcctcccagcggcggcagcccagccggctccccaacctctaccgaggagggcacctctgagtccgccacccccgagagcggccctggcacctccaccgagcccagcgagggcagcgcacccggcagccctgccggcagccccacctccacagaggagggaaccagcaccgagcccagcgaaggcagcgccccaggcaccagcaccgagcctagtgagggcggctctggcggcggcagcgcccaggagattaaacggatcaacaagatcagaagaagacttgtgaaagacagcaacaccaagaaggccggcaagacaggccccatgaaaaccctgctggttagagtgatgacacccgatctgagagagcggctggaaaacctgagaaagaagcctgaaaatatcccccagcccatcagcaatacatctagagccaacctgaataagctgctgaccgattacaccgaaatgaagaaggcgatcctgcatgtgtactgggaagagttccagaaggaccctgtgggcctgatgagccgggtggcccagcctgccagcaagaagatcgatcagaacaagctgaaacctgagatggacgagaagggcaacctgaccaccgccggctttgcctgctctcagtgtggccagcccctgttcgtgtacaagctggagcaggtgtctgagaagggcaaggcttacaccaactacttcggacggtgcaatgtggccgagcacgaaaagctgatcctgctggcccagctgaagcccgagaaggatagcgacgaagccgtgacatatagcctgggaaagtttgggcagagggccctggatttctacagcattcatgtgaccaaggagtccacccaccccgtgaagcccctggcccagatcgccggaaacagatacgcctccggacctgtgggaaaggccctgagcgacgcatgtatgggcacaatcgcctccttcctgtctaagtaccaggacatcatcatcgaacaccagaaggtggtgaagggcaaccagaagagactggagagcctgcgggagctggccggcaaggaaaacctggaataccctagcgtgaccctgccacctcagcctcacaccaaggagggcgttgatgcctacaacgaagtgatcgcccgggtgcgaatgtgggtgaacctgaacctgtggcagaagctgaagctaagcagagatgatgccaagcctctgctgagactgaagggattcccttcctttcctctggtcgagagacaggccaacgaagtggactggtgggacatggtgtgtaacgtgaagaagctgatcaacgagaaaaaggaggatggcaaggtgttttggcagaatctggctggctacaagagacaggaagccctgagaccatacctgagcagcgaggaagatcggaagaagggaaagaaattcgctcggtaccagctgggcgacctgctgctgcacctggaaaagaagcacggcgaggactggggaaaggtgtacgacgaggcctgggagcggattgacaagaaagtggaaggcctgagcaagcacatcaagctggaagaggaacggagaagcgaggacgcccagagcaaggccgccctgaccgactggctgcgggctaaggccagcttcgtgatcgagggcctgaaggaggccgacaaggacgagttctgcagatgcgagctgaagctgcagaagtggtacggggacctgcggggaaagcccttcgccatcgaagccgagaacagcatcctggacatcagcggcttcagcaagcagtacaactgtgccttcatctggcagaaggacggcgtgaagaagctgaacctgtacctgatcatcaactacttcaagggcggcaagctgcggttcaagaagatcaaacctgaagccttcgaagccaacagattctacaccgtgatcaacaaaaagagcggcgagatcgtgcccatggaggtgaacttcaacttcgacgaccccaacctgatcatcctgcctctggcctttggcaagagacagggcagagaattcatctggaacgacctgctgtccctggaaaccggcagcctgaagctggccaacggaagagtgatcgagaagacactgtacaacagaagaacccggcaggatgagcctgccctgttcgtggccctgaccttcgagcggcgggaggtcctggactcctccaatatcaaaccaatgaacctgatcggcgtggcaagaggcgaaaacatccccgccgtgatcgccctgaccgaccccgagggctgcccactgagccggtttaaggatagcctgggaaacccaacccacatcctgagaatcggcgagagctataaggagaagcagcggaccatccaggccaagaaggaggtggagcagcggagagccggcggctacagccggaagtacgccagcaaagccaagaatctggcagacgatatggtgagaaacaccgctagagatctgctgtactacgccgtgacccaggatgccatgctgatcttcgccaacctgagccggggcttcggccggcagggcaagcggaccttcatggccgagagacagtacacacggatggaggactggctgaccgccaagctggcctacgagggcctgagcaagacctacctgtccaagacactggcccagtacacctccaagacatgcagcaactgtgggtttaccatcaccagcgccgactacgacagggtgctggagaagctgaagaagacagcaacaggctggatgaccacaattaacggcaaggagctgaaggtggagggccagattacctactacaacagatacaagagacagaacgtagtcaaggacctgtccgtcgagctggatagactgagcgaagaatctgtgaacaacgacatctcctcctggacaaagggcagaagcggagaagctctgagcctcctgaagaaaagattctcccatagacccgtgcaggagaagttcgtgtgcctgaactgcggcttcgagacacacgcagccgagcaagccgccctgaacatcgccagatcctggctgttcctgcggagccaggagtacaagaaataccagacaaacaagacaaccggcaacaccgataagagagccttcgtcgagacctggcagtccttttaccggaagaagcttaaggaggtgtggaaacctgccgtgcggtctggcggatctggcggaggctccacaagcatgaacatggagggcctggtgatgttccaggacctgagcatcgacttcagccaggaggagtgggagtgcctggacgccgcccagaaggacctgtacagggacgtgatgatggagaactacagcagcctggtgagcctgggcctgagcatccccaagcccgacgtgatcagcctgctggagcagggcaaggagccctggatggtgagcagggacatgctgggcggctggtgccccgacagcgagaccagccccaagaaaaagagaaaagtctaagctgccttctgcggggcttgccttctggccatgcccttcttctctcccttgcacctgtacctcttggtctttgaataaagcctgagtaggaaggctagcaaaaaaaaaaaaaaaaaaaaaaaaaaaaaaaaaaaaaaaaaaaaaaaaaaaaaaaaaaaaaaaaaaaaaaaaaaaaaaaa

SEQ ID NO: 3718 - RNA, 5419 nt, synthetic construct
  source 1..5419: mol_type = other RNA
aggaaataagagagaaaagaagagtaagaagaaatataagagccaccatggcccctaagaagaagcgtaaagtgagccgggtgaacggcagcggcagcggcggcggcatgaaccacgaccaggagttcgacccccctaaggtgtaccctcccgtccccgccgagaagagaaagcccatccgggtcctgagcctgttcgatggcatcgccaccggtctgctggtgctgaaggacctgggcatccaggtggataggtacattgcctccgaggtgtgcgaggactccatcaccgtgggaatggtgcgtcatcagggcaagatcatgtacgtgggcgacgtgcggagcgtgacacagaagcatatccaggagtggggccctttcgacctggtgatcggcggcagcccttgcaatgacctgagcatcgtgaacccagcccggaagggcctgtacgagggaaccggcagactgttcttcgagttttacagactgctgcacgacgcccggcctaaggaaggcgacgaccggcccttcttttggctgttcgagaatgtggtggccatgggagtcagcgacaagcgggatattagccggttcctggagagcaaccccgtgatgatcgatgccaaggaagtgagcgccgcccaccgggccagatacttctggggcaatctgcctggcatgaacagacccctggccagcaccgtgaacgacaagctggagctgcaggagtgcctggagcacggccggatcgccaagttcagcaaggtgagaaccatcaccacccgaagcaacagcatcaaacaaggcaaggaccagcactttcctgtgttcatgaacgagaaggaggacatcctgtggtgtaccgagatggagagagtgttcgggttcccagtccactacacagatgtcagcaacatgtctagactggccagacagagactgctgggaagaagctggtccgtccctgtgatcagacacctgttcgcccctctgaaggagtacttcgcctgcgtgagcagcggcaacagcaacgccaacagccggggccccagcttctctagcggcctggtgccactgtccctgagagggagccacatgggccccatggagatctacaaaaccgtgagcgcctggaagcggcagcctgtgcgcgtgctgagcctgtttcggaatatcgataaagtcctgaaaagcctgggattcctggagagcggctctggctccggcggtggcaccctgaagtacgtggaggatgtgacaaacgtggtcagacgggatgtggagaagtggggccccttcgatctggtgtacggcagcacccaacccctgggcagctcttgtgaccggtgccctggctggtacatgtttcagttccaccggatcctgcagtacgccctgccgagacaggagtcccagcggccattcttttggattttcatggacaacttgctgctgaccgaggatgaccaggaaactaccactcggttcctgcagaccgaagccgtgaccctgcaggacgtgagaggccgggactaccagaacgccatgcgggtgtggtccaacatccctggactgaaaagcaagcacgcacctctgacccctaaagaagaggagtacctgcaggcccaggtgcggagcagaagcaagctggacgcccctaaggtggatctgctggtgaagaattgcctcctgcccctgagagagtacttcaagtatttcagccagaatagtctgcccctgggcggcccaagcagcggcgcccctcctcccagcggcggcagcccagccggctccccaacctctaccgaggagggcacctctgagtccgccacccccgagagcggccctggcacctccaccgagcccagcgagggcagcgcacccggcagccctgccggcagccccacctccacagaggagggaaccagcaccgagcccagcgaaggcagcgccccaggcaccagcaccgagcctagtgagggcggctctggcggcggcagcgcccaggagattaaacggatcaacaagatcagaagaagacttgtgaaagacagcaacaccaagaaggccggcaagacaggccccatgaaaaccctgctggttagagtgatgacacccgatctgagagagcggctggaaaacctgagaaagaagcctgaaaatatcccccagcccatcagcaatacatctagagccaacctgaataagctgctgaccgattacaccgaaatgaagaaggcgatcctgcatgtgtactgggaagagttccagaaggaccctgtgggcctgatgagccgggtggcccagcctgccagcaagaagatcgatcagaacaagctgaaacctgagatggacgagaagggcaacctgaccaccgccggctttgcctgctctcagtgtggccagcccctgttcgtgtacaagctggagcaggtgtctgagaagggcaaggcttacaccaactacttcggacggtgcaatgtggccgagcacgaaaagctgatcctgctggcccagctgaagcccgagaaggatagcgacgaagccgtgacatatagcctgggaaagtttgggcagagggccctggatttctacagcattcatgtgaccaaggagtccacccaccccgtgaagcccctggcccagatcgccggaaacagatacgcctccggacctgtgggaaaggccctgagcgacgcatgtatgggcacaatcgcctccttcctgtctaagtaccaggacatcatcatcgaacaccagaaggtggtgaagggcaaccagaagagactggagagcctgcgggagctggccggcaaggaaaacctggaataccctagcgtgaccctgccacctcagcctcacaccaaggagggcgttgatgcctacaacgaagtgatcgcccgggtgcgaatgtgggtgaacctgaacctgtggcagaagctgaagctaagcagagatgatgccaagcctctgctgagactgaagggattcccttcctttcctctggtcgagagacaggccaacgaagtggactggtgggacatggtgtgtaacgtgaagaagctgatcaacgagaaaaaggaggatggcaaggtgttttggcagaatctggctggctacaagagacaggaagccctgagaccatacctgagcagcgaggaagatcggaagaagggaaagaaattcgctcggtaccagctgggcgacctgctgctgcacctggaaaagaagcacggcgaggactggggaaaggtgtacgacgaggcctgggagcggattgacaagaaagtggaaggcctgagcaagcacatcaagctggaagaggaacggagaagcgaggacgcccagagcaaggccgccctgaccgactggctgcgggctaaggccagcttcgtgatcgagggcctgaaggaggccgacaaggacgagttctgcagatgcgagctgaagctgcagaagtggtacggggacctgcggggaaagcccttcgccatcgaagccgagaacagcatcctggacatcagcggcttcagcaagcagtacaactgtgccttcatctggcagaaggacggcgtgaagaagctgaacctgtacctgatcatcaactacttcaagggcggcaagctgcggttcaagaagatcaaacctgaagccttcgaagccaacagattctacaccgtgatcaacaaaaagagcggcgagatcgtgcccatggaggtgaacttcaacttcgacgaccccaacctgatcatcctgcctctggcctttggcaagagacagggcagagaattcatctggaacgacctgctgtccctggaaaccggcagcctgaagctggccaacggaagagtgatcgagaagacactgtacaacagaagaacccggcaggatgagcctgccctgttcgtggccctgaccttcgagcggcgggaggtcctggactcctccaatatcaaaccaatgaacctgatcggcgtggcaagaggcgaaaacatccccgccgtgatcgccctgaccgaccccgagggctgcccactgagccggtttaaggatagcctgggaaacccaacccacatcctgagaatcggcgagagctataaggagaagcagcggaccatccaggccaagaaggaggtggagcagcggagagccggcggctacagccggaagtacgccagcaaagccaagaatctggcagacgatatggtgagaaacaccgctagagatctgctgtactacgccgtgacccaggatgccatgctgatcttcgccaacctgagccggggcttcggccggcagggcaagcggaccttcatggccgagagacagtacacacggatggaggactggctgaccgccaagctggcctacgagggcctgagcaagacctacctgtccaagacactggcccagtacacctccaagacatgcagcaactgtgggtttaccatcaccagcgccgactacgacagggtgctggagaagctgaagaagacagcaacaggctggatgaccacaattaacggcaaggagctgaaggtggagggccagattacctactacaacagatacaagagacagaacgtagtcaaggacctgtccgtcgagctggatagactgagcgaagaatctgtgaacaacgacatctcctcctggacaaagggcagaagcggagaagctctgagcctcctgaagaaaagattctcccatagacccgtgcaggagaagttcgtgtgcctgaactgcggcttcgagacacacgcagccgagcaagccgccctgaacatcgccagatcctggctgttcctgcggagccaggagtacaagaaataccagacaaacaagacaaccggcaacaccgataagagagccttcgtcgagacctggcagtccttttaccggaagaagcttaaggaggtgtggaaacctgccgtgcggtctggcggatctggcggaggctccacaagcagccagggcagcgtgaccttcagggacgtggccgtggacttcagcagggaggagtgggagtggctgcagcccgcccagagggacctgtacaggcacgtgatgctggagaactacggccacctggtgagcctgggcctgaacatcagcaagccccacgtggtgagcctgctggagcagggcaaggagccctggctgggcaaggacgccagcaggggcctgttcagcgccagcgagagcaacggcaccagccccaagaaaaagagaaaagtctaagctgccttctgcggggcttgccttctggccatgcccttcttctctcccttgcacctgtacctcttggtctttgaataaagcctgagtaggaaggctagcaaaaaaaaaaaaaaaaaaaaaaaaaaaaaaaaaaaaaaaaaaaaaaaaaaaaaaaaaaaaaaaaaaaaaaaaaaaaaaaa

SEQ ID NO: 3719 - RNA, 5419 nt, synthetic construct
  source 1..5419: mol_type = other RNA
aggaaataagagagaaaagaagagtaagaagaaatataagagccaccatggcccctaagaagaagcgtaaagtgagccgggtgaacggcagcggcagcggcggcggcatgaaccacgaccaggagttcgacccccctaaggtgtaccctcccgtccccgccgagaagagaaagcccatccgggtcctgagcctgttcgatggcatcgccaccggtctgctggtgctgaaggacctgggcatccaggtggataggtacattgcctccgaggtgtgcgaggactccatcaccgtgggaatggtgcgtcatcagggcaagatcatgtacgtgggcgacgtgcggagcgtgacacagaagcatatccaggagtggggccctttcgacctggtgatcggcggcagcccttgcaatgacctgagcatcgtgaacccagcccggaagggcctgtacgagggaaccggcagactgttcttcgagttttacagactgctgcacgacgcccggcctaaggaaggcgacgaccggcccttcttttggctgttcgagaatgtggtggccatgggagtcagcgacaagcgggatattagccggttcctggagagcaaccccgtgatgatcgatgccaaggaagtgagcgccgcccaccgggccagatacttctggggcaatctgcctggcatgaacagacccctggccagcaccgtgaacgacaagctggagctgcaggagtgcctggagcacggccggatcgccaagttcagcaaggtgagaaccatcaccacccgaagcaacagcatcaaacaaggcaaggaccagcactttcctgtgttcatgaacgagaaggaggacatcctgtggtgtaccgagatggagagagtgttcgggttcccagtccactacacagatgtcagcaacatgtctagactggccagacagagactgctgggaagaagctggtccgtccctgtgatcagacacctgttcgcccctctgaaggagtacttcgcctgcgtgagcagcggcaacagcaacgccaacagccggggccccagcttctctagcggcctggtgccactgtccctgagagggagccacatgggccccatggagatctacaaaaccgtgagcgcctggaagcggcagcctgtgcgcgtgctgagcctgtttcggaatatcgataaagtcctgaaaagcctgggattcctggagagcggctctggctccggcggtggcaccctgaagtacgtggaggatgtgacaaacgtggtcagacgggatgtggagaagtggggccccttcgatctggtgtacggcagcacccaacccctgggcagctcttgtgaccggtgccctggctggtacatgtttcagttccaccggatcctgcagtacgccctgccgagacaggagtcccagcggccattcttttggattttcatggacaacttgctgctgaccgaggatgaccaggaaactaccactcggttcctgcagaccgaagccgtgaccctgcaggacgtgagaggccgggactaccagaacgccatgcgggtgtggtccaacatccctggactgaaaagcaagcacgcacctctgacccctaaagaagaggagtacctgcaggcccaggtgcggagcagaagcaagctggacgcccctaaggtggatctgctggtgaagaattgcctcctgcccctgagagagtacttcaagtatttcagccagaatagtctgcccctgggcggcccaagcagcggcgcccctcctcccagcggcggcagcccagccggctccccaacctctaccgaggagggcacctctgagtccgccacccccgagagcggccctggcacctccaccgagcccagcgagggcagcgcacccggcagccctgccggcagccccacctccacagaggagggaaccagcaccgagcccagcgaaggcagcgccccaggcaccagcaccgagcctagtgagggcggctctggcggcggcagcgcccaggagattaaacggatcaacaagatcagaagaagacttgtgaaagacagcaacaccaagaaggccggcaagacaggccccatgaaaaccctgctggttagagtgatgacacccgatctgagagagcggctggaaaacctgagaaagaagcctgaaaatatcccccagcccatcagcaatacatctagagccaacctgaataagctgctgaccgattacaccgaaatgaagaaggcgatcctgcatgtgtactgggaagagttccagaaggaccctgtgggcctgatgagccgggtggcccagcctgccagcaagaagatcgatcagaacaagctgaaacctgagatggacgagaagggcaacctgaccaccgccggctttgcctgctctcagtgtggccagcccctgttcgtgtacaagctggagcaggtgtctgagaagggcaaggcttacaccaactacttcggacggtgcaatgtggccgagcacgaaaagctgatcctgctggcccagctgaagcccgagaaggatagcgacgaagccgtgacatatagcctgggaaagtttgggcagagggccctggatttctacagcattcatgtgaccaaggagtccacccaccccgtgaagcccctggcccagatcgccggaaacagatacgcctccggacctgtgggaaaggccctgagcgacgcatgtatgggcacaatcgcctccttcctgtctaagtaccaggacatcatcatcgaacaccagaaggtggtgaagggcaaccagaagagactggagagcctgcgggagctggccggcaaggaaaacctggaataccctagcgtgaccctgccacctcagcctcacaccaaggagggcgttgatgcctacaacgaagtgatcgcccgggtgcgaatgtgggtgaacctgaacctgtggcagaagctgaagctaagcagagatgatgccaagcctctgctgagactgaagggattcccttcctttcctctggtcgagagacaggccaacgaagtggactggtgggacatggtgtgtaacgtgaagaagctgatcaacgagaaaaaggaggatggcaaggtgttttggcagaatctggctggctacaagagacaggaagccctgagaccatacctgagcagcgaggaagatcggaagaagggaaagaaattcgctcggtaccagctgggcgacctgctgctgcacctggaaaagaagcacggcgaggactggggaaaggtgtacgacgaggcctgggagcggattgacaagaaagtggaaggcctgagcaagcacatcaagctggaagaggaacggagaagcgaggacgcccagagcaaggccgccctgaccgactggctgcgggctaaggccagcttcgtgatcgagggcctgaaggaggccgacaaggacgagttctgcagatgcgagctgaagctgcagaagtggtacggggacctgcggggaaagcccttcgccatcgaagccgagaacagcatcctggacatcagcggcttcagcaagcagtacaactgtgccttcatctggcagaaggacggcgtgaagaagctgaacctgtacctgatcatcaactacttcaagggcggcaagctgcggttcaagaagatcaaacctgaagccttcgaagccaacagattctacaccgtgatcaacaaaaagagcggcgagatcgtgcccatggaggtgaacttcaacttcgacgaccccaacctgatcatcctgcctctggcctttggcaagagacagggcagagaattcatctggaacgacctgctgtccctggaaaccggcagcctgaagctggccaacggaagagtgatcgagaagacactgtacaacagaagaacccggcaggatgagcctgccctgttcgtggccctgaccttcgagcggcgggaggtcctggactcctccaatatcaaaccaatgaacctgatcggcgtggcaagaggcgaaaacatccccgccgtgatcgccctgaccgaccccgagggctgcccactgagccggtttaaggatagcctgggaaacccaacccacatcctgagaatcggcgagagctataaggagaagcagcggaccatccaggccaagaaggaggtggagcagcggagagccggcggctacagccggaagtacgccagcaaagccaagaatctggcagacgatatggtgagaaacaccgctagagatctgctgtactacgccgtgacccaggatgccatgctgatcttcgccaacctgagccggggcttcggccggcagggcaagcggaccttcatggccgagagacagtacacacggatggaggactggctgaccgccaagctggcctacgagggcctgagcaagacctacctgtccaagacactggcccagtacacctccaagacatgcagcaactgtgggtttaccatcaccagcgccgactacgacagggtgctggagaagctgaagaagacagcaacaggctggatgaccacaattaacggcaaggagctgaaggtggagggccagattacctactacaacagatacaagagacagaacgtagtcaaggacctgtccgtcgagctggatagactgagcgaagaatctgtgaacaacgacatctcctcctggacaaagggcagaagcggagaagctctgagcctcctgaagaaaagattctcccatagacccgtgcaggagaagttcgtgtgcctgaactgcggcttcgagacacacgcagccgagcaagccgccctgaacatcgccagatcctggctgttcctgcggagccaggagtacaagaaataccagacaaacaagacaaccggcaacaccgataagagagccttcgtcgagacctggcagtccttttaccggaagaagcttaaggaggtgtggaaacctgccgtgcggtctggcggatctggcggaggctccacaagcatggccgccggccagagggaggccaggccccaggtgagcctgaccttcgaggacgtggccgtgctgttcaccagggacgagtggaggaagctggcccccagccagaggaacctgtacagggacgtgatgctggagaactacaggaacctggtgagcctgggcctgcccttcaccaagcccaaggtgatcagcctgctgcagcagggcgaggacccctggaaggtggagaaggacagcagcggcaccagccccaagaaaaagagaaaagtctaagctgccttctgcggggcttgccttctggccatgcccttcttctctcccttgcacctgtacctcttggtctttgaataaagcctgagtaggaaggctagcaaaaaaaaaaaaaaaaaaaaaaaaaaaaaaaaaaaaaaaaaaaaaaaaaaaaaaaaaaaaaaaaaaaaaaaaaaaaaaaa

SEQ ID NO: 3720 - RNA, 5419 nt, synthetic construct
  source 1..5419: mol_type = other RNA
aggaaataagagagaaaagaagagtaagaagaaatataagagccaccatggcccctaagaagaagcgtaaagtgagccgggtgaacggcagcggcagcggcggcggcatgaaccacgaccaggagttcgacccccctaaggtgtaccctcccgtccccgccgagaagagaaagcccatccgggtcctgagcctgttcgatggcatcgccaccggtctgctggtgctgaaggacctgggcatccaggtggataggtacattgcctccgaggtgtgcgaggactccatcaccgtgggaatggtgcgtcatcagggcaagatcatgtacgtgggcgacgtgcggagcgtgacacagaagcatatccaggagtggggccctttcgacctggtgatcggcggcagcccttgcaatgacctgagcatcgtgaacccagcccggaagggcctgtacgagggaaccggcagactgttcttcgagttttacagactgctgcacgacgcccggcctaaggaaggcgacgaccggcccttcttttggctgttcgagaatgtggtggccatgggagtcagcgacaagcgggatattagccggttcctggagagcaaccccgtgatgatcgatgccaaggaagtgagcgccgcccaccgggccagatacttctggggcaatctgcctggcatgaacagacccctggccagcaccgtgaacgacaagctggagctgcaggagtgcctggagcacggccggatcgccaagttcagcaaggtgagaaccatcaccacccgaagcaacagcatcaaacaaggcaaggaccagcactttcctgtgttcatgaacgagaaggaggacatcctgtggtgtaccgagatggagagagtgttcgggttcccagtccactacacagatgtcagcaacatgtctagactggccagacagagactgctgggaagaagctggtccgtccctgtgatcagacacctgttcgcccctctgaaggagtacttcgcctgcgtgagcagcggcaacagcaacgccaacagccggggccccagcttctctagcggcctggtgccactgtccctgagagggagccacatgggccccatggagatctacaaaaccgtgagcgcctggaagcggcagcctgtgcgcgtgctgagcctgtttcggaatatcgataaagtcctgaaaagcctgggattcctggagagcggctctggctccggcggtggcaccctgaagtacgtggaggatgtgacaaacgtggtcagacgggatgtggagaagtggggccccttcgatctggtgtacggcagcacccaacccctgggcagctcttgtgaccggtgccctggctggtacatgtttcagttccaccggatcctgcagtacgccctgccgagacaggagtcccagcggccattcttttggattttcatggacaacttgctgctgaccgaggatgaccaggaaactaccactcggttcctgcagaccgaagccgtgaccctgcaggacgtgagaggccgggactaccagaacgccatgcgggtgtggtccaacatccctggactgaaaagcaagcacgcacctctgacccctaaagaagaggagtacctgcaggcccaggtgcggagcagaagcaagctggacgcccctaaggtggatctgctggtgaagaattgcctcctgcccctgagagagtacttcaagtatttcagccagaatagtctgcccctgggcggcccaagcagcggcgcccctcctcccagcggcggcagcccagccggctccccaacctctaccgaggagggcacctctgagtccgccacccccgagagcggccctggcacctccaccgagcccagcgagggcagcgcacccggcagccctgccggcagccccacctccacagaggagggaaccagcaccgagcccagcgaaggcagcgccccaggcaccagcaccgagcctagtgagggcggctctggcggcggcagcgcccaggagattaaacggatcaacaagatcagaagaagacttgtgaaagacagcaacaccaagaaggccggcaagacaggccccatgaaaaccctgctggttagagtgatgacacccgatctgagagagcggctggaaaacctgagaaagaagcctgaaaatatcccccagcccatcagcaatacatctagagccaacctgaataagctgctgaccgattacaccgaaatgaagaaggcgatcctgcatgtgtactgggaagagttccagaaggaccctgtgggcctgatgagccgggtggcccagcctgccagcaagaagatcgatcagaacaagctgaaacctgagatggacgagaagggcaacctgaccaccgccggctttgcctgctctcagtgtggccagcccctgttcgtgtacaagctggagcaggtgtctgagaagggcaaggcttacaccaactacttcggacggtgcaatgtggccgagcacgaaaagctgatcctgctggcccagctgaagcccgagaaggatagcgacgaagccgtgacatatagcctgggaaagtttgggcagagggccctggatttctacagcattcatgtgaccaaggagtccacccaccccgtgaagcccctggcccagatcgccggaaacagatacgcctccggacctgtgggaaaggccctgagcgacgcatgtatgggcacaatcgcctccttcctgtctaagtaccaggacatcatcatcgaacaccagaaggtggtgaagggcaaccagaagagactggagagcctgcgggagctggccggcaaggaaaacctggaataccctagcgtgaccctgccacctcagcctcacaccaaggagggcgttgatgcctacaacgaagtgatcgcccgggtgcgaatgtgggtgaacctgaacctgtggcagaagctgaagctaagcagagatgatgccaagcctctgctgagactgaagggattcccttcctttcctctggtcgagagacaggccaacgaagtggactggtgggacatggtgtgtaacgtgaagaagctgatcaacgagaaaaaggaggatggcaaggtgttttggcagaatctggctggctacaagagacaggaagccctgagaccatacctgagcagcgaggaagatcggaagaagggaaagaaattcgctcggtaccagctgggcgacctgctgctgcacctggaaaagaagcacggcgaggactggggaaaggtgtacgacgaggcctgggagcggattgacaagaaagtggaaggcctgagcaagcacatcaagctggaagaggaacggagaagcgaggacgcccagagcaaggccgccctgaccgactggctgcgggctaaggccagcttcgtgatcgagggcctgaaggaggccgacaaggacgagttctgcagatgcgagctgaagctgcagaagtggtacggggacctgcggggaaagcccttcgccatcgaagccgagaacagcatcctggacatcagcggcttcagcaagcagtacaactgtgccttcatctggcagaaggacggcgtgaagaagctgaacctgtacctgatcatcaactacttcaagggcggcaagctgcggttcaagaagatcaaacctgaagccttcgaagccaacagattctacaccgtgatcaacaaaaagagcggcgagatcgtgcccatggaggtgaacttcaacttcgacgaccccaacctgatcatcctgcctctggcctttggcaagagacagggcagagaattcatctggaacgacctgctgtccctggaaaccggcagcctgaagctggccaacggaagagtgatcgagaagacactgtacaacagaagaacccggcaggatgagcctgccctgttcgtggccctgaccttcgagcggcgggaggtcctggactcctccaatatcaaaccaatgaacctgatcggcgtggcaagaggcgaaaacatccccgccgtgatcgccctgaccgaccccgagggctgcccactgagccggtttaaggatagcctgggaaacccaacccacatcctgagaatcggcgagagctataaggagaagcagcggaccatccaggccaagaaggaggtggagcagcggagagccggcggctacagccggaagtacgccagcaaagccaagaatctggcagacgatatggtgagaaacaccgctagagatctgctgtactacgccgtgacccaggatgccatgctgatcttcgccaacctgagccggggcttcggccggcagggcaagcggaccttcatggccgagagacagtacacacggatggaggactggctgaccgccaagctggcctacgagggcctgagcaagacctacctgtccaagacactggcccagtacacctccaagacatgcagcaactgtgggtttaccatcaccagcgccgactacgacagggtgctggagaagctgaagaagacagcaacaggctggatgaccacaattaacggcaaggagctgaaggtggagggccagattacctactacaacagatacaagagacagaacgtagtcaaggacctgtccgtcgagctggatagactgagcgaagaatctgtgaacaacgacatctcctcctggacaaagggcagaagcggagaagctctgagcctcctgaagaaaagattctcccatagacccgtgcaggagaagttcgtgtgcctgaactgcggcttcgagacacacgcagccgagcaagccgccctgaacatcgccagatcctggctgttcctgcggagccaggagtacaagaaataccagacaaacaagacaaccggcaacaccgataagagagccttcgtcgagacctggcagtccttttaccggaagaagcttaaggaggtgtggaaacctgccgtgcggtctggcggatctggcggaggctccacaagcagcagccagaccctgctgaccttcagggacgtggccatcgagttcagccaggaggagtggggctgcctgaaccacagccagagggagctgtacagggacgtgatgctggagacctacggccacctgctgttcctgggcctggtgagcaagcccgacctggtgatcgtgctggagcagaagaaggagctgtggggcgtgaagaggaaggagaccgtggccagccaccccgccgtgagcagccagaccagccccaagaaaaagagaaaagtctaagctgccttctgcggggcttgccttctggccatgcccttcttctctcccttgcacctgtacctcttggtctttgaataaagcctgagtaggaaggctagcaaaaaaaaaaaaaaaaaaaaaaaaaaaaaaaaaaaaaaaaaaaaaaaaaaaaaaaaaaaaaaaaaaaaaaaaaaaaaaaa

SEQ ID NO: 3721 - RNA, 5419 nt, synthetic construct
  source 1..5419: mol_type = other RNA
aggaaataagagagaaaagaagagtaagaagaaatataagagccaccatggcccctaagaagaagcgtaaagtgagccgggtgaacggcagcggcagcggcggcggcatgaaccacgaccaggagttcgacccccctaaggtgtaccctcccgtccccgccgagaagagaaagcccatccgggtcctgagcctgttcgatggcatcgccaccggtctgctggtgctgaaggacctgggcatccaggtggataggtacattgcctccgaggtgtgcgaggactccatcaccgtgggaatggtgcgtcatcagggcaagatcatgtacgtgggcgacgtgcggagcgtgacacagaagcatatccaggagtggggccctttcgacctggtgatcggcggcagcccttgcaatgacctgagcatcgtgaacccagcccggaagggcctgtacgagggaaccggcagactgttcttcgagttttacagactgctgcacgacgcccggcctaaggaaggcgacgaccggcccttcttttggctgttcgagaatgtggtggccatgggagtcagcgacaagcgggatattagccggttcctggagagcaaccccgtgatgatcgatgccaaggaagtgagcgccgcccaccgggccagatacttctggggcaatctgcctggcatgaacagacccctggccagcaccgtgaacgacaagctggagctgcaggagtgcctggagcacggccggatcgccaagttcagcaaggtgagaaccatcaccacccgaagcaacagcatcaaacaaggcaaggaccagcactttcctgtgttcatgaacgagaaggaggacatcctgtggtgtaccgagatggagagagtgttcgggttcccagtccactacacagatgtcagcaacatgtctagactggccagacagagactgctgggaagaagctggtccgtccctgtgatcagacacctgttcgcccctctgaaggagtacttcgcctgcgtgagcagcggcaacagcaacgccaacagccggggccccagcttctctagcggcctggtgccactgtccctgagagggagccacatgggccccatggagatctacaaaaccgtgagcgcctggaagcggcagcctgtgcgcgtgctgagcctgtttcggaatatcgataaagtcctgaaaagcctgggattcctggagagcggctctggctccggcggtggcaccctgaagtacgtggaggatgtgacaaacgtggtcagacgggatgtggagaagtggggccccttcgatctggtgtacggcagcacccaacccctgggcagctcttgtgaccggtgccctggctggtacatgtttcagttccaccggatcctgcagtacgccctgccgagacaggagtcccagcggccattcttttggattttcatggacaacttgctgctgaccgaggatgaccaggaaactaccactcggttcctgcagaccgaagccgtgaccctgcaggacgtgagaggccgggactaccagaacgccatgcgggtgtggtccaacatccctggactgaaaagcaagcacgcacctctgacccctaaagaagaggagtacctgcaggcccaggtgcggagcagaagcaagctggacgcccctaaggtggatctgctggtgaagaattgcctcctgcccctgagagagtacttcaagtatttcagccagaatagtctgcccctgggcggcccaagcagcggcgcccctcctcccagcggcggcagcccagccggctccccaacctctaccgaggagggcacctctgagtccgccacccccgagagcggccctggcacctccaccgagcccagcgagggcagcgcacccggcagccctgccggcagccccacctccacagaggagggaaccagcaccgagcccagcgaaggcagcgccccaggcaccagcaccgagcctagtgagggcggctctggcggcggcagcgcccaggagattaaacggatcaacaagatcagaagaagacttgtgaaagacagcaacaccaagaaggccggcaagacaggccccatgaaaaccctgctggttagagtgatgacacccgatctgagagagcggctggaaaacctgagaaagaagcctgaaaatatcccccagcccatcagcaatacatctagagccaacctgaataagctgctgaccgattacaccgaaatgaagaaggcgatcctgcatgtgtactgggaagagttccagaaggaccctgtgggcctgatgagccgggtggcccagcctgccagcaagaagatcgatcagaacaagctgaaacctgagatggacgagaagggcaacctgaccaccgccggctttgcctgctctcagtgtggccagcccctgttcgtgtacaagctggagcaggtgtctgagaagggcaaggcttacaccaactacttcggacggtgcaatgtggccgagcacgaaaagctgatcctgctggcccagctgaagcccgagaaggatagcgacgaagccgtgacatatagcctgggaaagtttgggcagagggccctggatttctacagcattcatgtgaccaaggagtccacccaccccgtgaagcccctggcccagatcgccggaaacagatacgcctccggacctgtgggaaaggccctgagcgacgcatgtatgggcacaatcgcctccttcctgtctaagtaccaggacatcatcatcgaacaccagaaggtggtgaagggcaaccagaagagactggagagcctgcgggagctggccggcaaggaaaacctggaataccctagcgtgaccctgccacctcagcctcacaccaaggagggcgttgatgcctacaacgaagtgatcgcccgggtgcgaatgtgggtgaacctgaacctgtggcagaagctgaagctaagcagagatgatgccaagcctctgctgagactgaagggattcccttcctttcctctggtcgagagacaggccaacgaagtggactggtgggacatggtgtgtaacgtgaagaagctgatcaacgagaaaaaggaggatggcaaggtgttttggcagaatctggctggctacaagagacaggaagccctgagaccatacctgagcagcgaggaagatcggaagaagggaaagaaattcgctcggtaccagctgggcgacctgctgctgcacctggaaaagaagcacggcgaggactggggaaaggtgtacgacgaggcctgggagcggattgacaagaaagtggaaggcctgagcaagcacatcaagctggaagaggaacggagaagcgaggacgcccagagcaaggccgccctgaccgactggctgcgggctaaggccagcttcgtgatcgagggcctgaaggaggccgacaaggacgagttctgcagatgcgagctgaagctgcagaagtggtacggggacctgcggggaaagcccttcgccatcgaagccgagaacagcatcctggacatcagcggcttcagcaagcagtacaactgtgccttcatctggcagaaggacggcgtgaagaagctgaacctgtacctgatcatcaactacttcaagggcggcaagctgcggttcaagaagatcaaacctgaagccttcgaagccaacagattctacaccgtgatcaacaaaaagagcggcgagatcgtgcccatggaggtgaacttcaacttcgacgaccccaacctgatcatcctgcctctggcctttggcaagagacagggcagagaattcatctggaacgacctgctgtccctggaaaccggcagcctgaagctggccaacggaagagtgatcgagaagacactgtacaacagaagaacccggcaggatgagcctgccctgttcgtggccctgaccttcgagcggcgggaggtcctggactcctccaatatcaaaccaatgaacctgatcggcgtggcaagaggcgaaaacatccccgccgtgatcgccctgaccgaccccgagggctgcccactgagccggtttaaggatagcctgggaaacccaacccacatcctgagaatcggcgagagctataaggagaagcagcggaccatccaggccaagaaggaggtggagcagcggagagccggcggctacagccggaagtacgccagcaaagccaagaatctggcagacgatatggtgagaaacaccgctagagatctgctgtactacgccgtgacccaggatgccatgctgatcttcgccaacctgagccggggcttcggccggcagggcaagcggaccttcatggccgagagacagtacacacggatggaggactggctgaccgccaagctggcctacgagggcctgagcaagacctacctgtccaagacactggcccagtacacctccaagacatgcagcaactgtgggtttaccatcaccagcgccgactacgacagggtgctggagaagctgaagaagacagcaacaggctggatgaccacaattaacggcaaggagctgaaggtggagggccagattacctactacaacagatacaagagacagaacgtagtcaaggacctgtccgtcgagctggatagactgagcgaagaatctgtgaacaacgacatctcctcctggacaaagggcagaagcggagaagctctgagcctcctgaagaaaagattctcccatagacccgtgcaggagaagttcgtgtgcctgaactgcggcttcgagacacacgcagccgagcaagccgccctgaacatcgccagatcctggctgttcctgcggagccaggagtacaagaaataccagacaaacaagacaaccggcaacaccgataagagagccttcgtcgagacctggcagtccttttaccggaagaagcttaaggaggtgtggaaacctgccgtgcggtctggcggatctggcggaggctccacaagctggaaggaggagctgagcttcgaggacgtggccgtgaacttcaccagggaggagtggaacaagctggactggacccagagggacctgtacagggacgtgatgctggagaactacaggaacatgatcctgctgggcttccagttccccaagcccgaggtgatctgccagctggagcagtgggaggacccctggatcctggacctgcccagggccggcaccaggaaggccagcagcaacgcctgcaccagccccaagaaaaagagaaaagtctaagctgccttctgcggggcttgccttctggccatgcccttcttctctcccttgcacctgtacctcttggtctttgaataaagcctgagtaggaaggctagcaaaaaaaaaaaaaaaaaaaaaaaaaaaaaaaaaaaaaaaaaaaaaaaaaaaaaaaaaaaaaaaaaaaaaaaaaaaaaaaa

SEQ ID NO: 3722 - RNA, 5419 nt, synthetic construct
  source 1..5419: mol_type = other RNA
aggaaataagagagaaaagaagagtaagaagaaatataagagccaccatggcccctaagaagaagcgtaaagtgagccgggtgaacggcagcggcagcggcggcggcatgaaccacgaccaggagttcgacccccctaaggtgtaccctcccgtccccgccgagaagagaaagcccatccgggtcctgagcctgttcgatggcatcgccaccggtctgctggtgctgaaggacctgggcatccaggtggataggtacattgcctccgaggtgtgcgaggactccatcaccgtgggaatggtgcgtcatcagggcaagatcatgtacgtgggcgacgtgcggagcgtgacacagaagcatatccaggagtggggccctttcgacctggtgatcggcggcagcccttgcaatgacctgagcatcgtgaacccagcccggaagggcctgtacgagggaaccggcagactgttcttcgagttttacagactgctgcacgacgcccggcctaaggaaggcgacgaccggcccttcttttggctgttcgagaatgtggtggccatgggagtcagcgacaagcgggatattagccggttcctggagagcaaccccgtgatgatcgatgccaaggaagtgagcgccgcccaccgggccagatacttctggggcaatctgcctggcatgaacagacccctggccagcaccgtgaacgacaagctggagctgcaggagtgcctggagcacggccggatcgccaagttcagcaaggtgagaaccatcaccacccgaagcaacagcatcaaacaaggcaaggaccagcactttcctgtgttcatgaacgagaaggaggacatcctgtggtgtaccgagatggagagagtgttcgggttcccagtccactacacagatgtcagcaacatgtctagactggccagacagagactgctgggaagaagctggtccgtccctgtgatcagacacctgttcgcccctctgaaggagtacttcgcctgcgtgagcagcggcaacagcaacgccaacagccggggccccagcttctctagcggcctggtgccactgtccctgagagggagccacatgggccccatggagatctacaaaaccgtgagcgcctggaagcggcagcctgtgcgcgtgctgagcctgtttcggaatatcgataaagtcctgaaaagcctgggattcctggagagcggctctggctccggcggtggcaccctgaagtacgtggaggatgtgacaaacgtggtcagacgggatgtggagaagtggggccccttcgatctggtgtacggcagcacccaacccctgggcagctcttgtgaccggtgccctggctggtacatgtttcagttccaccggatcctgcagtacgccctgccgagacaggagtcccagcggccattcttttggattttcatggacaacttgctgctgaccgaggatgaccaggaaactaccactcggttcctgcagaccgaagccgtgaccctgcaggacgtgagaggccgggactaccagaacgccatgcgggtgtggtccaacatccctggactgaaaagcaagcacgcacctctgacccctaaagaagaggagtacctgcaggcccaggtgcggagcagaagcaagctggacgcccctaaggtggatctgctggtgaagaattgcctcctgcccctgagagagtacttcaagtatttcagccagaatagtctgcccctgggcggcccaagcagcggcgcccctcctcccagcggcggcagcccagccggctccccaacctctaccgaggagggcacctctgagtccgccacccccgagagcggccctggcacctccaccgagcccagcgagggcagcgcacccggcagccctgccggcagccccacctccacagaggagggaaccagcaccgagcccagcgaaggcagcgccccaggcaccagcaccgagcctagtgagggcggctctggcggcggcagcgcccaggagattaaacggatcaacaagatcagaagaagacttgtgaaagacagcaacaccaagaaggccggcaagacaggccccatgaaaaccctgctggttagagtgatgacacccgatctgagagagcggctggaaaacctgagaaagaagcctgaaaatatcccccagcccatcagcaatacatctagagccaacctgaataagctgctgaccgattacaccgaaatgaagaaggcgatcctgcatgtgtactgggaagagttccagaaggaccctgtgggcctgatgagccgggtggcccagcctgccagcaagaagatcgatcagaacaagctgaaacctgagatggacgagaagggcaacctgaccaccgccggctttgcctgctctcagtgtggccagcccctgttcgtgtacaagctggagcaggtgtctgagaagggcaaggcttacaccaactacttcggacggtgcaatgtggccgagcacgaaaagctgatcctgctggcccagctgaagcccgagaaggatagcgacgaagccgtgacatatagcctgggaaagtttgggcagagggccctggatttctacagcattcatgtgaccaaggagtccacccaccccgtgaagcccctggcccagatcgccggaaacagatacgcctccggacctgtgggaaaggccctgagcgacgcatgtatgggcacaatcgcctccttcctgtctaagtaccaggacatcatcatcgaacaccagaaggtggtgaagggcaaccagaagagactggagagcctgcgggagctggccggcaaggaaaacctggaataccctagcgtgaccctgccacctcagcctcacaccaaggagggcgttgatgcctacaacgaagtgatcgcccgggtgcgaatgtgggtgaacctgaacctgtggcagaagctgaagctaagcagagatgatgccaagcctctgctgagactgaagggattcccttcctttcctctggtcgagagacaggccaacgaagtggactggtgggacatggtgtgtaacgtgaagaagctgatcaacgagaaaaaggaggatggcaaggtgttttggcagaatctggctggctacaagagacaggaagccctgagaccatacctgagcagcgaggaagatcggaagaagggaaagaaattcgctcggtaccagctgggcgacctgctgctgcacctggaaaagaagcacggcgaggactggggaaaggtgtacgacgaggcctgggagcggattgacaagaaagtggaaggcctgagcaagcacatcaagctggaagaggaacggagaagcgaggacgcccagagcaaggccgccctgaccgactggctgcgggctaaggccagcttcgtgatcgagggcctgaaggaggccgacaaggacgagttctgcagatgcgagctgaagctgcagaagtggtacggggacctgcggggaaagcccttcgccatcgaagccgagaacagcatcctggacatcagcggcttcagcaagcagtacaactgtgccttcatctggcagaaggacggcgtgaagaagctgaacctgtacctgatcatcaactacttcaagggcggcaagctgcggttcaagaagatcaaacctgaagccttcgaagccaacagattctacaccgtgatcaacaaaaagagcggcgagatcgtgcccatggaggtgaacttcaacttcgacgaccccaacctgatcatcctgcctctggcctttggcaagagacagggcagagaattcatctggaacgacctgctgtccctggaaaccggcagcctgaagctggccaacggaagagtgatcgagaagacactgtacaacagaagaacccggcaggatgagcctgccctgttcgtggccctgaccttcgagcggcgggaggtcctggactcctccaatatcaaaccaatgaacctgatcggcgtggcaagaggcgaaaacatccccgccgtgatcgccctgaccgaccccgagggctgcccactgagccggtttaaggatagcctgggaaacccaacccacatcctgagaatcggcgagagctataaggagaagcagcggaccatccaggccaagaaggaggtggagcagcggagagccggcggctacagccggaagtacgccagcaaagccaagaatctggcagacgatatggtgagaaacaccgctagagatctgctgtactacgccgtgacccaggatgccatgctgatcttcgccaacctgagccggggcttcggccggcagggcaagcggaccttcatggccgagagacagtacacacggatggaggactggctgaccgccaagctggcctacgagggcctgagcaagacctacctgtccaagacactggcccagtacacctccaagacatgcagcaactgtgggtttaccatcaccagcgccgactacgacagggtgctggagaagctgaagaagacagcaacaggctggatgaccacaattaacggcaaggagctgaaggtggagggccagattacctactacaacagatacaagagacagaacgtagtcaaggacctgtccgtcgagctggatagactgagcgaagaatctgtgaacaacgacatctcctcctggacaaagggcagaagcggagaagctctgagcctcctgaagaaaagattctcccatagacccgtgcaggagaagttcgtgtgcctgaactgcggcttcgagacacacgcagccgagcaagccgccctgaacatcgccagatcctggctgttcctgcggagccaggagtacaagaaataccagacaaacaagacaaccggcaacaccgataagagagccttcgtcgagacctggcagtccttttaccggaagaagcttaaggaggtgtggaaacctgccgtgcggtctggcggatctggcggaggctccacaagcgtgcccgtgaccttcgaggacgtggccgtgaggttcagcgccgaggagtgggagatcctggagggctggcagaaggagctgcacaaggaggtgatggaggagaactaccagctgctgatcagcctgggccagcccgtgcccaccctggccctgctggccctgaccgccgagagggaggccgccggcggccagatcaggagcgtgagcggcgagagggagctggccagcaagggcggcagcagcaccagccccaagaaaaagagaaaagtctaagctgccttctgcggggcttgccttctggccatgcccttcttctctcccttgcacctgtacctcttggtctttgaataaagcctgagtaggaaggctagcaaaaaaaaaaaaaaaaaaaaaaaaaaaaaaaaaaaaaaaaaaaaaaaaaaaaaaaaaaaaaaaaaaaaaaaaaaaaaaaa

SEQ ID NO: 3723 - RNA, 5419 nt, synthetic construct
  source 1..5419: mol_type = other RNA
aggaaataagagagaaaagaagagtaagaagaaatataagagccaccatggcccctaagaagaagcgtaaagtgagccgggtgaacggcagcggcagcggcggcggcatgaaccacgaccaggagttcgacccccctaaggtgtaccctcccgtccccgccgagaagagaaagcccatccgggtcctgagcctgttcgatggcatcgccaccggtctgctggtgctgaaggacctgggcatccaggtggataggtacattgcctccgaggtgtgcgaggactccatcaccgtgggaatggtgcgtcatcagggcaagatcatgtacgtgggcgacgtgcggagcgtgacacagaagcatatccaggagtggggccctttcgacctggtgatcggcggcagcccttgcaatgacctgagcatcgtgaacccagcccggaagggcctgtacgagggaaccggcagactgttcttcgagttttacagactgctgcacgacgcccggcctaaggaaggcgacgaccggcccttcttttggctgttcgagaatgtggtggccatgggagtcagcgacaagcgggatattagccggttcctggagagcaaccccgtgatgatcgatgccaaggaagtgagcgccgcccaccgggccagatacttctggggcaatctgcctggcatgaacagacccctggccagcaccgtgaacgacaagctggagctgcaggagtgcctggagcacggccggatcgccaagttcagcaaggtgagaaccatcaccacccgaagcaacagcatcaaacaaggcaaggaccagcactttcctgtgttcatgaacgagaaggaggacatcctgtggtgtaccgagatggagagagtgttcgggttcccagtccactacacagatgtcagcaacatgtctagactggccagacagagactgctgggaagaagctggtccgtccctgtgatcagacacctgttcgcccctctgaaggagtacttcgcctgcgtgagcagcggcaacagcaacgccaacagccggggccccagcttctctagcggcctggtgccactgtccctgagagggagccacatgggccccatggagatctacaaaaccgtgagcgcctggaagcggcagcctgtgcgcgtgctgagcctgtttcggaatatcgataaagtcctgaaaagcctgggattcctggagagcggctctggctccggcggtggcaccctgaagtacgtggaggatgtgacaaacgtggtcagacgggatgtggagaagtggggccccttcgatctggtgtacggcagcacccaacccctgggcagctcttgtgaccggtgccctggctggtacatgtttcagttccaccggatcctgcagtacgccctgccgagacaggagtcccagcggccattcttttggattttcatggacaacttgctgctgaccgaggatgaccaggaaactaccactcggttcctgcagaccgaagccgtgaccctgcaggacgtgagaggccgggactaccagaacgccatgcgggtgtggtccaacatccctggactgaaaagcaagcacgcacctctgacccctaaagaagaggagtacctgcaggcccaggtgcggagcagaagcaagctggacgcccctaaggtggatctgctggtgaagaattgcctcctgcccctgagagagtacttcaagtatttcagccagaatagtctgcccctgggcggcccaagcagcggcgcccctcctcccagcggcggcagcccagccggctccccaacctctaccgaggagggcacctctgagtccgccacccccgagagcggccctggcacctccaccgagcccagcgagggcagcgcacccggcagccctgccggcagccccacctccacagaggagggaaccagcaccgagcccagcgaaggcagcgccccaggcaccagcaccgagcctagtgagggcggctctggcggcggcagcgcccaggagattaaacggatcaacaagatcagaagaagacttgtgaaagacagcaacaccaagaaggccggcaagacaggccccatgaaaaccctgctggttagagtgatgacacccgatctgagagagcggctggaaaacctgagaaagaagcctgaaaatatcccccagcccatcagcaatacatctagagccaacctgaataagctgctgaccgattacaccgaaatgaagaaggcgatcctgcatgtgtactgggaagagttccagaaggaccctgtgggcctgatgagccgggtggcccagcctgccagcaagaagatcgatcagaacaagctgaaacctgagatggacgagaagggcaacctgaccaccgccggctttgcctgctctcagtgtggccagcccctgttcgtgtacaagctggagcaggtgtctgagaagggcaaggcttacaccaactacttcggacggtgcaatgtggccgagcacgaaaagctgatcctgctggcccagctgaagcccgagaaggatagcgacgaagccgtgacatatagcctgggaaagtttgggcagagggccctggatttctacagcattcatgtgaccaaggagtccacccaccccgtgaagcccctggcccagatcgccggaaacagatacgcctccggacctgtgggaaaggccctgagcgacgcatgtatgggcacaatcgcctccttcctgtctaagtaccaggacatcatcatcgaacaccagaaggtggtgaagggcaaccagaagagactggagagcctgcgggagctggccggcaaggaaaacctggaataccctagcgtgaccctgccacctcagcctcacaccaaggagggcgttgatgcctacaacgaagtgatcgcccgggtgcgaatgtgggtgaacctgaacctgtggcagaagctgaagctaagcagagatgatgccaagcctctgctgagactgaagggattcccttcctttcctctggtcgagagacaggccaacgaagtggactggtgggacatggtgtgtaacgtgaagaagctgatcaacgagaaaaaggaggatggcaaggtgttttggcagaatctggctggctacaagagacaggaagccctgagaccatacctgagcagcgaggaagatcggaagaagggaaagaaattcgctcggtaccagctgggcgacctgctgctgcacctggaaaagaagcacggcgaggactggggaaaggtgtacgacgaggcctgggagcggattgacaagaaagtggaaggcctgagcaagcacatcaagctggaagaggaacggagaagcgaggacgcccagagcaaggccgccctgaccgactggctgcgggctaaggccagcttcgtgatcgagggcctgaaggaggccgacaaggacgagttctgcagatgcgagctgaagctgcagaagtggtacggggacctgcggggaaagcccttcgccatcgaagccgagaacagcatcctggacatcagcggcttcagcaagcagtacaactgtgccttcatctggcagaaggacggcgtgaagaagctgaacctgtacctgatcatcaactacttcaagggcggcaagctgcggttcaagaagatcaaacctgaagccttcgaagccaacagattctacaccgtgatcaacaaaaagagcggcgagatcgtgcccatggaggtgaacttcaacttcgacgaccccaacctgatcatcctgcctctggcctttggcaagagacagggcagagaattcatctggaacgacctgctgtccctggaaaccggcagcctgaagctggccaacggaagagtgatcgagaagacactgtacaacagaagaacccggcaggatgagcctgccctgttcgtggccctgaccttcgagcggcgggaggtcctggactcctccaatatcaaaccaatgaacctgatcggcgtggcaagaggcgaaaacatccccgccgtgatcgccctgaccgaccccgagggctgcccactgagccggtttaaggatagcctgggaaacccaacccacatcctgagaatcggcgagagctataaggagaagcagcggaccatccaggccaagaaggaggtggagcagcggagagccggcggctacagccggaagtacgccagcaaagccaagaatctggcagacgatatggtgagaaacaccgctagagatctgctgtactacgccgtgacccaggatgccatgctgatcttcgccaacctgagccggggcttcggccggcagggcaagcggaccttcatggccgagagacagtacacacggatggaggactggctgaccgccaagctggcctacgagggcctgagcaagacctacctgtccaagacactggcccagtacacctccaagacatgcagcaactgtgggtttaccatcaccagcgccgactacgacagggtgctggagaagctgaagaagacagcaacaggctggatgaccacaattaacggcaaggagctgaaggtggagggccagattacctactacaacagatacaagagacagaacgtagtcaaggacctgtccgtcgagctggatagactgagcgaagaatctgtgaacaacgacatctcctcctggacaaagggcagaagcggagaagctctgagcctcctgaagaaaagattctcccatagacccgtgcaggagaagttcgtgtgcctgaactgcggcttcgagacacacgcagccgagcaagccgccctgaacatcgccagatcctggctgttcctgcggagccaggagtacaagaaataccagacaaacaagacaaccggcaacaccgataagagagccttcgtcgagacctggcagtccttttaccggaagaagcttaaggaggtgtggaaacctgccgtgcggtctggcggatctggcggaggctccacaagcatggccttcaaggacgtggccgtggccttcacccagaaggagtggaagctgctgagccccgcccagaggaccctgtacagggacgtgatgctggagaactacagccacatggtgagcctgggcatcgccttccccaagcccaagctgatcatccagctggagcagggcgacgagccctggagggaggagagcgagagcctgctggacctgtgccccgagcccaggaccgagttccagccccacaccagccccaagaaaaagagaaaagtctaagctgccttctgcggggcttgccttctggccatgcccttcttctctcccttgcacctgtacctcttggtctttgaataaagcctgagtaggaaggctagcaaaaaaaaaaaaaaaaaaaaaaaaaaaaaaaaaaaaaaaaaaaaaaaaaaaaaaaaaaaaaaaaaaaaaaaaaaaaaaaa

SEQ ID NO: 3724 - RNA, 5419 nt, synthetic construct
  source 1..5419: mol_type = other RNA
aggaaataagagagaaaagaagagtaagaagaaatataagagccaccatggcccctaagaagaagcgtaaagtgagccgggtgaacggcagcggcagcggcggcggcatgaaccacgaccaggagttcgacccccctaaggtgtaccctcccgtccccgccgagaagagaaagcccatccgggtcctgagcctgttcgatggcatcgccaccggtctgctggtgctgaaggacctgggcatccaggtggataggtacattgcctccgaggtgtgcgaggactccatcaccgtgggaatggtgcgtcatcagggcaagatcatgtacgtgggcgacgtgcggagcgtgacacagaagcatatccaggagtggggccctttcgacctggtgatcggcggcagcccttgcaatgacctgagcatcgtgaacccagcccggaagggcctgtacgagggaaccggcagactgttcttcgagttttacagactgctgcacgacgcccggcctaaggaaggcgacgaccggcccttcttttggctgttcgagaatgtggtggccatgggagtcagcgacaagcgggatattagccggttcctggagagcaaccccgtgatgatcgatgccaaggaagtgagcgccgcccaccgggccagatacttctggggcaatctgcctggcatgaacagacccctggccagcaccgtgaacgacaagctggagctgcaggagtgcctggagcacggccggatcgccaagttcagcaaggtgagaaccatcaccacccgaagcaacagcatcaaacaaggcaaggaccagcactttcctgtgttcatgaacgagaaggaggacatcctgtggtgtaccgagatggagagagtgttcgggttcccagtccactacacagatgtcagcaacatgtctagactggccagacagagactgctgggaagaagctggtccgtccctgtgatcagacacctgttcgcccctctgaaggagtacttcgcctgcgtgagcagcggcaacagcaacgccaacagccggggccccagcttctctagcggcctggtgccactgtccctgagagggagccacatgggccccatggagatctacaaaaccgtgagcgcctggaagcggcagcctgtgcgcgtgctgagcctgtttcggaatatcgataaagtcctgaaaagcctgggattcctggagagcggctctggctccggcggtggcaccctgaagtacgtggaggatgtgacaaacgtggtcagacgggatgtggagaagtggggccccttcgatctggtgtacggcagcacccaacccctgggcagctcttgtgaccggtgccctggctggtacatgtttcagttccaccggatcctgcagtacgccctgccgagacaggagtcccagcggccattcttttggattttcatggacaacttgctgctgaccgaggatgaccaggaaactaccactcggttcctgcagaccgaagccgtgaccctgcaggacgtgagaggccgggactaccagaacgccatgcgggtgtggtccaacatccctggactgaaaagcaagcacgcacctctgacccctaaagaagaggagtacctgcaggcccaggtgcggagcagaagcaagctggacgcccctaaggtggatctgctggtgaagaattgcctcctgcccctgagagagtacttcaagtatttcagccagaatagtctgcccctgggcggcccaagcagcggcgcccctcctcccagcggcggcagcccagccggctccccaacctctaccgaggagggcacctctgagtccgccacccccgagagcggccctggcacctccaccgagcccagcgagggcagcgcacccggcagccctgccggcagccccacctccacagaggagggaaccagcaccgagcccagcgaaggcagcgccccaggcaccagcaccgagcctagtgagggcggctctggcggcggcagcgcccaggagattaaacggatcaacaagatcagaagaagacttgtgaaagacagcaacaccaagaaggccggcaagacaggccccatgaaaaccctgctggttagagtgatgacacccgatctgagagagcggctggaaaacctgagaaagaagcctgaaaatatcccccagcccatcagcaatacatctagagccaacctgaataagctgctgaccgattacaccgaaatgaagaaggcgatcctgcatgtgtactgggaagagttccagaaggaccctgtgggcctgatgagccgggtggcccagcctgccagcaagaagatcgatcagaacaagctgaaacctgagatggacgagaagggcaacctgaccaccgccggctttgcctgctctcagtgtggccagcccctgttcgtgtacaagctggagcaggtgtctgagaagggcaaggcttacaccaactacttcggacggtgcaatgtggccgagcacgaaaagctgatcctgctggcccagctgaagcccgagaaggatagcgacgaagccgtgacatatagcctgggaaagtttgggcagagggccctggatttctacagcattcatgtgaccaaggagtccacccaccccgtgaagcccctggcccagatcgccggaaacagatacgcctccggacctgtgggaaaggccctgagcgacgcatgtatgggcacaatcgcctccttcctgtctaagtaccaggacatcatcatcgaacaccagaaggtggtgaagggcaaccagaagagactggagagcctgcgggagctggccggcaaggaaaacctggaataccctagcgtgaccctgccacctcagcctcacaccaaggagggcgttgatgcctacaacgaagtgatcgcccgggtgcgaatgtgggtgaacctgaacctgtggcagaagctgaagctaagcagagatgatgccaagcctctgctgagactgaagggattcccttcctttcctctggtcgagagacaggccaacgaagtggactggtgggacatggtgtgtaacgtgaagaagctgatcaacgagaaaaaggaggatggcaaggtgttttggcagaatctggctggctacaagagacaggaagccctgagaccatacctgagcagcgaggaagatcggaagaagggaaagaaattcgctcggtaccagctgggcgacctgctgctgcacctggaaaagaagcacggcgaggactggggaaaggtgtacgacgaggcctgggagcggattgacaagaaagtggaaggcctgagcaagcacatcaagctggaagaggaacggagaagcgaggacgcccagagcaaggccgccctgaccgactggctgcgggctaaggccagcttcgtgatcgagggcctgaaggaggccgacaaggacgagttctgcagatgcgagctgaagctgcagaagtggtacggggacctgcggggaaagcccttcgccatcgaagccgagaacagcatcctggacatcagcggcttcagcaagcagtacaactgtgccttcatctggcagaaggacggcgtgaagaagctgaacctgtacctgatcatcaactacttcaagggcggcaagctgcggttcaagaagatcaaacctgaagccttcgaagccaacagattctacaccgtgatcaacaaaaagagcggcgagatcgtgcccatggaggtgaacttcaacttcgacgaccccaacctgatcatcctgcctctggcctttggcaagagacagggcagagaattcatctggaacgacctgctgtccctggaaaccggcagcctgaagctggccaacggaagagtgatcgagaagacactgtacaacagaagaacccggcaggatgagcctgccctgttcgtggccctgaccttcgagcggcgggaggtcctggactcctccaatatcaaaccaatgaacctgatcggcgtggcaagaggcgaaaacatccccgccgtgatcgccctgaccgaccccgagggctgcccactgagccggtttaaggatagcctgggaaacccaacccacatcctgagaatcggcgagagctataaggagaagcagcggaccatccaggccaagaaggaggtggagcagcggagagccggcggctacagccggaagtacgccagcaaagccaagaatctggcagacgatatggtgagaaacaccgctagagatctgctgtactacgccgtgacccaggatgccatgctgatcttcgccaacctgagccggggcttcggccggcagggcaagcggaccttcatggccgagagacagtacacacggatggaggactggctgaccgccaagctggcctacgagggcctgagcaagacctacctgtccaagacactggcccagtacacctccaagacatgcagcaactgtgggtttaccatcaccagcgccgactacgacagggtgctggagaagctgaagaagacagcaacaggctggatgaccacaattaacggcaaggagctgaaggtggagggccagattacctactacaacagatacaagagacagaacgtagtcaaggacctgtccgtcgagctggatagactgagcgaagaatctgtgaacaacgacatctcctcctggacaaagggcagaagcggagaagctctgagcctcctgaagaaaagattctcccatagacccgtgcaggagaagttcgtgtgcctgaactgcggcttcgagacacacgcagccgagcaagccgccctgaacatcgccagatcctggctgttcctgcggagccaggagtacaagaaataccagacaaacaagacaaccggcaacaccgataagagagccttcgtcgagacctggcagtccttttaccggaagaagcttaaggaggtgtggaaacctgccgtgcggtctggcggatctggcggaggctccacaagcagccaggagagcgtgagcttcgaggacgtggccgtgtacttcacccagaaccagtgggccagcctggacagcgcccagaggaccctgtacaggaaggtgatgctggagaactacgccaacgtgaccagcctggccgccttccccttccccaagcccgacctgatcctgcagctggagcagggcgaggcccccggcggcctggacccctggacccccatcaggagggaggtgaggggcgtgtgcaccagccccaagaaaaagagaaaagtctaagctgccttctgcggggcttgccttctggccatgcccttcttctctcccttgcacctgtacctcttggtctttgaataaagcctgagtaggaaggctagcaaaaaaaaaaaaaaaaaaaaaaaaaaaaaaaaaaaaaaaaaaaaaaaaaaaaaaaaaaaaaaaaaaaaaaaaaaaaaaaa

SEQ ID NO: 3725 - RNA, 5419 nt, synthetic construct
  source 1..5419: mol_type = other RNA
aggaaataagagagaaaagaagagtaagaagaaatataagagccaccatggcccctaagaagaagcgtaaagtgagccgggtgaacggcagcggcagcggcggcggcatgaaccacgaccaggagttcgacccccctaaggtgtaccctcccgtccccgccgagaagagaaagcccatccgggtcctgagcctgttcgatggcatcgccaccggtctgctggtgctgaaggacctgggcatccaggtggataggtacattgcctccgaggtgtgcgaggactccatcaccgtgggaatggtgcgtcatcagggcaagatcatgtacgtgggcgacgtgcggagcgtgacacagaagcatatccaggagtggggccctttcgacctggtgatcggcggcagcccttgcaatgacctgagcatcgtgaacccagcccggaagggcctgtacgagggaaccggcagactgttcttcgagttttacagactgctgcacgacgcccggcctaaggaaggcgacgaccggcccttcttttggctgttcgagaatgtggtggccatgggagtcagcgacaagcgggatattagccggttcctggagagcaaccccgtgatgatcgatgccaaggaagtgagcgccgcccaccgggccagatacttctggggcaatctgcctggcatgaacagacccctggccagcaccgtgaacgacaagctggagctgcaggagtgcctggagcacggccggatcgccaagttcagcaaggtgagaaccatcaccacccgaagcaacagcatcaaacaaggcaaggaccagcactttcctgtgttcatgaacgagaaggaggacatcctgtggtgtaccgagatggagagagtgttcgggttcccagtccactacacagatgtcagcaacatgtctagactggccagacagagactgctgggaagaagctggtccgtccctgtgatcagacacctgttcgcccctctgaaggagtacttcgcctgcgtgagcagcggcaacagcaacgccaacagccggggccccagcttctctagcggcctggtgccactgtccctgagagggagccacatgggccccatggagatctacaaaaccgtgagcgcctggaagcggcagcctgtgcgcgtgctgagcctgtttcggaatatcgataaagtcctgaaaagcctgggattcctggagagcggctctggctccggcggtggcaccctgaagtacgtggaggatgtgacaaacgtggtcagacgggatgtggagaagtggggccccttcgatctggtgtacggcagcacccaacccctgggcagctcttgtgaccggtgccctggctggtacatgtttcagttccaccggatcctgcagtacgccctgccgagacaggagtcccagcggccattcttttggattttcatggacaacttgctgctgaccgaggatgaccaggaaactaccactcggttcctgcagaccgaagccgtgaccctgcaggacgtgagaggccgggactaccagaacgccatgcgggtgtggtccaacatccctggactgaaaagcaagcacgcacctctgacccctaaagaagaggagtacctgcaggcccaggtgcggagcagaagcaagctggacgcccctaaggtggatctgctggtgaagaattgcctcctgcccctgagagagtacttcaagtatttcagccagaatagtctgcccctgggcggcccaagcagcggcgcccctcctcccagcggcggcagcccagccggctccccaacctctaccgaggagggcacctctgagtccgccacccccgagagcggccctggcacctccaccgagcccagcgagggcagcgcacccggcagccctgccggcagccccacctccacagaggagggaaccagcaccgagcccagcgaaggcagcgccccaggcaccagcaccgagcctagtgagggcggctctggcggcggcagcgcccaggagattaaacggatcaacaagatcagaagaagacttgtgaaagacagcaacaccaagaaggccggcaagacaggccccatgaaaaccctgctggttagagtgatgacacccgatctgagagagcggctggaaaacctgagaaagaagcctgaaaatatcccccagcccatcagcaatacatctagagccaacctgaataagctgctgaccgattacaccgaaatgaagaaggcgatcctgcatgtgtactgggaagagttccagaaggaccctgtgggcctgatgagccgggtggcccagcctgccagcaagaagatcgatcagaacaagctgaaacctgagatggacgagaagggcaacctgaccaccgccggctttgcctgctctcagtgtggccagcccctgttcgtgtacaagctggagcaggtgtctgagaagggcaaggcttacaccaactacttcggacggtgcaatgtggccgagcacgaaaagctgatcctgctggcccagctgaagcccgagaaggatagcgacgaagccgtgacatatagcctgggaaagtttgggcagagggccctggatttctacagcattcatgtgaccaaggagtccacccaccccgtgaagcccctggcccagatcgccggaaacagatacgcctccggacctgtgggaaaggccctgagcgacgcatgtatgggcacaatcgcctccttcctgtctaagtaccaggacatcatcatcgaacaccagaaggtggtgaagggcaaccagaagagactggagagcctgcgggagctggccggcaaggaaaacctggaataccctagcgtgaccctgccacctcagcctcacaccaaggagggcgttgatgcctacaacgaagtgatcgcccgggtgcgaatgtgggtgaacctgaacctgtggcagaagctgaagctaagcagagatgatgccaagcctctgctgagactgaagggattcccttcctttcctctggtcgagagacaggccaacgaagtggactggtgggacatggtgtgtaacgtgaagaagctgatcaacgagaaaaaggaggatggcaaggtgttttggcagaatctggctggctacaagagacaggaagccctgagaccatacctgagcagcgaggaagatcggaagaagggaaagaaattcgctcggtaccagctgggcgacctgctgctgcacctggaaaagaagcacggcgaggactggggaaaggtgtacgacgaggcctgggagcggattgacaagaaagtggaaggcctgagcaagcacatcaagctggaagaggaacggagaagcgaggacgcccagagcaaggccgccctgaccgactggctgcgggctaaggccagcttcgtgatcgagggcctgaaggaggccgacaaggacgagttctgcagatgcgagctgaagctgcagaagtggtacggggacctgcggggaaagcccttcgccatcgaagccgagaacagcatcctggacatcagcggcttcagcaagcagtacaactgtgccttcatctggcagaaggacggcgtgaagaagctgaacctgtacctgatcatcaactacttcaagggcggcaagctgcggttcaagaagatcaaacctgaagccttcgaagccaacagattctacaccgtgatcaacaaaaagagcggcgagatcgtgcccatggaggtgaacttcaacttcgacgaccccaacctgatcatcctgcctctggcctttggcaagagacagggcagagaattcatctggaacgacctgctgtccctggaaaccggcagcctgaagctggccaacggaagagtgatcgagaagacactgtacaacagaagaacccggcaggatgagcctgccctgttcgtggccctgaccttcgagcggcgggaggtcctggactcctccaatatcaaaccaatgaacctgatcggcgtggcaagaggcgaaaacatccccgccgtgatcgccctgaccgaccccgagggctgcccactgagccggtttaaggatagcctgggaaacccaacccacatcctgagaatcggcgagagctataaggagaagcagcggaccatccaggccaagaaggaggtggagcagcggagagccggcggctacagccggaagtacgccagcaaagccaagaatctggcagacgatatggtgagaaacaccgctagagatctgctgtactacgccgtgacccaggatgccatgctgatcttcgccaacctgagccggggcttcggccggcagggcaagcggaccttcatggccgagagacagtacacacggatggaggactggctgaccgccaagctggcctacgagggcctgagcaagacctacctgtccaagacactggcccagtacacctccaagacatgcagcaactgtgggtttaccatcaccagcgccgactacgacagggtgctggagaagctgaagaagacagcaacaggctggatgaccacaattaacggcaaggagctgaaggtggagggccagattacctactacaacagatacaagagacagaacgtagtcaaggacctgtccgtcgagctggatagactgagcgaagaatctgtgaacaacgacatctcctcctggacaaagggcagaagcggagaagctctgagcctcctgaagaaaagattctcccatagacccgtgcaggagaagttcgtgtgcctgaactgcggcttcgagacacacgcagccgagcaagccgccctgaacatcgccagatcctggctgttcctgcggagccaggagtacaagaaataccagacaaacaagacaaccggcaacaccgataagagagccttcgtcgagacctggcagtccttttaccggaagaagcttaaggaggtgtggaaacctgccgtgcggtctggcggatctggcggaggctccacaagcgtgcaggagagcgtgaccttcagggacctggccgtggacttcgacatggaggagtggggctacctgtgccccagccagaaggagctgtacagggaggtgatgctggagaactacaggcacctggtgagcctgggcctgctggaggccaagcccgacctgatcagcaggctggagcaggaggagccccaggtgtgggaggtgcaggagggcgccagcggcagcgtgtgcgcctgcaccggcggcaccagccccaagaaaaagagaaaagtctaagctgccttctgcggggcttgccttctggccatgcccttcttctctcccttgcacctgtacctcttggtctttgaataaagcctgagtaggaaggctagcaaaaaaaaaaaaaaaaaaaaaaaaaaaaaaaaaaaaaaaaaaaaaaaaaaaaaaaaaaaaaaaaaaaaaaaaaaaaaaaa

SEQ ID NO: 3726 - RNA, 5419 nt, synthetic construct
  source 1..5419: mol_type = other RNA
aggaaataagagagaaaagaagagtaagaagaaatataagagccaccatggcccctaagaagaagcgtaaagtgagccgggtgaacggcagcggcagcggcggcggcatgaaccacgaccaggagttcgacccccctaaggtgtaccctcccgtccccgccgagaagagaaagcccatccgggtcctgagcctgttcgatggcatcgccaccggtctgctggtgctgaaggacctgggcatccaggtggataggtacattgcctccgaggtgtgcgaggactccatcaccgtgggaatggtgcgtcatcagggcaagatcatgtacgtgggcgacgtgcggagcgtgacacagaagcatatccaggagtggggccctttcgacctggtgatcggcggcagcccttgcaatgacctgagcatcgtgaacccagcccggaagggcctgtacgagggaaccggcagactgttcttcgagttttacagactgctgcacgacgcccggcctaaggaaggcgacgaccggcccttcttttggctgttcgagaatgtggtggccatgggagtcagcgacaagcgggatattagccggttcctggagagcaaccccgtgatgatcgatgccaaggaagtgagcgccgcccaccgggccagatacttctggggcaatctgcctggcatgaacagacccctggccagcaccgtgaacgacaagctggagctgcaggagtgcctggagcacggccggatcgccaagttcagcaaggtgagaaccatcaccacccgaagcaacagcatcaaacaaggcaaggaccagcactttcctgtgttcatgaacgagaaggaggacatcctgtggtgtaccgagatggagagagtgttcgggttcccagtccactacacagatgtcagcaacatgtctagactggccagacagagactgctgggaagaagctggtccgtccctgtgatcagacacctgttcgcccctctgaaggagtacttcgcctgcgtgagcagcggcaacagcaacgccaacagccggggccccagcttctctagcggcctggtgccactgtccctgagagggagccacatgggccccatggagatctacaaaaccgtgagcgcctggaagcggcagcctgtgcgcgtgctgagcctgtttcggaatatcgataaagtcctgaaaagcctgggattcctggagagcggctctggctccggcggtggcaccctgaagtacgtggaggatgtgacaaacgtggtcagacgggatgtggagaagtggggccccttcgatctggtgtacggcagcacccaacccctgggcagctcttgtgaccggtgccctggctggtacatgtttcagttccaccggatcctgcagtacgccctgccgagacaggagtcccagcggccattcttttggattttcatggacaacttgctgctgaccgaggatgaccaggaaactaccactcggttcctgcagaccgaagccgtgaccctgcaggacgtgagaggccgggactaccagaacgccatgcgggtgtggtccaacatccctggactgaaaagcaagcacgcacctctgacccctaaagaagaggagtacctgcaggcccaggtgcggagcagaagcaagctggacgcccctaaggtggatctgctggtgaagaattgcctcctgcccctgagagagtacttcaagtatttcagccagaatagtctgcccctgggcggcccaagcagcggcgcccctcctcccagcggcggcagcccagccggctccccaacctctaccgaggagggcacctctgagtccgccacccccgagagcggccctggcacctccaccgagcccagcgagggcagcgcacccggcagccctgccggcagccccacctccacagaggagggaaccagcaccgagcccagcgaaggcagcgccccaggcaccagcaccgagcctagtgagggcggctctggcggcggcagcgcccaggagattaaacggatcaacaagatcagaagaagacttgtgaaagacagcaacaccaagaaggccggcaagacaggccccatgaaaaccctgctggttagagtgatgacacccgatctgagagagcggctggaaaacctgagaaagaagcctgaaaatatcccccagcccatcagcaatacatctagagccaacctgaataagctgctgaccgattacaccgaaatgaagaaggcgatcctgcatgtgtactgggaagagttccagaaggaccctgtgggcctgatgagccgggtggcccagcctgccagcaagaagatcgatcagaacaagctgaaacctgagatggacgagaagggcaacctgaccaccgccggctttgcctgctctcagtgtggccagcccctgttcgtgtacaagctggagcaggtgtctgagaagggcaaggcttacaccaactacttcggacggtgcaatgtggccgagcacgaaaagctgatcctgctggcccagctgaagcccgagaaggatagcgacgaagccgtgacatatagcctgggaaagtttgggcagagggccctggatttctacagcattcatgtgaccaaggagtccacccaccccgtgaagcccctggcccagatcgccggaaacagatacgcctccggacctgtgggaaaggccctgagcgacgcatgtatgggcacaatcgcctccttcctgtctaagtaccaggacatcatcatcgaacaccagaaggtggtgaagggcaaccagaagagactggagagcctgcgggagctggccggcaaggaaaacctggaataccctagcgtgaccctgccacctcagcctcacaccaaggagggcgttgatgcctacaacgaagtgatcgcccgggtgcgaatgtgggtgaacctgaacctgtggcagaagctgaagctaagcagagatgatgccaagcctctgctgagactgaagggattcccttcctttcctctggtcgagagacaggccaacgaagtggactggtgggacatggtgtgtaacgtgaagaagctgatcaacgagaaaaaggaggatggcaaggtgttttggcagaatctggctggctacaagagacaggaagccctgagaccatacctgagcagcgaggaagatcggaagaagggaaagaaattcgctcggtaccagctgggcgacctgctgctgcacctggaaaagaagcacggcgaggactggggaaaggtgtacgacgaggcctgggagcggattgacaagaaagtggaaggcctgagcaagcacatcaagctggaagaggaacggagaagcgaggacgcccagagcaaggccgccctgaccgactggctgcgggctaaggccagcttcgtgatcgagggcctgaaggaggccgacaaggacgagttctgcagatgcgagctgaagctgcagaagtggtacggggacctgcggggaaagcccttcgccatcgaagccgagaacagcatcctggacatcagcggcttcagcaagcagtacaactgtgccttcatctggcagaaggacggcgtgaagaagctgaacctgtacctgatcatcaactacttcaagggcggcaagctgcggttcaagaagatcaaacctgaagccttcgaagccaacagattctacaccgtgatcaacaaaaagagcggcgagatcgtgcccatggaggtgaacttcaacttcgacgaccccaacctgatcatcctgcctctggcctttggcaagagacagggcagagaattcatctggaacgacctgctgtccctggaaaccggcagcctgaagctggccaacggaagagtgatcgagaagacactgtacaacagaagaacccggcaggatgagcctgccctgttcgtggccctgaccttcgagcggcgggaggtcctggactcctccaatatcaaaccaatgaacctgatcggcgtggcaagaggcgaaaacatccccgccgtgatcgccctgaccgaccccgagggctgcccactgagccggtttaaggatagcctgggaaacccaacccacatcctgagaatcggcgagagctataaggagaagcagcggaccatccaggccaagaaggaggtggagcagcggagagccggcggctacagccggaagtacgccagcaaagccaagaatctggcagacgatatggtgagaaacaccgctagagatctgctgtactacgccgtgacccaggatgccatgctgatcttcgccaacctgagccggggcttcggccggcagggcaagcggaccttcatggccgagagacagtacacacggatggaggactggctgaccgccaagctggcctacgagggcctgagcaagacctacctgtccaagacactggcccagtacacctccaagacatgcagcaactgtgggtttaccatcaccagcgccgactacgacagggtgctggagaagctgaagaagacagcaacaggctggatgaccacaattaacggcaaggagctgaaggtggagggccagattacctactacaacagatacaagagacagaacgtagtcaaggacctgtccgtcgagctggatagactgagcgaagaatctgtgaacaacgacatctcctcctggacaaagggcagaagcggagaagctctgagcctcctgaagaaaagattctcccatagacccgtgcaggagaagttcgtgtgcctgaactgcggcttcgagacacacgcagccgagcaagccgccctgaacatcgccagatcctggctgttcctgcggagccaggagtacaagaaataccagacaaacaagacaaccggcaacaccgataagagagccttcgtcgagacctggcagtccttttaccggaagaagcttaaggaggtgtggaaacctgccgtgcggtctggcggatctggcggaggctccacaagcagccaggagctgctgaccttcaaggacgtgagcgtggacttcacccaggaggagtggggccagctgagcctggcccacaggaacctgtacagggaggtgatgctggagaactacggcaacctggtgagcgtggccggctaccagctgagcaagcccagcgtgatcagccagctggagaagggccaggagccctggatgaccgagaagaagggccccggcgaccccagccccgacctgaagaacaccagccccaagaaaaagagaaaagtctaagctgccttctgcggggcttgccttctggccatgcccttcttctctcccttgcacctgtacctcttggtctttgaataaagcctgagtaggaaggctagcaaaaaaaaaaaaaaaaaaaaaaaaaaaaaaaaaaaaaaaaaaaaaaaaaaaaaaaaaaaaaaaaaaaaaaaaaaaaaaaa

SEQ ID NO: 3727 - RNA, 5419 nt, synthetic construct
  source 1..5419: mol_type = other RNA
aggaaataagagagaaaagaagagtaagaagaaatataagagccaccatggcccctaagaagaagcgtaaagtgagccgggtgaacggcagcggcagcggcggcggcatgaaccacgaccaggagttcgacccccctaaggtgtaccctcccgtccccgccgagaagagaaagcccatccgggtcctgagcctgttcgatggcatcgccaccggtctgctggtgctgaaggacctgggcatccaggtggataggtacattgcctccgaggtgtgcgaggactccatcaccgtgggaatggtgcgtcatcagggcaagatcatgtacgtgggcgacgtgcggagcgtgacacagaagcatatccaggagtggggccctttcgacctggtgatcggcggcagcccttgcaatgacctgagcatcgtgaacccagcccggaagggcctgtacgagggaaccggcagactgttcttcgagttttacagactgctgcacgacgcccggcctaaggaaggcgacgaccggcccttcttttggctgttcgagaatgtggtggccatgggagtcagcgacaagcgggatattagccggttcctggagagcaaccccgtgatgatcgatgccaaggaagtgagcgccgcccaccgggccagatacttctggggcaatctgcctggcatgaacagacccctggccagcaccgtgaacgacaagctggagctgcaggagtgcctggagcacggccggatcgccaagttcagcaaggtgagaaccatcaccacccgaagcaacagcatcaaacaaggcaaggaccagcactttcctgtgttcatgaacgagaaggaggacatcctgtggtgtaccgagatggagagagtgttcgggttcccagtccactacacagatgtcagcaacatgtctagactggccagacagagactgctgggaagaagctggtccgtccctgtgatcagacacctgttcgcccctctgaaggagtacttcgcctgcgtgagcagcggcaacagcaacgccaacagccggggccccagcttctctagcggcctggtgccactgtccctgagagggagccacatgggccccatggagatctacaaaaccgtgagcgcctggaagcggcagcctgtgcgcgtgctgagcctgtttcggaatatcgataaagtcctgaaaagcctgggattcctggagagcggctctggctccggcggtggcaccctgaagtacgtggaggatgtgacaaacgtggtcagacgggatgtggagaagtggggccccttcgatctggtgtacggcagcacccaacccctgggcagctcttgtgaccggtgccctggctggtacatgtttcagttccaccggatcctgcagtacgccctgccgagacaggagtcccagcggccattcttttggattttcatggacaacttgctgctgaccgaggatgaccaggaaactaccactcggttcctgcagaccgaagccgtgaccctgcaggacgtgagaggccgggactaccagaacgccatgcgggtgtggtccaacatccctggactgaaaagcaagcacgcacctctgacccctaaagaagaggagtacctgcaggcccaggtgcggagcagaagcaagctggacgcccctaaggtggatctgctggtgaagaattgcctcctgcccctgagagagtacttcaagtatttcagccagaatagtctgcccctgggcggcccaagcagcggcgcccctcctcccagcggcggcagcccagccggctccccaacctctaccgaggagggcacctctgagtccgccacccccgagagcggccctggcacctccaccgagcccagcgagggcagcgcacccggcagccctgccggcagccccacctccacagaggagggaaccagcaccgagcccagcgaaggcagcgccccaggcaccagcaccgagcctagtgagggcggctctggcggcggcagcgcccaggagattaaacggatcaacaagatcagaagaagacttgtgaaagacagcaacaccaagaaggccggcaagacaggccccatgaaaaccctgctggttagagtgatgacacccgatctgagagagcggctggaaaacctgagaaagaagcctgaaaatatcccccagcccatcagcaatacatctagagccaacctgaataagctgctgaccgattacaccgaaatgaagaaggcgatcctgcatgtgtactgggaagagttccagaaggaccctgtgggcctgatgagccgggtggcccagcctgccagcaagaagatcgatcagaacaagctgaaacctgagatggacgagaagggcaacctgaccaccgccggctttgcctgctctcagtgtggccagcccctgttcgtgtacaagctggagcaggtgtctgagaagggcaaggcttacaccaactacttcggacggtgcaatgtggccgagcacgaaaagctgatcctgctggcccagctgaagcccgagaaggatagcgacgaagccgtgacatatagcctgggaaagtttgggcagagggccctggatttctacagcattcatgtgaccaaggagtccacccaccccgtgaagcccctggcccagatcgccggaaacagatacgcctccggacctgtgggaaaggccctgagcgacgcatgtatgggcacaatcgcctccttcctgtctaagtaccaggacatcatcatcgaacaccagaaggtggtgaagggcaaccagaagagactggagagcctgcgggagctggccggcaaggaaaacctggaataccctagcgtgaccctgccacctcagcctcacaccaaggagggcgttgatgcctacaacgaagtgatcgcccgggtgcgaatgtgggtgaacctgaacctgtggcagaagctgaagctaagcagagatgatgccaagcctctgctgagactgaagggattcccttcctttcctctggtcgagagacaggccaacgaagtggactggtgggacatggtgtgtaacgtgaagaagctgatcaacgagaaaaaggaggatggcaaggtgttttggcagaatctggctggctacaagagacaggaagccctgagaccatacctgagcagcgaggaagatcggaagaagggaaagaaattcgctcggtaccagctgggcgacctgctgctgcacctggaaaagaagcacggcgaggactggggaaaggtgtacgacgaggcctgggagcggattgacaagaaagtggaaggcctgagcaagcacatcaagctggaagaggaacggagaagcgaggacgcccagagcaaggccgccctgaccgactggctgcgggctaaggccagcttcgtgatcgagggcctgaaggaggccgacaaggacgagttctgcagatgcgagctgaagctgcagaagtggtacggggacctgcggggaaagcccttcgccatcgaagccgagaacagcatcctggacatcagcggcttcagcaagcagtacaactgtgccttcatctggcagaaggacggcgtgaagaagctgaacctgtacctgatcatcaactacttcaagggcggcaagctgcggttcaagaagatcaaacctgaagccttcgaagccaacagattctacaccgtgatcaacaaaaagagcggcgagatcgtgcccatggaggtgaacttcaacttcgacgaccccaacctgatcatcctgcctctggcctttggcaagagacagggcagagaattcatctggaacgacctgctgtccctggaaaccggcagcctgaagctggccaacggaagagtgatcgagaagacactgtacaacagaagaacccggcaggatgagcctgccctgttcgtggccctgaccttcgagcggcgggaggtcctggactcctccaatatcaaaccaatgaacctgatcggcgtggcaagaggcgaaaacatccccgccgtgatcgccctgaccgaccccgagggctgcccactgagccggtttaaggatagcctgggaaacccaacccacatcctgagaatcggcgagagctataaggagaagcagcggaccatccaggccaagaaggaggtggagcagcggagagccggcggctacagccggaagtacgccagcaaagccaagaatctggcagacgatatggtgagaaacaccgctagagatctgctgtactacgccgtgacccaggatgccatgctgatcttcgccaacctgagccggggcttcggccggcagggcaagcggaccttcatggccgagagacagtacacacggatggaggactggctgaccgccaagctggcctacgagggcctgagcaagacctacctgtccaagacactggcccagtacacctccaagacatgcagcaactgtgggtttaccatcaccagcgccgactacgacagggtgctggagaagctgaagaagacagcaacaggctggatgaccacaattaacggcaaggagctgaaggtggagggccagattacctactacaacagatacaagagacagaacgtagtcaaggacctgtccgtcgagctggatagactgagcgaagaatctgtgaacaacgacatctcctcctggacaaagggcagaagcggagaagctctgagcctcctgaagaaaagattctcccatagacccgtgcaggagaagttcgtgtgcctgaactgcggcttcgagacacacgcagccgagcaagccgccctgaacatcgccagatcctggctgttcctgcggagccaggagtacaagaaataccagacaaacaagacaaccggcaacaccgataagagagccttcgtcgagacctggcagtccttttaccggaagaagcttaaggaggtgtggaaacctgccgtgcggtctggcggatctggcggaggctccacaagcgaggtgcaggagaccctgaccttcgacgacgtggccgtggccttcacctgggaggagtggcagctgctggcccccgcccagaaggccctgtacagggacgtgatgctggagaaccacagcaacctggtgagcgtgggcttccaggccagcacccccgaggtgctgagcaagctggaccagggcgagccctggaccatggacgacgaggtgcactgcaggaccaggagcgaggtgtggaagttcaccagccccaagaaaaagagaaaagtctaagctgccttctgcggggcttgccttctggccatgcccttcttctctcccttgcacctgtacctcttggtctttgaataaagcctgagtaggaaggctagcaaaaaaaaaaaaaaaaaaaaaaaaaaaaaaaaaaaaaaaaaaaaaaaaaaaaaaaaaaaaaaaaaaaaaaaaaaaaaaaa

SEQ ID NO: 3728 - RNA, 5419 nt, synthetic construct
  source 1..5419: mol_type = other RNA
aggaaataagagagaaaagaagagtaagaagaaatataagagccaccatggcccctaagaagaagcgtaaagtgagccgggtgaacggcagcggcagcggcggcggcatgaaccacgaccaggagttcgacccccctaaggtgtaccctcccgtccccgccgagaagagaaagcccatccgggtcctgagcctgttcgatggcatcgccaccggtctgctggtgctgaaggacctgggcatccaggtggataggtacattgcctccgaggtgtgcgaggactccatcaccgtgggaatggtgcgtcatcagggcaagatcatgtacgtgggcgacgtgcggagcgtgacacagaagcatatccaggagtggggccctttcgacctggtgatcggcggcagcccttgcaatgacctgagcatcgtgaacccagcccggaagggcctgtacgagggaaccggcagactgttcttcgagttttacagactgctgcacgacgcccggcctaaggaaggcgacgaccggcccttcttttggctgttcgagaatgtggtggccatgggagtcagcgacaagcgggatattagccggttcctggagagcaaccccgtgatgatcgatgccaaggaagtgagcgccgcccaccgggccagatacttctggggcaatctgcctggcatgaacagacccctggccagcaccgtgaacgacaagctggagctgcaggagtgcctggagcacggccggatcgccaagttcagcaaggtgagaaccatcaccacccgaagcaacagcatcaaacaaggcaaggaccagcactttcctgtgttcatgaacgagaaggaggacatcctgtggtgtaccgagatggagagagtgttcgggttcccagtccactacacagatgtcagcaacatgtctagactggccagacagagactgctgggaagaagctggtccgtccctgtgatcagacacctgttcgcccctctgaaggagtacttcgcctgcgtgagcagcggcaacagcaacgccaacagccggggccccagcttctctagcggcctggtgccactgtccctgagagggagccacatgggccccatggagatctacaaaaccgtgagcgcctggaagcggcagcctgtgcgcgtgctgagcctgtttcggaatatcgataaagtcctgaaaagcctgggattcctggagagcggctctggctccggcggtggcaccctgaagtacgtggaggatgtgacaaacgtggtcagacgggatgtggagaagtggggccccttcgatctggtgtacggcagcacccaacccctgggcagctcttgtgaccggtgccctggctggtacatgtttcagttccaccggatcctgcagtacgccctgccgagacaggagtcccagcggccattcttttggattttcatggacaacttgctgctgaccgaggatgaccaggaaactaccactcggttcctgcagaccgaagccgtgaccctgcaggacgtgagaggccgggactaccagaacgccatgcgggtgtggtccaacatccctggactgaaaagcaagcacgcacctctgacccctaaagaagaggagtacctgcaggcccaggtgcggagcagaagcaagctggacgcccctaaggtggatctgctggtgaagaattgcctcctgcccctgagagagtacttcaagtatttcagccagaatagtctgcccctgggcggcccaagcagcggcgcccctcctcccagcggcggcagcccagccggctccccaacctctaccgaggagggcacctctgagtccgccacccccgagagcggccctggcacctccaccgagcccagcgagggcagcgcacccggcagccctgccggcagccccacctccacagaggagggaaccagcaccgagcccagcgaaggcagcgccccaggcaccagcaccgagcctagtgagggcggctctggcggcggcagcgcccaggagattaaacggatcaacaagatcagaagaagacttgtgaaagacagcaacaccaagaaggccggcaagacaggccccatgaaaaccctgctggttagagtgatgacacccgatctgagagagcggctggaaaacctgagaaagaagcctgaaaatatcccccagcccatcagcaatacatctagagccaacctgaataagctgctgaccgattacaccgaaatgaagaaggcgatcctgcatgtgtactgggaagagttccagaaggaccctgtgggcctgatgagccgggtggcccagcctgccagcaagaagatcgatcagaacaagctgaaacctgagatggacgagaagggcaacctgaccaccgccggctttgcctgctctcagtgtggccagcccctgttcgtgtacaagctggagcaggtgtctgagaagggcaaggcttacaccaactacttcggacggtgcaatgtggccgagcacgaaaagctgatcctgctggcccagctgaagcccgagaaggatagcgacgaagccgtgacatatagcctgggaaagtttgggcagagggccctggatttctacagcattcatgtgaccaaggagtccacccaccccgtgaagcccctggcccagatcgccggaaacagatacgcctccggacctgtgggaaaggccctgagcgacgcatgtatgggcacaatcgcctccttcctgtctaagtaccaggacatcatcatcgaacaccagaaggtggtgaagggcaaccagaagagactggagagcctgcgggagctggccggcaaggaaaacctggaataccctagcgtgaccctgccacctcagcctcacaccaaggagggcgttgatgcctacaacgaagtgatcgcccgggtgcgaatgtgggtgaacctgaacctgtggcagaagctgaagctaagcagagatgatgccaagcctctgctgagactgaagggattcccttcctttcctctggtcgagagacaggccaacgaagtggactggtgggacatggtgtgtaacgtgaagaagctgatcaacgagaaaaaggaggatggcaaggtgttttggcagaatctggctggctacaagagacaggaagccctgagaccatacctgagcagcgaggaagatcggaagaagggaaagaaattcgctcggtaccagctgggcgacctgctgctgcacctggaaaagaagcacggcgaggactggggaaaggtgtacgacgaggcctgggagcggattgacaagaaagtggaaggcctgagcaagcacatcaagctggaagaggaacggagaagcgaggacgcccagagcaaggccgccctgaccgactggctgcgggctaaggccagcttcgtgatcgagggcctgaaggaggccgacaaggacgagttctgcagatgcgagctgaagctgcagaagtggtacggggacctgcggggaaagcccttcgccatcgaagccgagaacagcatcctggacatcagcggcttcagcaagcagtacaactgtgccttcatctggcagaaggacggcgtgaagaagctgaacctgtacctgatcatcaactacttcaagggcggcaagctgcggttcaagaagatcaaacctgaagccttcgaagccaacagattctacaccgtgatcaacaaaaagagcggcgagatcgtgcccatggaggtgaacttcaacttcgacgaccccaacctgatcatcctgcctctggcctttggcaagagacagggcagagaattcatctggaacgacctgctgtccctggaaaccggcagcctgaagctggccaacggaagagtgatcgagaagacactgtacaacagaagaacccggcaggatgagcctgccctgttcgtggccctgaccttcgagcggcgggaggtcctggactcctccaatatcaaaccaatgaacctgatcggcgtggcaagaggcgaaaacatccccgccgtgatcgccctgaccgaccccgagggctgcccactgagccggtttaaggatagcctgggaaacccaacccacatcctgagaatcggcgagagctataaggagaagcagcggaccatccaggccaagaaggaggtggagcagcggagagccggcggctacagccggaagtacgccagcaaagccaagaatctggcagacgatatggtgagaaacaccgctagagatctgctgtactacgccgtgacccaggatgccatgctgatcttcgccaacctgagccggggcttcggccggcagggcaagcggaccttcatggccgagagacagtacacacggatggaggactggctgaccgccaagctggcctacgagggcctgagcaagacctacctgtccaagacactggcccagtacacctccaagacatgcagcaactgtgggtttaccatcaccagcgccgactacgacagggtgctggagaagctgaagaagacagcaacaggctggatgaccacaattaacggcaaggagctgaaggtggagggccagattacctactacaacagatacaagagacagaacgtagtcaaggacctgtccgtcgagctggatagactgagcgaagaatctgtgaacaacgacatctcctcctggacaaagggcagaagcggagaagctctgagcctcctgaagaaaagattctcccatagacccgtgcaggagaagttcgtgtgcctgaactgcggcttcgagacacacgcagccgagcaagccgccctgaacatcgccagatcctggctgttcctgcggagccaggagtacaagaaataccagacaaacaagacaaccggcaacaccgataagagagccttcgtcgagacctggcagtccttttaccggaagaagcttaaggaggtgtggaaacctgccgtgcggtctggcggatctggcggaggctccacaagcagccagggcctggtgaccttcgaggacgtggccgtgtacttcagcctggaggagtggcagaggctggacgccgcccagagggacctgtacaaggaggtgatgcaggagaactacggcatcctggtgagcctgggctaccccatccccaagcccgacctgatcttcaggctggagcagggcgaggagccctgggtgcccgacagccccagccccgaggagggcgacatcgtgaccggcgtgtacaccagccccaagaaaaagagaaaagtctaagctgccttctgcggggcttgccttctggccatgcccttcttctctcccttgcacctgtacctcttggtctttgaataaagcctgagtaggaaggctagcaaaaaaaaaaaaaaaaaaaaaaaaaaaaaaaaaaaaaaaaaaaaaaaaaaaaaaaaaaaaaaaaaaaaaaaaaaaaaaaa

SEQ ID NO: 3729 - RNA, 5419 nt, synthetic construct
  source 1..5419: mol_type = other RNA
aggaaataagagagaaaagaagagtaagaagaaatataagagccaccatggcccctaagaagaagcgtaaagtgagccgggtgaacggcagcggcagcggcggcggcatgaaccacgaccaggagttcgacccccctaaggtgtaccctcccgtccccgccgagaagagaaagcccatccgggtcctgagcctgttcgatggcatcgccaccggtctgctggtgctgaaggacctgggcatccaggtggataggtacattgcctccgaggtgtgcgaggactccatcaccgtgggaatggtgcgtcatcagggcaagatcatgtacgtgggcgacgtgcggagcgtgacacagaagcatatccaggagtggggccctttcgacctggtgatcggcggcagcccttgcaatgacctgagcatcgtgaacccagcccggaagggcctgtacgagggaaccggcagactgttcttcgagttttacagactgctgcacgacgcccggcctaaggaaggcgacgaccggcccttcttttggctgttcgagaatgtggtggccatgggagtcagcgacaagcgggatattagccggttcctggagagcaaccccgtgatgatcgatgccaaggaagtgagcgccgcccaccgggccagatacttctggggcaatctgcctggcatgaacagacccctggccagcaccgtgaacgacaagctggagctgcaggagtgcctggagcacggccggatcgccaagttcagcaaggtgagaaccatcaccacccgaagcaacagcatcaaacaaggcaaggaccagcactttcctgtgttcatgaacgagaaggaggacatcctgtggtgtaccgagatggagagagtgttcgggttcccagtccactacacagatgtcagcaacatgtctagactggccagacagagactgctgggaagaagctggtccgtccctgtgatcagacacctgttcgcccctctgaaggagtacttcgcctgcgtgagcagcggcaacagcaacgccaacagccggggccccagcttctctagcggcctggtgccactgtccctgagagggagccacatgggccccatggagatctacaaaaccgtgagcgcctggaagcggcagcctgtgcgcgtgctgagcctgtttcggaatatcgataaagtcctgaaaagcctgggattcctggagagcggctctggctccggcggtggcaccctgaagtacgtggaggatgtgacaaacgtggtcagacgggatgtggagaagtggggccccttcgatctggtgtacggcagcacccaacccctgggcagctcttgtgaccggtgccctggctggtacatgtttcagttccaccggatcctgcagtacgccctgccgagacaggagtcccagcggccattcttttggattttcatggacaacttgctgctgaccgaggatgaccaggaaactaccactcggttcctgcagaccgaagccgtgaccctgcaggacgtgagaggccgggactaccagaacgccatgcgggtgtggtccaacatccctggactgaaaagcaagcacgcacctctgacccctaaagaagaggagtacctgcaggcccaggtgcggagcagaagcaagctggacgcccctaaggtggatctgctggtgaagaattgcctcctgcccctgagagagtacttcaagtatttcagccagaatagtctgcccctgggcggcccaagcagcggcgcccctcctcccagcggcggcagcccagccggctccccaacctctaccgaggagggcacctctgagtccgccacccccgagagcggccctggcacctccaccgagcccagcgagggcagcgcacccggcagccctgccggcagccccacctccacagaggagggaaccagcaccgagcccagcgaaggcagcgccccaggcaccagcaccgagcctagtgagggcggctctggcggcggcagcgcccaggagattaaacggatcaacaagatcagaagaagacttgtgaaagacagcaacaccaagaaggccggcaagacaggccccatgaaaaccctgctggttagagtgatgacacccgatctgagagagcggctggaaaacctgagaaagaagcctgaaaatatcccccagcccatcagcaatacatctagagccaacctgaataagctgctgaccgattacaccgaaatgaagaaggcgatcctgcatgtgtactgggaagagttccagaaggaccctgtgggcctgatgagccgggtggcccagcctgccagcaagaagatcgatcagaacaagctgaaacctgagatggacgagaagggcaacctgaccaccgccggctttgcctgctctcagtgtggccagcccctgttcgtgtacaagctggagcaggtgtctgagaagggcaaggcttacaccaactacttcggacggtgcaatgtggccgagcacgaaaagctgatcctgctggcccagctgaagcccgagaaggatagcgacgaagccgtgacatatagcctgggaaagtttgggcagagggccctggatttctacagcattcatgtgaccaaggagtccacccaccccgtgaagcccctggcccagatcgccggaaacagatacgcctccggacctgtgggaaaggccctgagcgacgcatgtatgggcacaatcgcctccttcctgtctaagtaccaggacatcatcatcgaacaccagaaggtggtgaagggcaaccagaagagactggagagcctgcgggagctggccggcaaggaaaacctggaataccctagcgtgaccctgccacctcagcctcacaccaaggagggcgttgatgcctacaacgaagtgatcgcccgggtgcgaatgtgggtgaacctgaacctgtggcagaagctgaagctaagcagagatgatgccaagcctctgctgagactgaagggattcccttcctttcctctggtcgagagacaggccaacgaagtggactggtgggacatggtgtgtaacgtgaagaagctgatcaacgagaaaaaggaggatggcaaggtgttttggcagaatctggctggctacaagagacaggaagccctgagaccatacctgagcagcgaggaagatcggaagaagggaaagaaattcgctcggtaccagctgggcgacctgctgctgcacctggaaaagaagcacggcgaggactggggaaaggtgtacgacgaggcctgggagcggattgacaagaaagtggaaggcctgagcaagcacatcaagctggaagaggaacggagaagcgaggacgcccagagcaaggccgccctgaccgactggctgcgggctaaggccagcttcgtgatcgagggcctgaaggaggccgacaaggacgagttctgcagatgcgagctgaagctgcagaagtggtacggggacctgcggggaaagcccttcgccatcgaagccgagaacagcatcctggacatcagcggcttcagcaagcagtacaactgtgccttcatctggcagaaggacggcgtgaagaagctgaacctgtacctgatcatcaactacttcaagggcggcaagctgcggttcaagaagatcaaacctgaagccttcgaagccaacagattctacaccgtgatcaacaaaaagagcggcgagatcgtgcccatggaggtgaacttcaacttcgacgaccccaacctgatcatcctgcctctggcctttggcaagagacagggcagagaattcatctggaacgacctgctgtccctggaaaccggcagcctgaagctggccaacggaagagtgatcgagaagacactgtacaacagaagaacccggcaggatgagcctgccctgttcgtggccctgaccttcgagcggcgggaggtcctggactcctccaatatcaaaccaatgaacctgatcggcgtggcaagaggcgaaaacatccccgccgtgatcgccctgaccgaccccgagggctgcccactgagccggtttaaggatagcctgggaaacccaacccacatcctgagaatcggcgagagctataaggagaagcagcggaccatccaggccaagaaggaggtggagcagcggagagccggcggctacagccggaagtacgccagcaaagccaagaatctggcagacgatatggtgagaaacaccgctagagatctgctgtactacgccgtgacccaggatgccatgctgatcttcgccaacctgagccggggcttcggccggcagggcaagcggaccttcatggccgagagacagtacacacggatggaggactggctgaccgccaagctggcctacgagggcctgagcaagacctacctgtccaagacactggcccagtacacctccaagacatgcagcaactgtgggtttaccatcaccagcgccgactacgacagggtgctggagaagctgaagaagacagcaacaggctggatgaccacaattaacggcaaggagctgaaggtggagggccagattacctactacaacagatacaagagacagaacgtagtcaaggacctgtccgtcgagctggatagactgagcgaagaatctgtgaacaacgacatctcctcctggacaaagggcagaagcggagaagctctgagcctcctgaagaaaagattctcccatagacccgtgcaggagaagttcgtgtgcctgaactgcggcttcgagacacacgcagccgagcaagccgccctgaacatcgccagatcctggctgttcctgcggagccaggagtacaagaaataccagacaaacaagacaaccggcaacaccgataagagagccttcgtcgagacctggcagtccttttaccggaagaagcttaaggaggtgtggaaacctgccgtgcggtctggcggatctggcggaggctccacaagcagcctggagagcgtgaccttccaggacgtggccgtgaacttcacccaggaggagtggggccacctggagcccgcccagaaggacctgtacagggaggtgatgctggagaactaccagaacttcgtgagcctgggcctgcccttcagcaagccccacgtgatcagccagctggagaggggcgaggccccctggatcaccgagagggacgtgcccagggtgagctgccaggacttcttcatccagaccagccccaagaaaaagagaaaagtctaagctgccttctgcggggcttgccttctggccatgcccttcttctctcccttgcacctgtacctcttggtctttgaataaagcctgagtaggaaggctagcaaaaaaaaaaaaaaaaaaaaaaaaaaaaaaaaaaaaaaaaaaaaaaaaaaaaaaaaaaaaaaaaaaaaaaaaaaaaaaaa

SEQ ID NO: 3730 - RNA, 5419 nt, synthetic construct
  source 1..5419: mol_type = other RNA
aggaaataagagagaaaagaagagtaagaagaaatataagagccaccatggcccctaagaagaagcgtaaagtgagccgggtgaacggcagcggcagcggcggcggcatgaaccacgaccaggagttcgacccccctaaggtgtaccctcccgtccccgccgagaagagaaagcccatccgggtcctgagcctgttcgatggcatcgccaccggtctgctggtgctgaaggacctgggcatccaggtggataggtacattgcctccgaggtgtgcgaggactccatcaccgtgggaatggtgcgtcatcagggcaagatcatgtacgtgggcgacgtgcggagcgtgacacagaagcatatccaggagtggggccctttcgacctggtgatcggcggcagcccttgcaatgacctgagcatcgtgaacccagcccggaagggcctgtacgagggaaccggcagactgttcttcgagttttacagactgctgcacgacgcccggcctaaggaaggcgacgaccggcccttcttttggctgttcgagaatgtggtggccatgggagtcagcgacaagcgggatattagccggttcctggagagcaaccccgtgatgatcgatgccaaggaagtgagcgccgcccaccgggccagatacttctggggcaatctgcctggcatgaacagacccctggccagcaccgtgaacgacaagctggagctgcaggagtgcctggagcacggccggatcgccaagttcagcaaggtgagaaccatcaccacccgaagcaacagcatcaaacaaggcaaggaccagcactttcctgtgttcatgaacgagaaggaggacatcctgtggtgtaccgagatggagagagtgttcgggttcccagtccactacacagatgtcagcaacatgtctagactggccagacagagactgctgggaagaagctggtccgtccctgtgatcagacacctgttcgcccctctgaaggagtacttcgcctgcgtgagcagcggcaacagcaacgccaacagccggggccccagcttctctagcggcctggtgccactgtccctgagagggagccacatgggccccatggagatctacaaaaccgtgagcgcctggaagcggcagcctgtgcgcgtgctgagcctgtttcggaatatcgataaagtcctgaaaagcctgggattcctggagagcggctctggctccggcggtggcaccctgaagtacgtggaggatgtgacaaacgtggtcagacgggatgtggagaagtggggccccttcgatctggtgtacggcagcacccaacccctgggcagctcttgtgaccggtgccctggctggtacatgtttcagttccaccggatcctgcagtacgccctgccgagacaggagtcccagcggccattcttttggattttcatggacaacttgctgctgaccgaggatgaccaggaaactaccactcggttcctgcagaccgaagccgtgaccctgcaggacgtgagaggccgggactaccagaacgccatgcgggtgtggtccaacatccctggactgaaaagcaagcacgcacctctgacccctaaagaagaggagtacctgcaggcccaggtgcggagcagaagcaagctggacgcccctaaggtggatctgctggtgaagaattgcctcctgcccctgagagagtacttcaagtatttcagccagaatagtctgcccctgggcggcccaagcagcggcgcccctcctcccagcggcggcagcccagccggctccccaacctctaccgaggagggcacctctgagtccgccacccccgagagcggccctggcacctccaccgagcccagcgagggcagcgcacccggcagccctgccggcagccccacctccacagaggagggaaccagcaccgagcccagcgaaggcagcgccccaggcaccagcaccgagcctagtgagggcggctctggcggcggcagcgcccaggagattaaacggatcaacaagatcagaagaagacttgtgaaagacagcaacaccaagaaggccggcaagacaggccccatgaaaaccctgctggttagagtgatgacacccgatctgagagagcggctggaaaacctgagaaagaagcctgaaaatatcccccagcccatcagcaatacatctagagccaacctgaataagctgctgaccgattacaccgaaatgaagaaggcgatcctgcatgtgtactgggaagagttccagaaggaccctgtgggcctgatgagccgggtggcccagcctgccagcaagaagatcgatcagaacaagctgaaacctgagatggacgagaagggcaacctgaccaccgccggctttgcctgctctcagtgtggccagcccctgttcgtgtacaagctggagcaggtgtctgagaagggcaaggcttacaccaactacttcggacggtgcaatgtggccgagcacgaaaagctgatcctgctggcccagctgaagcccgagaaggatagcgacgaagccgtgacatatagcctgggaaagtttgggcagagggccctggatttctacagcattcatgtgaccaaggagtccacccaccccgtgaagcccctggcccagatcgccggaaacagatacgcctccggacctgtgggaaaggccctgagcgacgcatgtatgggcacaatcgcctccttcctgtctaagtaccaggacatcatcatcgaacaccagaaggtggtgaagggcaaccagaagagactggagagcctgcgggagctggccggcaaggaaaacctggaataccctagcgtgaccctgccacctcagcctcacaccaaggagggcgttgatgcctacaacgaagtgatcgcccgggtgcgaatgtgggtgaacctgaacctgtggcagaagctgaagctaagcagagatgatgccaagcctctgctgagactgaagggattcccttcctttcctctggtcgagagacaggccaacgaagtggactggtgggacatggtgtgtaacgtgaagaagctgatcaacgagaaaaaggaggatggcaaggtgttttggcagaatctggctggctacaagagacaggaagccctgagaccatacctgagcagcgaggaagatcggaagaagggaaagaaattcgctcggtaccagctgggcgacctgctgctgcacctggaaaagaagcacggcgaggactggggaaaggtgtacgacgaggcctgggagcggattgacaagaaagtggaaggcctgagcaagcacatcaagctggaagaggaacggagaagcgaggacgcccagagcaaggccgccctgaccgactggctgcgggctaaggccagcttcgtgatcgagggcctgaaggaggccgacaaggacgagttctgcagatgcgagctgaagctgcagaagtggtacggggacctgcggggaaagcccttcgccatcgaagccgagaacagcatcctggacatcagcggcttcagcaagcagtacaactgtgccttcatctggcagaaggacggcgtgaagaagctgaacctgtacctgatcatcaactacttcaagggcggcaagctgcggttcaagaagatcaaacctgaagccttcgaagccaacagattctacaccgtgatcaacaaaaagagcggcgagatcgtgcccatggaggtgaacttcaacttcgacgaccccaacctgatcatcctgcctctggcctttggcaagagacagggcagagaattcatctggaacgacctgctgtccctggaaaccggcagcctgaagctggccaacggaagagtgatcgagaagacactgtacaacagaagaacccggcaggatgagcctgccctgttcgtggccctgaccttcgagcggcgggaggtcctggactcctccaatatcaaaccaatgaacctgatcggcgtggcaagaggcgaaaacatccccgccgtgatcgccctgaccgaccccgagggctgcccactgagccggtttaaggatagcctgggaaacccaacccacatcctgagaatcggcgagagctataaggagaagcagcggaccatccaggccaagaaggaggtggagcagcggagagccggcggctacagccggaagtacgccagcaaagccaagaatctggcagacgatatggtgagaaacaccgctagagatctgctgtactacgccgtgacccaggatgccatgctgatcttcgccaacctgagccggggcttcggccggcagggcaagcggaccttcatggccgagagacagtacacacggatggaggactggctgaccgccaagctggcctacgagggcctgagcaagacctacctgtccaagacactggcccagtacacctccaagacatgcagcaactgtgggtttaccatcaccagcgccgactacgacagggtgctggagaagctgaagaagacagcaacaggctggatgaccacaattaacggcaaggagctgaaggtggagggccagattacctactacaacagatacaagagacagaacgtagtcaaggacctgtccgtcgagctggatagactgagcgaagaatctgtgaacaacgacatctcctcctggacaaagggcagaagcggagaagctctgagcctcctgaagaaaagattctcccatagacccgtgcaggagaagttcgtgtgcctgaactgcggcttcgagacacacgcagccgagcaagccgccctgaacatcgccagatcctggctgttcctgcggagccaggagtacaagaaataccagacaaacaagacaaccggcaacaccgataagagagccttcgtcgagacctggcagtccttttaccggaagaagcttaaggaggtgtggaaacctgccgtgcggtctggcggatctggcggaggctccacaagcaagagcaagagcaaggcccccgtgaccttcggcgacctggccatctacttcagccaggaggagtgggagtggctgagccccatccagaaggacctgtacgaggacgtgatgctggagaactaccagaacctggtgagcctgggcctgagcttcaggaggcccaacgtgatcaccctgctggagaagggcaaggccccctggatggtggagcccgtgaagaggaggaggggcctgggccccctgaccagccccaagaaaaagagaaaagtctaagctgccttctgcggggcttgccttctggccatgcccttcttctctcccttgcacctgtacctcttggtctttgaataaagcctgagtaggaaggctagcaaaaaaaaaaaaaaaaaaaaaaaaaaaaaaaaaaaaaaaaaaaaaaaaaaaaaaaaaaaaaaaaaaaaaaaaaaaaaaaa

SEQ ID NO: 3731 - RNA, 5419 nt, synthetic construct
  source 1..5419: mol_type = other RNA
aggaaataagagagaaaagaagagtaagaagaaatataagagccaccatggcccctaagaagaagcgtaaagtgagccgggtgaacggcagcggcagcggcggcggcatgaaccacgaccaggagttcgacccccctaaggtgtaccctcccgtccccgccgagaagagaaagcccatccgggtcctgagcctgttcgatggcatcgccaccggtctgctggtgctgaaggacctgggcatccaggtggataggtacattgcctccgaggtgtgcgaggactccatcaccgtgggaatggtgcgtcatcagggcaagatcatgtacgtgggcgacgtgcggagcgtgacacagaagcatatccaggagtggggccctttcgacctggtgatcggcggcagcccttgcaatgacctgagcatcgtgaacccagcccggaagggcctgtacgagggaaccggcagactgttcttcgagttttacagactgctgcacgacgcccggcctaaggaaggcgacgaccggcccttcttttggctgttcgagaatgtggtggccatgggagtcagcgacaagcgggatattagccggttcctggagagcaaccccgtgatgatcgatgccaaggaagtgagcgccgcccaccgggccagatacttctggggcaatctgcctggcatgaacagacccctggccagcaccgtgaacgacaagctggagctgcaggagtgcctggagcacggccggatcgccaagttcagcaaggtgagaaccatcaccacccgaagcaacagcatcaaacaaggcaaggaccagcactttcctgtgttcatgaacgagaaggaggacatcctgtggtgtaccgagatggagagagtgttcgggttcccagtccactacacagatgtcagcaacatgtctagactggccagacagagactgctgggaagaagctggtccgtccctgtgatcagacacctgttcgcccctctgaaggagtacttcgcctgcgtgagcagcggcaacagcaacgccaacagccggggccccagcttctctagcggcctggtgccactgtccctgagagggagccacatgggccccatggagatctacaaaaccgtgagcgcctggaagcggcagcctgtgcgcgtgctgagcctgtttcggaatatcgataaagtcctgaaaagcctgggattcctggagagcggctctggctccggcggtggcaccctgaagtacgtggaggatgtgacaaacgtggtcagacgggatgtggagaagtggggccccttcgatctggtgtacggcagcacccaacccctgggcagctcttgtgaccggtgccctggctggtacatgtttcagttccaccggatcctgcagtacgccctgccgagacaggagtcccagcggccattcttttggattttcatggacaacttgctgctgaccgaggatgaccaggaaactaccactcggttcctgcagaccgaagccgtgaccctgcaggacgtgagaggccgggactaccagaacgccatgcgggtgtggtccaacatccctggactgaaaagcaagcacgcacctctgacccctaaagaagaggagtacctgcaggcccaggtgcggagcagaagcaagctggacgcccctaaggtggatctgctggtgaagaattgcctcctgcccctgagagagtacttcaagtatttcagccagaatagtctgcccctgggcggcccaagcagcggcgcccctcctcccagcggcggcagcccagccggctccccaacctctaccgaggagggcacctctgagtccgccacccccgagagcggccctggcacctccaccgagcccagcgagggcagcgcacccggcagccctgccggcagccccacctccacagaggagggaaccagcaccgagcccagcgaaggcagcgccccaggcaccagcaccgagcctagtgagggcggctctggcggcggcagcgcccaggagattaaacggatcaacaagatcagaagaagacttgtgaaagacagcaacaccaagaaggccggcaagacaggccccatgaaaaccctgctggttagagtgatgacacccgatctgagagagcggctggaaaacctgagaaagaagcctgaaaatatcccccagcccatcagcaatacatctagagccaacctgaataagctgctgaccgattacaccgaaatgaagaaggcgatcctgcatgtgtactgggaagagttccagaaggaccctgtgggcctgatgagccgggtggcccagcctgccagcaagaagatcgatcagaacaagctgaaacctgagatggacgagaagggcaacctgaccaccgccggctttgcctgctctcagtgtggccagcccctgttcgtgtacaagctggagcaggtgtctgagaagggcaaggcttacaccaactacttcggacggtgcaatgtggccgagcacgaaaagctgatcctgctggcccagctgaagcccgagaaggatagcgacgaagccgtgacatatagcctgggaaagtttgggcagagggccctggatttctacagcattcatgtgaccaaggagtccacccaccccgtgaagcccctggcccagatcgccggaaacagatacgcctccggacctgtgggaaaggccctgagcgacgcatgtatgggcacaatcgcctccttcctgtctaagtaccaggacatcatcatcgaacaccagaaggtggtgaagggcaaccagaagagactggagagcctgcgggagctggccggcaaggaaaacctggaataccctagcgtgaccctgccacctcagcctcacaccaaggagggcgttgatgcctacaacgaagtgatcgcccgggtgcgaatgtgggtgaacctgaacctgtggcagaagctgaagctaagcagagatgatgccaagcctctgctgagactgaagggattcccttcctttcctctggtcgagagacaggccaacgaagtggactggtgggacatggtgtgtaacgtgaagaagctgatcaacgagaaaaaggaggatggcaaggtgttttggcagaatctggctggctacaagagacaggaagccctgagaccatacctgagcagcgaggaagatcggaagaagggaaagaaattcgctcggtaccagctgggcgacctgctgctgcacctggaaaagaagcacggcgaggactggggaaaggtgtacgacgaggcctgggagcggattgacaagaaagtggaaggcctgagcaagcacatcaagctggaagaggaacggagaagcgaggacgcccagagcaaggccgccctgaccgactggctgcgggctaaggccagcttcgtgatcgagggcctgaaggaggccgacaaggacgagttctgcagatgcgagctgaagctgcagaagtggtacggggacctgcggggaaagcccttcgccatcgaagccgagaacagcatcctggacatcagcggcttcagcaagcagtacaactgtgccttcatctggcagaaggacggcgtgaagaagctgaacctgtacctgatcatcaactacttcaagggcggcaagctgcggttcaagaagatcaaacctgaagccttcgaagccaacagattctacaccgtgatcaacaaaaagagcggcgagatcgtgcccatggaggtgaacttcaacttcgacgaccccaacctgatcatcctgcctctggcctttggcaagagacagggcagagaattcatctggaacgacctgctgtccctggaaaccggcagcctgaagctggccaacggaagagtgatcgagaagacactgtacaacagaagaacccggcaggatgagcctgccctgttcgtggccctgaccttcgagcggcgggaggtcctggactcctccaatatcaaaccaatgaacctgatcggcgtggcaagaggcgaaaacatccccgccgtgatcgccctgaccgaccccgagggctgcccactgagccggtttaaggatagcctgggaaacccaacccacatcctgagaatcggcgagagctataaggagaagcagcggaccatccaggccaagaaggaggtggagcagcggagagccggcggctacagccggaagtacgccagcaaagccaagaatctggcagacgatatggtgagaaacaccgctagagatctgctgtactacgccgtgacccaggatgccatgctgatcttcgccaacctgagccggggcttcggccggcagggcaagcggaccttcatggccgagagacagtacacacggatggaggactggctgaccgccaagctggcctacgagggcctgagcaagacctacctgtccaagacactggcccagtacacctccaagacatgcagcaactgtgggtttaccatcaccagcgccgactacgacagggtgctggagaagctgaagaagacagcaacaggctggatgaccacaattaacggcaaggagctgaaggtggagggccagattacctactacaacagatacaagagacagaacgtagtcaaggacctgtccgtcgagctggatagactgagcgaagaatctgtgaacaacgacatctcctcctggacaaagggcagaagcggagaagctctgagcctcctgaagaaaagattctcccatagacccgtgcaggagaagttcgtgtgcctgaactgcggcttcgagacacacgcagccgagcaagccgccctgaacatcgccagatcctggctgttcctgcggagccaggagtacaagaaataccagacaaacaagacaaccggcaacaccgataagagagccttcgtcgagacctggcagtccttttaccggaagaagcttaaggaggtgtggaaacctgccgtgcggtctggcggatctggcggaggctccacaagcaagcccggcgccgtgagcttcgccgacgtggccgtgtacttcagccccgaggagtggggctgcctgaggcccgcccagagggccctgtacagggacgtgatgagggagacctacggccacctgggcgccctgggcttcaggggcaccaagcccgccctgatcagctgggtggaggaggaggccgacctgtggggccccgacgccagggaccccgaggtgggcgagtgcctgaccgccgccgacaccagccccaagaaaaagagaaaagtctaagctgccttctgcggggcttgccttctggccatgcccttcttctctcccttgcacctgtacctcttggtctttgaataaagcctgagtaggaaggctagcaaaaaaaaaaaaaaaaaaaaaaaaaaaaaaaaaaaaaaaaaaaaaaaaaaaaaaaaaaaaaaaaaaaaaaaaaaaaaaaa

SEQ ID NO: 3732 - RNA, 5419 nt, synthetic construct
  source 1..5419: mol_type = other RNA
aggaaataagagagaaaagaagagtaagaagaaatataagagccaccatggcccctaagaagaagcgtaaagtgagccgggtgaacggcagcggcagcggcggcggcatgaaccacgaccaggagttcgacccccctaaggtgtaccctcccgtccccgccgagaagagaaagcccatccgggtcctgagcctgttcgatggcatcgccaccggtctgctggtgctgaaggacctgggcatccaggtggataggtacattgcctccgaggtgtgcgaggactccatcaccgtgggaatggtgcgtcatcagggcaagatcatgtacgtgggcgacgtgcggagcgtgacacagaagcatatccaggagtggggccctttcgacctggtgatcggcggcagcccttgcaatgacctgagcatcgtgaacccagcccggaagggcctgtacgagggaaccggcagactgttcttcgagttttacagactgctgcacgacgcccggcctaaggaaggcgacgaccggcccttcttttggctgttcgagaatgtggtggccatgggagtcagcgacaagcgggatattagccggttcctggagagcaaccccgtgatgatcgatgccaaggaagtgagcgccgcccaccgggccagatacttctggggcaatctgcctggcatgaacagacccctggccagcaccgtgaacgacaagctggagctgcaggagtgcctggagcacggccggatcgccaagttcagcaaggtgagaaccatcaccacccgaagcaacagcatcaaacaaggcaaggaccagcactttcctgtgttcatgaacgagaaggaggacatcctgtggtgtaccgagatggagagagtgttcgggttcccagtccactacacagatgtcagcaacatgtctagactggccagacagagactgctgggaagaagctggtccgtccctgtgatcagacacctgttcgcccctctgaaggagtacttcgcctgcgtgagcagcggcaacagcaacgccaacagccggggccccagcttctctagcggcctggtgccactgtccctgagagggagccacatgggccccatggagatctacaaaaccgtgagcgcctggaagcggcagcctgtgcgcgtgctgagcctgtttcggaatatcgataaagtcctgaaaagcctgggattcctggagagcggctctggctccggcggtggcaccctgaagtacgtggaggatgtgacaaacgtggtcagacgggatgtggagaagtggggccccttcgatctggtgtacggcagcacccaacccctgggcagctcttgtgaccggtgccctggctggtacatgtttcagttccaccggatcctgcagtacgccctgccgagacaggagtcccagcggccattcttttggattttcatggacaacttgctgctgaccgaggatgaccaggaaactaccactcggttcctgcagaccgaagccgtgaccctgcaggacgtgagaggccgggactaccagaacgccatgcgggtgtggtccaacatccctggactgaaaagcaagcacgcacctctgacccctaaagaagaggagtacctgcaggcccaggtgcggagcagaagcaagctggacgcccctaaggtggatctgctggtgaagaattgcctcctgcccctgagagagtacttcaagtatttcagccagaatagtctgcccctgggcggcccaagcagcggcgcccctcctcccagcggcggcagcccagccggctccccaacctctaccgaggagggcacctctgagtccgccacccccgagagcggccctggcacctccaccgagcccagcgagggcagcgcacccggcagccctgccggcagccccacctccacagaggagggaaccagcaccgagcccagcgaaggcagcgccccaggcaccagcaccgagcctagtgagggcggctctggcggcggcagcgcccaggagattaaacggatcaacaagatcagaagaagacttgtgaaagacagcaacaccaagaaggccggcaagacaggccccatgaaaaccctgctggttagagtgatgacacccgatctgagagagcggctggaaaacctgagaaagaagcctgaaaatatcccccagcccatcagcaatacatctagagccaacctgaataagctgctgaccgattacaccgaaatgaagaaggcgatcctgcatgtgtactgggaagagttccagaaggaccctgtgggcctgatgagccgggtggcccagcctgccagcaagaagatcgatcagaacaagctgaaacctgagatggacgagaagggcaacctgaccaccgccggctttgcctgctctcagtgtggccagcccctgttcgtgtacaagctggagcaggtgtctgagaagggcaaggcttacaccaactacttcggacggtgcaatgtggccgagcacgaaaagctgatcctgctggcccagctgaagcccgagaaggatagcgacgaagccgtgacatatagcctgggaaagtttgggcagagggccctggatttctacagcattcatgtgaccaaggagtccacccaccccgtgaagcccctggcccagatcgccggaaacagatacgcctccggacctgtgggaaaggccctgagcgacgcatgtatgggcacaatcgcctccttcctgtctaagtaccaggacatcatcatcgaacaccagaaggtggtgaagggcaaccagaagagactggagagcctgcgggagctggccggcaaggaaaacctggaataccctagcgtgaccctgccacctcagcctcacaccaaggagggcgttgatgcctacaacgaagtgatcgcccgggtgcgaatgtgggtgaacctgaacctgtggcagaagctgaagctaagcagagatgatgccaagcctctgctgagactgaagggattcccttcctttcctctggtcgagagacaggccaacgaagtggactggtgggacatggtgtgtaacgtgaagaagctgatcaacgagaaaaaggaggatggcaaggtgttttggcagaatctggctggctacaagagacaggaagccctgagaccatacctgagcagcgaggaagatcggaagaagggaaagaaattcgctcggtaccagctgggcgacctgctgctgcacctggaaaagaagcacggcgaggactggggaaaggtgtacgacgaggcctgggagcggattgacaagaaagtggaaggcctgagcaagcacatcaagctggaagaggaacggagaagcgaggacgcccagagcaaggccgccctgaccgactggctgcgggctaaggccagcttcgtgatcgagggcctgaaggaggccgacaaggacgagttctgcagatgcgagctgaagctgcagaagtggtacggggacctgcggggaaagcccttcgccatcgaagccgagaacagcatcctggacatcagcggcttcagcaagcagtacaactgtgccttcatctggcagaaggacggcgtgaagaagctgaacctgtacctgatcatcaactacttcaagggcggcaagctgcggttcaagaagatcaaacctgaagccttcgaagccaacagattctacaccgtgatcaacaaaaagagcggcgagatcgtgcccatggaggtgaacttcaacttcgacgaccccaacctgatcatcctgcctctggcctttggcaagagacagggcagagaattcatctggaacgacctgctgtccctggaaaccggcagcctgaagctggccaacggaagagtgatcgagaagacactgtacaacagaagaacccggcaggatgagcctgccctgttcgtggccctgaccttcgagcggcgggaggtcctggactcctccaatatcaaaccaatgaacctgatcggcgtggcaagaggcgaaaacatccccgccgtgatcgccctgaccgaccccgagggctgcccactgagccggtttaaggatagcctgggaaacccaacccacatcctgagaatcggcgagagctataaggagaagcagcggaccatccaggccaagaaggaggtggagcagcggagagccggcggctacagccggaagtacgccagcaaagccaagaatctggcagacgatatggtgagaaacaccgctagagatctgctgtactacgccgtgacccaggatgccatgctgatcttcgccaacctgagccggggcttcggccggcagggcaagcggaccttcatggccgagagacagtacacacggatggaggactggctgaccgccaagctggcctacgagggcctgagcaagacctacctgtccaagacactggcccagtacacctccaagacatgcagcaactgtgggtttaccatcaccagcgccgactacgacagggtgctggagaagctgaagaagacagcaacaggctggatgaccacaattaacggcaaggagctgaaggtggagggccagattacctactacaacagatacaagagacagaacgtagtcaaggacctgtccgtcgagctggatagactgagcgaagaatctgtgaacaacgacatctcctcctggacaaagggcagaagcggagaagctctgagcctcctgaagaaaagattctcccatagacccgtgcaggagaagttcgtgtgcctgaactgcggcttcgagacacacgcagccgagcaagccgccctgaacatcgccagatcctggctgttcctgcggagccaggagtacaagaaataccagacaaacaagacaaccggcaacaccgataagagagccttcgtcgagacctggcagtccttttaccggaagaagcttaaggaggtgtggaaacctgccgtgcggtctggcggatctggcggaggctccacaagctgccaggagcccgtgagcttcgcccaggtggccgtgtacttcagcagggaggagtgggccctgctggaccccgcccagagggccctgtacagggacgtgatgctggagacctaccagtgcgtggccagcctggcccccctgcccgcccccaagcccatgctgatcagcctgctggagggcggcgaggacccctgggtgcccgacgtgtgcagccccgaggccgtgcccggcgacctgagccccaccagccccaagaaaaagagaaaagtctaagctgccttctgcggggcttgccttctggccatgcccttcttctctcccttgcacctgtacctcttggtctttgaataaagcctgagtaggaaggctagcaaaaaaaaaaaaaaaaaaaaaaaaaaaaaaaaaaaaaaaaaaaaaaaaaaaaaaaaaaaaaaaaaaaaaaaaaaaaaaaa

SEQ ID NO: 3733 - RNA, 5419 nt, synthetic construct
  source 1..5419: mol_type = other RNA
aggaaataagagagaaaagaagagtaagaagaaatataagagccaccatggcccctaagaagaagcgtaaagtgagccgggtgaacggcagcggcagcggcggcggcatgaaccacgaccaggagttcgacccccctaaggtgtaccctcccgtccccgccgagaagagaaagcccatccgggtcctgagcctgttcgatggcatcgccaccggtctgctggtgctgaaggacctgggcatccaggtggataggtacattgcctccgaggtgtgcgaggactccatcaccgtgggaatggtgcgtcatcagggcaagatcatgtacgtgggcgacgtgcggagcgtgacacagaagcatatccaggagtggggccctttcgacctggtgatcggcggcagcccttgcaatgacctgagcatcgtgaacccagcccggaagggcctgtacgagggaaccggcagactgttcttcgagttttacagactgctgcacgacgcccggcctaaggaaggcgacgaccggcccttcttttggctgttcgagaatgtggtggccatgggagtcagcgacaagcgggatattagccggttcctggagagcaaccccgtgatgatcgatgccaaggaagtgagcgccgcccaccgggccagatacttctggggcaatctgcctggcatgaacagacccctggccagcaccgtgaacgacaagctggagctgcaggagtgcctggagcacggccggatcgccaagttcagcaaggtgagaaccatcaccacccgaagcaacagcatcaaacaaggcaaggaccagcactttcctgtgttcatgaacgagaaggaggacatcctgtggtgtaccgagatggagagagtgttcgggttcccagtccactacacagatgtcagcaacatgtctagactggccagacagagactgctgggaagaagctggtccgtccctgtgatcagacacctgttcgcccctctgaaggagtacttcgcctgcgtgagcagcggcaacagcaacgccaacagccggggccccagcttctctagcggcctggtgccactgtccctgagagggagccacatgggccccatggagatctacaaaaccgtgagcgcctggaagcggcagcctgtgcgcgtgctgagcctgtttcggaatatcgataaagtcctgaaaagcctgggattcctggagagcggctctggctccggcggtggcaccctgaagtacgtggaggatgtgacaaacgtggtcagacgggatgtggagaagtggggccccttcgatctggtgtacggcagcacccaacccctgggcagctcttgtgaccggtgccctggctggtacatgtttcagttccaccggatcctgcagtacgccctgccgagacaggagtcccagcggccattcttttggattttcatggacaacttgctgctgaccgaggatgaccaggaaactaccactcggttcctgcagaccgaagccgtgaccctgcaggacgtgagaggccgggactaccagaacgccatgcgggtgtggtccaacatccctggactgaaaagcaagcacgcacctctgacccctaaagaagaggagtacctgcaggcccaggtgcggagcagaagcaagctggacgcccctaaggtggatctgctggtgaagaattgcctcctgcccctgagagagtacttcaagtatttcagccagaatagtctgcccctgggcggcccaagcagcggcgcccctcctcccagcggcggcagcccagccggctccccaacctctaccgaggagggcacctctgagtccgccacccccgagagcggccctggcacctccaccgagcccagcgagggcagcgcacccggcagccctgccggcagccccacctccacagaggagggaaccagcaccgagcccagcgaaggcagcgccccaggcaccagcaccgagcctagtgagggcggctctggcggcggcagcgcccaggagattaaacggatcaacaagatcagaagaagacttgtgaaagacagcaacaccaagaaggccggcaagacaggccccatgaaaaccctgctggttagagtgatgacacccgatctgagagagcggctggaaaacctgagaaagaagcctgaaaatatcccccagcccatcagcaatacatctagagccaacctgaataagctgctgaccgattacaccgaaatgaagaaggcgatcctgcatgtgtactgggaagagttccagaaggaccctgtgggcctgatgagccgggtggcccagcctgccagcaagaagatcgatcagaacaagctgaaacctgagatggacgagaagggcaacctgaccaccgccggctttgcctgctctcagtgtggccagcccctgttcgtgtacaagctggagcaggtgtctgagaagggcaaggcttacaccaactacttcggacggtgcaatgtggccgagcacgaaaagctgatcctgctggcccagctgaagcccgagaaggatagcgacgaagccgtgacatatagcctgggaaagtttgggcagagggccctggatttctacagcattcatgtgaccaaggagtccacccaccccgtgaagcccctggcccagatcgccggaaacagatacgcctccggacctgtgggaaaggccctgagcgacgcatgtatgggcacaatcgcctccttcctgtctaagtaccaggacatcatcatcgaacaccagaaggtggtgaagggcaaccagaagagactggagagcctgcgggagctggccggcaaggaaaacctggaataccctagcgtgaccctgccacctcagcctcacaccaaggagggcgttgatgcctacaacgaagtgatcgcccgggtgcgaatgtgggtgaacctgaacctgtggcagaagctgaagctaagcagagatgatgccaagcctctgctgagactgaagggattcccttcctttcctctggtcgagagacaggccaacgaagtggactggtgggacatggtgtgtaacgtgaagaagctgatcaacgagaaaaaggaggatggcaaggtgttttggcagaatctggctggctacaagagacaggaagccctgagaccatacctgagcagcgaggaagatcggaagaagggaaagaaattcgctcggtaccagctgggcgacctgctgctgcacctggaaaagaagcacggcgaggactggggaaaggtgtacgacgaggcctgggagcggattgacaagaaagtggaaggcctgagcaagcacatcaagctggaagaggaacggagaagcgaggacgcccagagcaaggccgccctgaccgactggctgcgggctaaggccagcttcgtgatcgagggcctgaaggaggccgacaaggacgagttctgcagatgcgagctgaagctgcagaagtggtacggggacctgcggggaaagcccttcgccatcgaagccgagaacagcatcctggacatcagcggcttcagcaagcagtacaactgtgccttcatctggcagaaggacggcgtgaagaagctgaacctgtacctgatcatcaactacttcaagggcggcaagctgcggttcaagaagatcaaacctgaagccttcgaagccaacagattctacaccgtgatcaacaaaaagagcggcgagatcgtgcccatggaggtgaacttcaacttcgacgaccccaacctgatcatcctgcctctggcctttggcaagagacagggcagagaattcatctggaacgacctgctgtccctggaaaccggcagcctgaagctggccaacggaagagtgatcgagaagacactgtacaacagaagaacccggcaggatgagcctgccctgttcgtggccctgaccttcgagcggcgggaggtcctggactcctccaatatcaaaccaatgaacctgatcggcgtggcaagaggcgaaaacatccccgccgtgatcgccctgaccgaccccgagggctgcccactgagccggtttaaggatagcctgggaaacccaacccacatcctgagaatcggcgagagctataaggagaagcagcggaccatccaggccaagaaggaggtggagcagcggagagccggcggctacagccggaagtacgccagcaaagccaagaatctggcagacgatatggtgagaaacaccgctagagatctgctgtactacgccgtgacccaggatgccatgctgatcttcgccaacctgagccggggcttcggccggcagggcaagcggaccttcatggccgagagacagtacacacggatggaggactggctgaccgccaagctggcctacgagggcctgagcaagacctacctgtccaagacactggcccagtacacctccaagacatgcagcaactgtgggtttaccatcaccagcgccgactacgacagggtgctggagaagctgaagaagacagcaacaggctggatgaccacaattaacggcaaggagctgaaggtggagggccagattacctactacaacagatacaagagacagaacgtagtcaaggacctgtccgtcgagctggatagactgagcgaagaatctgtgaacaacgacatctcctcctggacaaagggcagaagcggagaagctctgagcctcctgaagaaaagattctcccatagacccgtgcaggagaagttcgtgtgcctgaactgcggcttcgagacacacgcagccgagcaagccgccctgaacatcgccagatcctggctgttcctgcggagccaggagtacaagaaataccagacaaacaagacaaccggcaacaccgataagagagccttcgtcgagacctggcagtccttttaccggaagaagcttaaggaggtgtggaaacctgccgtgcggtctggcggatctggcggaggctccacaagcatggagcccgtgaccttcgaggacgtggccgtgtacttcacccagaaccagtgggccagcctggaccccgtgcagagggccctgtacagggaggtgatgctggagaactacgccaacgtggccagcctggccttccccttccccaagcccgtgctgatcagccagctggagcagggcgaggccccctggggccccgaccccggcgaggccgaggtgctgaagggcatctggcccggcggcgagaccagccccaagaaaaagagaaaagtctaagctgccttctgcggggcttgccttctggccatgcccttcttctctcccttgcacctgtacctcttggtctttgaataaagcctgagtaggaaggctagcaaaaaaaaaaaaaaaaaaaaaaaaaaaaaaaaaaaaaaaaaaaaaaaaaaaaaaaaaaaaaaaaaaaaaaaaaaaaaaaa

SEQ ID NO: 3734 - RNA, 5419 nt, synthetic construct
  source 1..5419: mol_type = other RNA
aggaaataagagagaaaagaagagtaagaagaaatataagagccaccatggcccctaagaagaagcgtaaagtgagccgggtgaacggcagcggcagcggcggcggcatgaaccacgaccaggagttcgacccccctaaggtgtaccctcccgtccccgccgagaagagaaagcccatccgggtcctgagcctgttcgatggcatcgccaccggtctgctggtgctgaaggacctgggcatccaggtggataggtacattgcctccgaggtgtgcgaggactccatcaccgtgggaatggtgcgtcatcagggcaagatcatgtacgtgggcgacgtgcggagcgtgacacagaagcatatccaggagtggggccctttcgacctggtgatcggcggcagcccttgcaatgacctgagcatcgtgaacccagcccggaagggcctgtacgagggaaccggcagactgttcttcgagttttacagactgctgcacgacgcccggcctaaggaaggcgacgaccggcccttcttttggctgttcgagaatgtggtggccatgggagtcagcgacaagcgggatattagccggttcctggagagcaaccccgtgatgatcgatgccaaggaagtgagcgccgcccaccgggccagatacttctggggcaatctgcctggcatgaacagacccctggccagcaccgtgaacgacaagctggagctgcaggagtgcctggagcacggccggatcgccaagttcagcaaggtgagaaccatcaccacccgaagcaacagcatcaaacaaggcaaggaccagcactttcctgtgttcatgaacgagaaggaggacatcctgtggtgtaccgagatggagagagtgttcgggttcccagtccactacacagatgtcagcaacatgtctagactggccagacagagactgctgggaagaagctggtccgtccctgtgatcagacacctgttcgcccctctgaaggagtacttcgcctgcgtgagcagcggcaacagcaacgccaacagccggggccccagcttctctagcggcctggtgccactgtccctgagagggagccacatgggccccatggagatctacaaaaccgtgagcgcctggaagcggcagcctgtgcgcgtgctgagcctgtttcggaatatcgataaagtcctgaaaagcctgggattcctggagagcggctctggctccggcggtggcaccctgaagtacgtggaggatgtgacaaacgtggtcagacgggatgtggagaagtggggccccttcgatctggtgtacggcagcacccaacccctgggcagctcttgtgaccggtgccctggctggtacatgtttcagttccaccggatcctgcagtacgccctgccgagacaggagtcccagcggccattcttttggattttcatggacaacttgctgctgaccgaggatgaccaggaaactaccactcggttcctgcagaccgaagccgtgaccctgcaggacgtgagaggccgggactaccagaacgccatgcgggtgtggtccaacatccctggactgaaaagcaagcacgcacctctgacccctaaagaagaggagtacctgcaggcccaggtgcggagcagaagcaagctggacgcccctaaggtggatctgctggtgaagaattgcctcctgcccctgagagagtacttcaagtatttcagccagaatagtctgcccctgggcggcccaagcagcggcgcccctcctcccagcggcggcagcccagccggctccccaacctctaccgaggagggcacctctgagtccgccacccccgagagcggccctggcacctccaccgagcccagcgagggcagcgcacccggcagccctgccggcagccccacctccacagaggagggaaccagcaccgagcccagcgaaggcagcgccccaggcaccagcaccgagcctagtgagggcggctctggcggcggcagcgcccaggagattaaacggatcaacaagatcagaagaagacttgtgaaagacagcaacaccaagaaggccggcaagacaggccccatgaaaaccctgctggttagagtgatgacacccgatctgagagagcggctggaaaacctgagaaagaagcctgaaaatatcccccagcccatcagcaatacatctagagccaacctgaataagctgctgaccgattacaccgaaatgaagaaggcgatcctgcatgtgtactgggaagagttccagaaggaccctgtgggcctgatgagccgggtggcccagcctgccagcaagaagatcgatcagaacaagctgaaacctgagatggacgagaagggcaacctgaccaccgccggctttgcctgctctcagtgtggccagcccctgttcgtgtacaagctggagcaggtgtctgagaagggcaaggcttacaccaactacttcggacggtgcaatgtggccgagcacgaaaagctgatcctgctggcccagctgaagcccgagaaggatagcgacgaagccgtgacatatagcctgggaaagtttgggcagagggccctggatttctacagcattcatgtgaccaaggagtccacccaccccgtgaagcccctggcccagatcgccggaaacagatacgcctccggacctgtgggaaaggccctgagcgacgcatgtatgggcacaatcgcctccttcctgtctaagtaccaggacatcatcatcgaacaccagaaggtggtgaagggcaaccagaagagactggagagcctgcgggagctggccggcaaggaaaacctggaataccctagcgtgaccctgccacctcagcctcacaccaaggagggcgttgatgcctacaacgaagtgatcgcccgggtgcgaatgtgggtgaacctgaacctgtggcagaagctgaagctaagcagagatgatgccaagcctctgctgagactgaagggattcccttcctttcctctggtcgagagacaggccaacgaagtggactggtgggacatggtgtgtaacgtgaagaagctgatcaacgagaaaaaggaggatggcaaggtgttttggcagaatctggctggctacaagagacaggaagccctgagaccatacctgagcagcgaggaagatcggaagaagggaaagaaattcgctcggtaccagctgggcgacctgctgctgcacctggaaaagaagcacggcgaggactggggaaaggtgtacgacgaggcctgggagcggattgacaagaaagtggaaggcctgagcaagcacatcaagctggaagaggaacggagaagcgaggacgcccagagcaaggccgccctgaccgactggctgcgggctaaggccagcttcgtgatcgagggcctgaaggaggccgacaaggacgagttctgcagatgcgagctgaagctgcagaagtggtacggggacctgcggggaaagcccttcgccatcgaagccgagaacagcatcctggacatcagcggcttcagcaagcagtacaactgtgccttcatctggcagaaggacggcgtgaagaagctgaacctgtacctgatcatcaactacttcaagggcggcaagctgcggttcaagaagatcaaacctgaagccttcgaagccaacagattctacaccgtgatcaacaaaaagagcggcgagatcgtgcccatggaggtgaacttcaacttcgacgaccccaacctgatcatcctgcctctggcctttggcaagagacagggcagagaattcatctggaacgacctgctgtccctggaaaccggcagcctgaagctggccaacggaagagtgatcgagaagacactgtacaacagaagaacccggcaggatgagcctgccctgttcgtggccctgaccttcgagcggcgggaggtcctggactcctccaatatcaaaccaatgaacctgatcggcgtggcaagaggcgaaaacatccccgccgtgatcgccctgaccgaccccgagggctgcccactgagccggtttaaggatagcctgggaaacccaacccacatcctgagaatcggcgagagctataaggagaagcagcggaccatccaggccaagaaggaggtggagcagcggagagccggcggctacagccggaagtacgccagcaaagccaagaatctggcagacgatatggtgagaaacaccgctagagatctgctgtactacgccgtgacccaggatgccatgctgatcttcgccaacctgagccggggcttcggccggcagggcaagcggaccttcatggccgagagacagtacacacggatggaggactggctgaccgccaagctggcctacgagggcctgagcaagacctacctgtccaagacactggcccagtacacctccaagacatgcagcaactgtgggtttaccatcaccagcgccgactacgacagggtgctggagaagctgaagaagacagcaacaggctggatgaccacaattaacggcaaggagctgaaggtggagggccagattacctactacaacagatacaagagacagaacgtagtcaaggacctgtccgtcgagctggatagactgagcgaagaatctgtgaacaacgacatctcctcctggacaaagggcagaagcggagaagctctgagcctcctgaagaaaagattctcccatagacccgtgcaggagaagttcgtgtgcctgaactgcggcttcgagacacacgcagccgagcaagccgccctgaacatcgccagatcctggctgttcctgcggagccaggagtacaagaaataccagacaaacaagacaaccggcaacaccgataagagagccttcgtcgagacctggcagtccttttaccggaagaagcttaaggaggtgtggaaacctgccgtgcggtctggcggatctggcggaggctccacaagcgtgagcgagcccgtgaccttcgaggaggtggccctgtacttcagcgaggaggagtgggccctgctggacgccggccagagggccctgtacagggacgtgatgaaggagaactacgaggccgtgaggtggctggacaacggcaggctgaacgagaaccacgacaagagcctgcagaacgagggccccgagcagatggccccctgcggcatgatgctgggcatcagcgagggccacgtgagccagaccagccccaagaaaaagagaaaagtctaagctgccttctgcggggcttgccttctggccatgcccttcttctctcccttgcacctgtacctcttggtctttgaataaagcctgagtaggaaggctagcaaaaaaaaaaaaaaaaaaaaaaaaaaaaaaaaaaaaaaaaaaaaaaaaaaaaaaaaaaaaaaaaaaaaaaaaaaaaaaaa

SEQ ID NO: 3735 - RNA, 5419 nt, synthetic construct
  source 1..5419: mol_type = other RNA
aggaaataagagagaaaagaagagtaagaagaaatataagagccaccatggcccctaagaagaagcgtaaagtgagccgggtgaacggcagcggcagcggcggcggcatgaaccacgaccaggagttcgacccccctaaggtgtaccctcccgtccccgccgagaagagaaagcccatccgggtcctgagcctgttcgatggcatcgccaccggtctgctggtgctgaaggacctgggcatccaggtggataggtacattgcctccgaggtgtgcgaggactccatcaccgtgggaatggtgcgtcatcagggcaagatcatgtacgtgggcgacgtgcggagcgtgacacagaagcatatccaggagtggggccctttcgacctggtgatcggcggcagcccttgcaatgacctgagcatcgtgaacccagcccggaagggcctgtacgagggaaccggcagactgttcttcgagttttacagactgctgcacgacgcccggcctaaggaaggcgacgaccggcccttcttttggctgttcgagaatgtggtggccatgggagtcagcgacaagcgggatattagccggttcctggagagcaaccccgtgatgatcgatgccaaggaagtgagcgccgcccaccgggccagatacttctggggcaatctgcctggcatgaacagacccctggccagcaccgtgaacgacaagctggagctgcaggagtgcctggagcacggccggatcgccaagttcagcaaggtgagaaccatcaccacccgaagcaacagcatcaaacaaggcaaggaccagcactttcctgtgttcatgaacgagaaggaggacatcctgtggtgtaccgagatggagagagtgttcgggttcccagtccactacacagatgtcagcaacatgtctagactggccagacagagactgctgggaagaagctggtccgtccctgtgatcagacacctgttcgcccctctgaaggagtacttcgcctgcgtgagcagcggcaacagcaacgccaacagccggggccccagcttctctagcggcctggtgccactgtccctgagagggagccacatgggccccatggagatctacaaaaccgtgagcgcctggaagcggcagcctgtgcgcgtgctgagcctgtttcggaatatcgataaagtcctgaaaagcctgggattcctggagagcggctctggctccggcggtggcaccctgaagtacgtggaggatgtgacaaacgtggtcagacgggatgtggagaagtggggccccttcgatctggtgtacggcagcacccaacccctgggcagctcttgtgaccggtgccctggctggtacatgtttcagttccaccggatcctgcagtacgccctgccgagacaggagtcccagcggccattcttttggattttcatggacaacttgctgctgaccgaggatgaccaggaaactaccactcggttcctgcagaccgaagccgtgaccctgcaggacgtgagaggccgggactaccagaacgccatgcgggtgtggtccaacatccctggactgaaaagcaagcacgcacctctgacccctaaagaagaggagtacctgcaggcccaggtgcggagcagaagcaagctggacgcccctaaggtggatctgctggtgaagaattgcctcctgcccctgagagagtacttcaagtatttcagccagaatagtctgcccctgggcggcccaagcagcggcgcccctcctcccagcggcggcagcccagccggctccccaacctctaccgaggagggcacctctgagtccgccacccccgagagcggccctggcacctccaccgagcccagcgagggcagcgcacccggcagccctgccggcagccccacctccacagaggagggaaccagcaccgagcccagcgaaggcagcgccccaggcaccagcaccgagcctagtgagggcggctctggcggcggcagcgcccaggagattaaacggatcaacaagatcagaagaagacttgtgaaagacagcaacaccaagaaggccggcaagacaggccccatgaaaaccctgctggttagagtgatgacacccgatctgagagagcggctggaaaacctgagaaagaagcctgaaaatatcccccagcccatcagcaatacatctagagccaacctgaataagctgctgaccgattacaccgaaatgaagaaggcgatcctgcatgtgtactgggaagagttccagaaggaccctgtgggcctgatgagccgggtggcccagcctgccagcaagaagatcgatcagaacaagctgaaacctgagatggacgagaagggcaacctgaccaccgccggctttgcctgctctcagtgtggccagcccctgttcgtgtacaagctggagcaggtgtctgagaagggcaaggcttacaccaactacttcggacggtgcaatgtggccgagcacgaaaagctgatcctgctggcccagctgaagcccgagaaggatagcgacgaagccgtgacatatagcctgggaaagtttgggcagagggccctggatttctacagcattcatgtgaccaaggagtccacccaccccgtgaagcccctggcccagatcgccggaaacagatacgcctccggacctgtgggaaaggccctgagcgacgcatgtatgggcacaatcgcctccttcctgtctaagtaccaggacatcatcatcgaacaccagaaggtggtgaagggcaaccagaagagactggagagcctgcgggagctggccggcaaggaaaacctggaataccctagcgtgaccctgccacctcagcctcacaccaaggagggcgttgatgcctacaacgaagtgatcgcccgggtgcgaatgtgggtgaacctgaacctgtggcagaagctgaagctaagcagagatgatgccaagcctctgctgagactgaagggattcccttcctttcctctggtcgagagacaggccaacgaagtggactggtgggacatggtgtgtaacgtgaagaagctgatcaacgagaaaaaggaggatggcaaggtgttttggcagaatctggctggctacaagagacaggaagccctgagaccatacctgagcagcgaggaagatcggaagaagggaaagaaattcgctcggtaccagctgggcgacctgctgctgcacctggaaaagaagcacggcgaggactggggaaaggtgtacgacgaggcctgggagcggattgacaagaaagtggaaggcctgagcaagcacatcaagctggaagaggaacggagaagcgaggacgcccagagcaaggccgccctgaccgactggctgcgggctaaggccagcttcgtgatcgagggcctgaaggaggccgacaaggacgagttctgcagatgcgagctgaagctgcagaagtggtacggggacctgcggggaaagcccttcgccatcgaagccgagaacagcatcctggacatcagcggcttcagcaagcagtacaactgtgccttcatctggcagaaggacggcgtgaagaagctgaacctgtacctgatcatcaactacttcaagggcggcaagctgcggttcaagaagatcaaacctgaagccttcgaagccaacagattctacaccgtgatcaacaaaaagagcggcgagatcgtgcccatggaggtgaacttcaacttcgacgaccccaacctgatcatcctgcctctggcctttggcaagagacagggcagagaattcatctggaacgacctgctgtccctggaaaccggcagcctgaagctggccaacggaagagtgatcgagaagacactgtacaacagaagaacccggcaggatgagcctgccctgttcgtggccctgaccttcgagcggcgggaggtcctggactcctccaatatcaaaccaatgaacctgatcggcgtggcaagaggcgaaaacatccccgccgtgatcgccctgaccgaccccgagggctgcccactgagccggtttaaggatagcctgggaaacccaacccacatcctgagaatcggcgagagctataaggagaagcagcggaccatccaggccaagaaggaggtggagcagcggagagccggcggctacagccggaagtacgccagcaaagccaagaatctggcagacgatatggtgagaaacaccgctagagatctgctgtactacgccgtgacccaggatgccatgctgatcttcgccaacctgagccggggcttcggccggcagggcaagcggaccttcatggccgagagacagtacacacggatggaggactggctgaccgccaagctggcctacgagggcctgagcaagacctacctgtccaagacactggcccagtacacctccaagacatgcagcaactgtgggtttaccatcaccagcgccgactacgacagggtgctggagaagctgaagaagacagcaacaggctggatgaccacaattaacggcaaggagctgaaggtggagggccagattacctactacaacagatacaagagacagaacgtagtcaaggacctgtccgtcgagctggatagactgagcgaagaatctgtgaacaacgacatctcctcctggacaaagggcagaagcggagaagctctgagcctcctgaagaaaagattctcccatagacccgtgcaggagaagttcgtgtgcctgaactgcggcttcgagacacacgcagccgagcaagccgccctgaacatcgccagatcctggctgttcctgcggagccaggagtacaagaaataccagacaaacaagacaaccggcaacaccgataagagagccttcgtcgagacctggcagtccttttaccggaagaagcttaaggaggtgtggaaacctgccgtgcggtctggcggatctggcggaggctccacaagcaagcccggcgtggtgaggttcgtggacgtggccgtgtacttcagccccgaggagtgggcctgcctgaggcccgcccagagggccctgtacagggacgtgatgagggagacctacggccacctgggcgccctgggcttccccggccccaagcccgccctgatcagctggatggagcaggagaacgaggcctggagccccgccgcccaggaccccgaggagagggagaacctgggcggcgtgcccaccagccccaagaaaaagagaaaagtctaagctgccttctgcggggcttgccttctggccatgcccttcttctctcccttgcacctgtacctcttggtctttgaataaagcctgagtaggaaggctagcaaaaaaaaaaaaaaaaaaaaaaaaaaaaaaaaaaaaaaaaaaaaaaaaaaaaaaaaaaaaaaaaaaaaaaaaaaaaaaaa

SEQ ID NO: 3736 - RNA, 5419 nt, synthetic construct
  source 1..5419: mol_type = other RNA
aggaaataagagagaaaagaagagtaagaagaaatataagagccaccatggcccctaagaagaagcgtaaagtgagccgggtgaacggcagcggcagcggcggcggcatgaaccacgaccaggagttcgacccccctaaggtgtaccctcccgtccccgccgagaagagaaagcccatccgggtcctgagcctgttcgatggcatcgccaccggtctgctggtgctgaaggacctgggcatccaggtggataggtacattgcctccgaggtgtgcgaggactccatcaccgtgggaatggtgcgtcatcagggcaagatcatgtacgtgggcgacgtgcggagcgtgacacagaagcatatccaggagtggggccctttcgacctggtgatcggcggcagcccttgcaatgacctgagcatcgtgaacccagcccggaagggcctgtacgagggaaccggcagactgttcttcgagttttacagactgctgcacgacgcccggcctaaggaaggcgacgaccggcccttcttttggctgttcgagaatgtggtggccatgggagtcagcgacaagcgggatattagccggttcctggagagcaaccccgtgatgatcgatgccaaggaagtgagcgccgcccaccgggccagatacttctggggcaatctgcctggcatgaacagacccctggccagcaccgtgaacgacaagctggagctgcaggagtgcctggagcacggccggatcgccaagttcagcaaggtgagaaccatcaccacccgaagcaacagcatcaaacaaggcaaggaccagcactttcctgtgttcatgaacgagaaggaggacatcctgtggtgtaccgagatggagagagtgttcgggttcccagtccactacacagatgtcagcaacatgtctagactggccagacagagactgctgggaagaagctggtccgtccctgtgatcagacacctgttcgcccctctgaaggagtacttcgcctgcgtgagcagcggcaacagcaacgccaacagccggggccccagcttctctagcggcctggtgccactgtccctgagagggagccacatgggccccatggagatctacaaaaccgtgagcgcctggaagcggcagcctgtgcgcgtgctgagcctgtttcggaatatcgataaagtcctgaaaagcctgggattcctggagagcggctctggctccggcggtggcaccctgaagtacgtggaggatgtgacaaacgtggtcagacgggatgtggagaagtggggccccttcgatctggtgtacggcagcacccaacccctgggcagctcttgtgaccggtgccctggctggtacatgtttcagttccaccggatcctgcagtacgccctgccgagacaggagtcccagcggccattcttttggattttcatggacaacttgctgctgaccgaggatgaccaggaaactaccactcggttcctgcagaccgaagccgtgaccctgcaggacgtgagaggccgggactaccagaacgccatgcgggtgtggtccaacatccctggactgaaaagcaagcacgcacctctgacccctaaagaagaggagtacctgcaggcccaggtgcggagcagaagcaagctggacgcccctaaggtggatctgctggtgaagaattgcctcctgcccctgagagagtacttcaagtatttcagccagaatagtctgcccctgggcggcccaagcagcggcgcccctcctcccagcggcggcagcccagccggctccccaacctctaccgaggagggcacctctgagtccgccacccccgagagcggccctggcacctccaccgagcccagcgagggcagcgcacccggcagccctgccggcagccccacctccacagaggagggaaccagcaccgagcccagcgaaggcagcgccccaggcaccagcaccgagcctagtgagggcggctctggcggcggcagcgcccaggagattaaacggatcaacaagatcagaagaagacttgtgaaagacagcaacaccaagaaggccggcaagacaggccccatgaaaaccctgctggttagagtgatgacacccgatctgagagagcggctggaaaacctgagaaagaagcctgaaaatatcccccagcccatcagcaatacatctagagccaacctgaataagctgctgaccgattacaccgaaatgaagaaggcgatcctgcatgtgtactgggaagagttccagaaggaccctgtgggcctgatgagccgggtggcccagcctgccagcaagaagatcgatcagaacaagctgaaacctgagatggacgagaagggcaacctgaccaccgccggctttgcctgctctcagtgtggccagcccctgttcgtgtacaagctggagcaggtgtctgagaagggcaaggcttacaccaactacttcggacggtgcaatgtggccgagcacgaaaagctgatcctgctggcccagctgaagcccgagaaggatagcgacgaagccgtgacatatagcctgggaaagtttgggcagagggccctggatttctacagcattcatgtgaccaaggagtccacccaccccgtgaagcccctggcccagatcgccggaaacagatacgcctccggacctgtgggaaaggccctgagcgacgcatgtatgggcacaatcgcctccttcctgtctaagtaccaggacatcatcatcgaacaccagaaggtggtgaagggcaaccagaagagactggagagcctgcgggagctggccggcaaggaaaacctggaataccctagcgtgaccctgccacctcagcctcacaccaaggagggcgttgatgcctacaacgaagtgatcgcccgggtgcgaatgtgggtgaacctgaacctgtggcagaagctgaagctaagcagagatgatgccaagcctctgctgagactgaagggattcccttcctttcctctggtcgagagacaggccaacgaagtggactggtgggacatggtgtgtaacgtgaagaagctgatcaacgagaaaaaggaggatggcaaggtgttttggcagaatctggctggctacaagagacaggaagccctgagaccatacctgagcagcgaggaagatcggaagaagggaaagaaattcgctcggtaccagctgggcgacctgctgctgcacctggaaaagaagcacggcgaggactggggaaaggtgtacgacgaggcctgggagcggattgacaagaaagtggaaggcctgagcaagcacatcaagctggaagaggaacggagaagcgaggacgcccagagcaaggccgccctgaccgactggctgcgggctaaggccagcttcgtgatcgagggcctgaaggaggccgacaaggacgagttctgcagatgcgagctgaagctgcagaagtggtacggggacctgcggggaaagcccttcgccatcgaagccgagaacagcatcctggacatcagcggcttcagcaagcagtacaactgtgccttcatctggcagaaggacggcgtgaagaagctgaacctgtacctgatcatcaactacttcaagggcggcaagctgcggttcaagaagatcaaacctgaagccttcgaagccaacagattctacaccgtgatcaacaaaaagagcggcgagatcgtgcccatggaggtgaacttcaacttcgacgaccccaacctgatcatcctgcctctggcctttggcaagagacagggcagagaattcatctggaacgacctgctgtccctggaaaccggcagcctgaagctggccaacggaagagtgatcgagaagacactgtacaacagaagaacccggcaggatgagcctgccctgttcgtggccctgaccttcgagcggcgggaggtcctggactcctccaatatcaaaccaatgaacctgatcggcgtggcaagaggcgaaaacatccccgccgtgatcgccctgaccgaccccgagggctgcccactgagccggtttaaggatagcctgggaaacccaacccacatcctgagaatcggcgagagctataaggagaagcagcggaccatccaggccaagaaggaggtggagcagcggagagccggcggctacagccggaagtacgccagcaaagccaagaatctggcagacgatatggtgagaaacaccgctagagatctgctgtactacgccgtgacccaggatgccatgctgatcttcgccaacctgagccggggcttcggccggcagggcaagcggaccttcatggccgagagacagtacacacggatggaggactggctgaccgccaagctggcctacgagggcctgagcaagacctacctgtccaagacactggcccagtacacctccaagacatgcagcaactgtgggtttaccatcaccagcgccgactacgacagggtgctggagaagctgaagaagacagcaacaggctggatgaccacaattaacggcaaggagctgaaggtggagggccagattacctactacaacagatacaagagacagaacgtagtcaaggacctgtccgtcgagctggatagactgagcgaagaatctgtgaacaacgacatctcctcctggacaaagggcagaagcggagaagctctgagcctcctgaagaaaagattctcccatagacccgtgcaggagaagttcgtgtgcctgaactgcggcttcgagacacacgcagccgagcaagccgccctgaacatcgccagatcctggctgttcctgcggagccaggagtacaagaaataccagacaaacaagacaaccggcaacaccgataagagagccttcgtcgagacctggcagtccttttaccggaagaagcttaaggaggtgtggaaacctgccgtgcggtctggcggatctggcggaggctccacaagcgtggtgttcaccgacgtggccgtggacttcagccaggaggagtgggagtgcctggacagctaccagaggagcctgtacagggacgtgatcctggagaactacagcaacctggtgagcctgggcggcggcagcatcagcaagcccgacgtggtgaccctgctggagcagggcaaggagccctggatggtggtgagggacaccaagatcaggtggagcctgggcctggagagcaactacgacgccaccagccccaagaaaaagagaaaagtctaagctgccttctgcggggcttgccttctggccatgcccttcttctctcccttgcacctgtacctcttggtctttgaataaagcctgagtaggaaggctagcaaaaaaaaaaaaaaaaaaaaaaaaaaaaaaaaaaaaaaaaaaaaaaaaaaaaaaaaaaaaaaaaaaaaaaaaaaaaaaaa

SEQ ID NO: 3737 - RNA, 5419 nt, synthetic construct
  source 1..5419: mol_type = other RNA
aggaaataagagagaaaagaagagtaagaagaaatataagagccaccatggcccctaagaagaagcgtaaagtgagccgggtgaacggcagcggcagcggcggcggcatgaaccacgaccaggagttcgacccccctaaggtgtaccctcccgtccccgccgagaagagaaagcccatccgggtcctgagcctgttcgatggcatcgccaccggtctgctggtgctgaaggacctgggcatccaggtggataggtacattgcctccgaggtgtgcgaggactccatcaccgtgggaatggtgcgtcatcagggcaagatcatgtacgtgggcgacgtgcggagcgtgacacagaagcatatccaggagtggggccctttcgacctggtgatcggcggcagcccttgcaatgacctgagcatcgtgaacccagcccggaagggcctgtacgagggaaccggcagactgttcttcgagttttacagactgctgcacgacgcccggcctaaggaaggcgacgaccggcccttcttttggctgttcgagaatgtggtggccatgggagtcagcgacaagcgggatattagccggttcctggagagcaaccccgtgatgatcgatgccaaggaagtgagcgccgcccaccgggccagatacttctggggcaatctgcctggcatgaacagacccctggccagcaccgtgaacgacaagctggagctgcaggagtgcctggagcacggccggatcgccaagttcagcaaggtgagaaccatcaccacccgaagcaacagcatcaaacaaggcaaggaccagcactttcctgtgttcatgaacgagaaggaggacatcctgtggtgtaccgagatggagagagtgttcgggttcccagtccactacacagatgtcagcaacatgtctagactggccagacagagactgctgggaagaagctggtccgtccctgtgatcagacacctgttcgcccctctgaaggagtacttcgcctgcgtgagcagcggcaacagcaacgccaacagccggggccccagcttctctagcggcctggtgccactgtccctgagagggagccacatgggccccatggagatctacaaaaccgtgagcgcctggaagcggcagcctgtgcgcgtgctgagcctgtttcggaatatcgataaagtcctgaaaagcctgggattcctggagagcggctctggctccggcggtggcaccctgaagtacgtggaggatgtgacaaacgtggtcagacgggatgtggagaagtggggccccttcgatctggtgtacggcagcacccaacccctgggcagctcttgtgaccggtgccctggctggtacatgtttcagttccaccggatcctgcagtacgccctgccgagacaggagtcccagcggccattcttttggattttcatggacaacttgctgctgaccgaggatgaccaggaaactaccactcggttcctgcagaccgaagccgtgaccctgcaggacgtgagaggccgggactaccagaacgccatgcgggtgtggtccaacatccctggactgaaaagcaagcacgcacctctgacccctaaagaagaggagtacctgcaggcccaggtgcggagcagaagcaagctggacgcccctaaggtggatctgctggtgaagaattgcctcctgcccctgagagagtacttcaagtatttcagccagaatagtctgcccctgggcggcccaagcagcggcgcccctcctcccagcggcggcagcccagccggctccccaacctctaccgaggagggcacctctgagtccgccacccccgagagcggccctggcacctccaccgagcccagcgagggcagcgcacccggcagccctgccggcagccccacctccacagaggagggaaccagcaccgagcccagcgaaggcagcgccccaggcaccagcaccgagcctagtgagggcggctctggcggcggcagcgcccaggagattaaacggatcaacaagatcagaagaagacttgtgaaagacagcaacaccaagaaggccggcaagacaggccccatgaaaaccctgctggttagagtgatgacacccgatctgagagagcggctggaaaacctgagaaagaagcctgaaaatatcccccagcccatcagcaatacatctagagccaacctgaataagctgctgaccgattacaccgaaatgaagaaggcgatcctgcatgtgtactgggaagagttccagaaggaccctgtgggcctgatgagccgggtggcccagcctgccagcaagaagatcgatcagaacaagctgaaacctgagatggacgagaagggcaacctgaccaccgccggctttgcctgctctcagtgtggccagcccctgttcgtgtacaagctggagcaggtgtctgagaagggcaaggcttacaccaactacttcggacggtgcaatgtggccgagcacgaaaagctgatcctgctggcccagctgaagcccgagaaggatagcgacgaagccgtgacatatagcctgggaaagtttgggcagagggccctggatttctacagcattcatgtgaccaaggagtccacccaccccgtgaagcccctggcccagatcgccggaaacagatacgcctccggacctgtgggaaaggccctgagcgacgcatgtatgggcacaatcgcctccttcctgtctaagtaccaggacatcatcatcgaacaccagaaggtggtgaagggcaaccagaagagactggagagcctgcgggagctggccggcaaggaaaacctggaataccctagcgtgaccctgccacctcagcctcacaccaaggagggcgttgatgcctacaacgaagtgatcgcccgggtgcgaatgtgggtgaacctgaacctgtggcagaagctgaagctaagcagagatgatgccaagcctctgctgagactgaagggattcccttcctttcctctggtcgagagacaggccaacgaagtggactggtgggacatggtgtgtaacgtgaagaagctgatcaacgagaaaaaggaggatggcaaggtgttttggcagaatctggctggctacaagagacaggaagccctgagaccatacctgagcagcgaggaagatcggaagaagggaaagaaattcgctcggtaccagctgggcgacctgctgctgcacctggaaaagaagcacggcgaggactggggaaaggtgtacgacgaggcctgggagcggattgacaagaaagtggaaggcctgagcaagcacatcaagctggaagaggaacggagaagcgaggacgcccagagcaaggccgccctgaccgactggctgcgggctaaggccagcttcgtgatcgagggcctgaaggaggccgacaaggacgagttctgcagatgcgagctgaagctgcagaagtggtacggggacctgcggggaaagcccttcgccatcgaagccgagaacagcatcctggacatcagcggcttcagcaagcagtacaactgtgccttcatctggcagaaggacggcgtgaagaagctgaacctgtacctgatcatcaactacttcaagggcggcaagctgcggttcaagaagatcaaacctgaagccttcgaagccaacagattctacaccgtgatcaacaaaaagagcggcgagatcgtgcccatggaggtgaacttcaacttcgacgaccccaacctgatcatcctgcctctggcctttggcaagagacagggcagagaattcatctggaacgacctgctgtccctggaaaccggcagcctgaagctggccaacggaagagtgatcgagaagacactgtacaacagaagaacccggcaggatgagcctgccctgttcgtggccctgaccttcgagcggcgggaggtcctggactcctccaatatcaaaccaatgaacctgatcggcgtggcaagaggcgaaaacatccccgccgtgatcgccctgaccgaccccgagggctgcccactgagccggtttaaggatagcctgggaaacccaacccacatcctgagaatcggcgagagctataaggagaagcagcggaccatccaggccaagaaggaggtggagcagcggagagccggcggctacagccggaagtacgccagcaaagccaagaatctggcagacgatatggtgagaaacaccgctagagatctgctgtactacgccgtgacccaggatgccatgctgatcttcgccaacctgagccggggcttcggccggcagggcaagcggaccttcatggccgagagacagtacacacggatggaggactggctgaccgccaagctggcctacgagggcctgagcaagacctacctgtccaagacactggcccagtacacctccaagacatgcagcaactgtgggtttaccatcaccagcgccgactacgacagggtgctggagaagctgaagaagacagcaacaggctggatgaccacaattaacggcaaggagctgaaggtggagggccagattacctactacaacagatacaagagacagaacgtagtcaaggacctgtccgtcgagctggatagactgagcgaagaatctgtgaacaacgacatctcctcctggacaaagggcagaagcggagaagctctgagcctcctgaagaaaagattctcccatagacccgtgcaggagaagttcgtgtgcctgaactgcggcttcgagacacacgcagccgagcaagccgccctgaacatcgccagatcctggctgttcctgcggagccaggagtacaagaaataccagacaaacaagacaaccggcaacaccgataagagagccttcgtcgagacctggcagtccttttaccggaagaagcttaaggaggtgtggaaacctgccgtgcggtctggcggatctggcggaggctccacaagcctgcaggacagcgtgaccttcaaggacgtggccgtggacttcagccaggaggagtgggagaggctgaaccccgcccagaggagcctgtacaggaccgtggtgctggagaactactggaacctggtgagcgtgggcgcctgcgtgagcaagagccacctgatcagcctgctggagcacggcaaggccccctgggacatgaggggcgaggtgaccgagagcaccagccaggacggcgagagcgtgaccagccccaagaaaaagagaaaagtctaagctgccttctgcggggcttgccttctggccatgcccttcttctctcccttgcacctgtacctcttggtctttgaataaagcctgagtaggaaggctagcaaaaaaaaaaaaaaaaaaaaaaaaaaaaaaaaaaaaaaaaaaaaaaaaaaaaaaaaaaaaaaaaaaaaaaaaaaaaaaaa

SEQ ID NO: 3738 - RNA, 5419 nt, synthetic construct
  source 1..5419: mol_type = other RNA
aggaaataagagagaaaagaagagtaagaagaaatataagagccaccatggcccctaagaagaagcgtaaagtgagccgggtgaacggcagcggcagcggcggcggcatgaaccacgaccaggagttcgacccccctaaggtgtaccctcccgtccccgccgagaagagaaagcccatccgggtcctgagcctgttcgatggcatcgccaccggtctgctggtgctgaaggacctgggcatccaggtggataggtacattgcctccgaggtgtgcgaggactccatcaccgtgggaatggtgcgtcatcagggcaagatcatgtacgtgggcgacgtgcggagcgtgacacagaagcatatccaggagtggggccctttcgacctggtgatcggcggcagcccttgcaatgacctgagcatcgtgaacccagcccggaagggcctgtacgagggaaccggcagactgttcttcgagttttacagactgctgcacgacgcccggcctaaggaaggcgacgaccggcccttcttttggctgttcgagaatgtggtggccatgggagtcagcgacaagcgggatattagccggttcctggagagcaaccccgtgatgatcgatgccaaggaagtgagcgccgcccaccgggccagatacttctggggcaatctgcctggcatgaacagacccctggccagcaccgtgaacgacaagctggagctgcaggagtgcctggagcacggccggatcgccaagttcagcaaggtgagaaccatcaccacccgaagcaacagcatcaaacaaggcaaggaccagcactttcctgtgttcatgaacgagaaggaggacatcctgtggtgtaccgagatggagagagtgttcgggttcccagtccactacacagatgtcagcaacatgtctagactggccagacagagactgctgggaagaagctggtccgtccctgtgatcagacacctgttcgcccctctgaaggagtacttcgcctgcgtgagcagcggcaacagcaacgccaacagccggggccccagcttctctagcggcctggtgccactgtccctgagagggagccacatgggccccatggagatctacaaaaccgtgagcgcctggaagcggcagcctgtgcgcgtgctgagcctgtttcggaatatcgataaagtcctgaaaagcctgggattcctggagagcggctctggctccggcggtggcaccctgaagtacgtggaggatgtgacaaacgtggtcagacgggatgtggagaagtggggccccttcgatctggtgtacggcagcacccaacccctgggcagctcttgtgaccggtgccctggctggtacatgtttcagttccaccggatcctgcagtacgccctgccgagacaggagtcccagcggccattcttttggattttcatggacaacttgctgctgaccgaggatgaccaggaaactaccactcggttcctgcagaccgaagccgtgaccctgcaggacgtgagaggccgggactaccagaacgccatgcgggtgtggtccaacatccctggactgaaaagcaagcacgcacctctgacccctaaagaagaggagtacctgcaggcccaggtgcggagcagaagcaagctggacgcccctaaggtggatctgctggtgaagaattgcctcctgcccctgagagagtacttcaagtatttcagccagaatagtctgcccctgggcggcccaagcagcggcgcccctcctcccagcggcggcagcccagccggctccccaacctctaccgaggagggcacctctgagtccgccacccccgagagcggccctggcacctccaccgagcccagcgagggcagcgcacccggcagccctgccggcagccccacctccacagaggagggaaccagcaccgagcccagcgaaggcagcgccccaggcaccagcaccgagcctagtgagggcggctctggcggcggcagcgcccaggagattaaacggatcaacaagatcagaagaagacttgtgaaagacagcaacaccaagaaggccggcaagacaggccccatgaaaaccctgctggttagagtgatgacacccgatctgagagagcggctggaaaacctgagaaagaagcctgaaaatatcccccagcccatcagcaatacatctagagccaacctgaataagctgctgaccgattacaccgaaatgaagaaggcgatcctgcatgtgtactgggaagagttccagaaggaccctgtgggcctgatgagccgggtggcccagcctgccagcaagaagatcgatcagaacaagctgaaacctgagatggacgagaagggcaacctgaccaccgccggctttgcctgctctcagtgtggccagcccctgttcgtgtacaagctggagcaggtgtctgagaagggcaaggcttacaccaactacttcggacggtgcaatgtggccgagcacgaaaagctgatcctgctggcccagctgaagcccgagaaggatagcgacgaagccgtgacatatagcctgggaaagtttgggcagagggccctggatttctacagcattcatgtgaccaaggagtccacccaccccgtgaagcccctggcccagatcgccggaaacagatacgcctccggacctgtgggaaaggccctgagcgacgcatgtatgggcacaatcgcctccttcctgtctaagtaccaggacatcatcatcgaacaccagaaggtggtgaagggcaaccagaagagactggagagcctgcgggagctggccggcaaggaaaacctggaataccctagcgtgaccctgccacctcagcctcacaccaaggagggcgttgatgcctacaacgaagtgatcgcccgggtgcgaatgtgggtgaacctgaacctgtggcagaagctgaagctaagcagagatgatgccaagcctctgctgagactgaagggattcccttcctttcctctggtcgagagacaggccaacgaagtggactggtgggacatggtgtgtaacgtgaagaagctgatcaacgagaaaaaggaggatggcaaggtgttttggcagaatctggctggctacaagagacaggaagccctgagaccatacctgagcagcgaggaagatcggaagaagggaaagaaattcgctcggtaccagctgggcgacctgctgctgcacctggaaaagaagcacggcgaggactggggaaaggtgtacgacgaggcctgggagcggattgacaagaaagtggaaggcctgagcaagcacatcaagctggaagaggaacggagaagcgaggacgcccagagcaaggccgccctgaccgactggctgcgggctaaggccagcttcgtgatcgagggcctgaaggaggccgacaaggacgagttctgcagatgcgagctgaagctgcagaagtggtacggggacctgcggggaaagcccttcgccatcgaagccgagaacagcatcctggacatcagcggcttcagcaagcagtacaactgtgccttcatctggcagaaggacggcgtgaagaagctgaacctgtacctgatcatcaactacttcaagggcggcaagctgcggttcaagaagatcaaacctgaagccttcgaagccaacagattctacaccgtgatcaacaaaaagagcggcgagatcgtgcccatggaggtgaacttcaacttcgacgaccccaacctgatcatcctgcctctggcctttggcaagagacagggcagagaattcatctggaacgacctgctgtccctggaaaccggcagcctgaagctggccaacggaagagtgatcgagaagacactgtacaacagaagaacccggcaggatgagcctgccctgttcgtggccctgaccttcgagcggcgggaggtcctggactcctccaatatcaaaccaatgaacctgatcggcgtggcaagaggcgaaaacatccccgccgtgatcgccctgaccgaccccgagggctgcccactgagccggtttaaggatagcctgggaaacccaacccacatcctgagaatcggcgagagctataaggagaagcagcggaccatccaggccaagaaggaggtggagcagcggagagccggcggctacagccggaagtacgccagcaaagccaagaatctggcagacgatatggtgagaaacaccgctagagatctgctgtactacgccgtgacccaggatgccatgctgatcttcgccaacctgagccggggcttcggccggcagggcaagcggaccttcatggccgagagacagtacacacggatggaggactggctgaccgccaagctggcctacgagggcctgagcaagacctacctgtccaagacactggcccagtacacctccaagacatgcagcaactgtgggtttaccatcaccagcgccgactacgacagggtgctggagaagctgaagaagacagcaacaggctggatgaccacaattaacggcaaggagctgaaggtggagggccagattacctactacaacagatacaagagacagaacgtagtcaaggacctgtccgtcgagctggatagactgagcgaagaatctgtgaacaacgacatctcctcctggacaaagggcagaagcggagaagctctgagcctcctgaagaaaagattctcccatagacccgtgcaggagaagttcgtgtgcctgaactgcggcttcgagacacacgcagccgagcaagccgccctgaacatcgccagatcctggctgttcctgcggagccaggagtacaagaaataccagacaaacaagacaaccggcaacaccgataagagagccttcgtcgagacctggcagtccttttaccggaagaagcttaaggaggtgtggaaacctgccgtgcggtctggcggatctggcggaggctccacaagcccccaggagagcgtgaccttcgaggacgtggccgtgtacttcacccagaaggagtgggagggcctggcccccgcccagagggccctgtacagggacgtgatgctggagaactacggcaacctggtgagcctggccttcctgttccccaagcccgccgtgatcagccagctggagcagggcgagaagccctggatccagaccccccagaggcccctggacaagaagaagacctacaagggctgcaccagccccaagaaaaagagaaaagtctaagctgccttctgcggggcttgccttctggccatgcccttcttctctcccttgcacctgtacctcttggtctttgaataaagcctgagtaggaaggctagcaaaaaaaaaaaaaaaaaaaaaaaaaaaaaaaaaaaaaaaaaaaaaaaaaaaaaaaaaaaaaaaaaaaaaaaaaaaaaaaa

SEQ ID NO: 3739 - RNA, 5419 nt, synthetic construct
  source 1..5419: mol_type = other RNA
aggaaataagagagaaaagaagagtaagaagaaatataagagccaccatggcccctaagaagaagcgtaaagtgagccgggtgaacggcagcggcagcggcggcggcatgaaccacgaccaggagttcgacccccctaaggtgtaccctcccgtccccgccgagaagagaaagcccatccgggtcctgagcctgttcgatggcatcgccaccggtctgctggtgctgaaggacctgggcatccaggtggataggtacattgcctccgaggtgtgcgaggactccatcaccgtgggaatggtgcgtcatcagggcaagatcatgtacgtgggcgacgtgcggagcgtgacacagaagcatatccaggagtggggccctttcgacctggtgatcggcggcagcccttgcaatgacctgagcatcgtgaacccagcccggaagggcctgtacgagggaaccggcagactgttcttcgagttttacagactgctgcacgacgcccggcctaaggaaggcgacgaccggcccttcttttggctgttcgagaatgtggtggccatgggagtcagcgacaagcgggatattagccggttcctggagagcaaccccgtgatgatcgatgccaaggaagtgagcgccgcccaccgggccagatacttctggggcaatctgcctggcatgaacagacccctggccagcaccgtgaacgacaagctggagctgcaggagtgcctggagcacggccggatcgccaagttcagcaaggtgagaaccatcaccacccgaagcaacagcatcaaacaaggcaaggaccagcactttcctgtgttcatgaacgagaaggaggacatcctgtggtgtaccgagatggagagagtgttcgggttcccagtccactacacagatgtcagcaacatgtctagactggccagacagagactgctgggaagaagctggtccgtccctgtgatcagacacctgttcgcccctctgaaggagtacttcgcctgcgtgagcagcggcaacagcaacgccaacagccggggccccagcttctctagcggcctggtgccactgtccctgagagggagccacatgggccccatggagatctacaaaaccgtgagcgcctggaagcggcagcctgtgcgcgtgctgagcctgtttcggaatatcgataaagtcctgaaaagcctgggattcctggagagcggctctggctccggcggtggcaccctgaagtacgtggaggatgtgacaaacgtggtcagacgggatgtggagaagtggggccccttcgatctggtgtacggcagcacccaacccctgggcagctcttgtgaccggtgccctggctggtacatgtttcagttccaccggatcctgcagtacgccctgccgagacaggagtcccagcggccattcttttggattttcatggacaacttgctgctgaccgaggatgaccaggaaactaccactcggttcctgcagaccgaagccgtgaccctgcaggacgtgagaggccgggactaccagaacgccatgcgggtgtggtccaacatccctggactgaaaagcaagcacgcacctctgacccctaaagaagaggagtacctgcaggcccaggtgcggagcagaagcaagctggacgcccctaaggtggatctgctggtgaagaattgcctcctgcccctgagagagtacttcaagtatttcagccagaatagtctgcccctgggcggcccaagcagcggcgcccctcctcccagcggcggcagcccagccggctccccaacctctaccgaggagggcacctctgagtccgccacccccgagagcggccctggcacctccaccgagcccagcgagggcagcgcacccggcagccctgccggcagccccacctccacagaggagggaaccagcaccgagcccagcgaaggcagcgccccaggcaccagcaccgagcctagtgagggcggctctggcggcggcagcgcccaggagattaaacggatcaacaagatcagaagaagacttgtgaaagacagcaacaccaagaaggccggcaagacaggccccatgaaaaccctgctggttagagtgatgacacccgatctgagagagcggctggaaaacctgagaaagaagcctgaaaatatcccccagcccatcagcaatacatctagagccaacctgaataagctgctgaccgattacaccgaaatgaagaaggcgatcctgcatgtgtactgggaagagttccagaaggaccctgtgggcctgatgagccgggtggcccagcctgccagcaagaagatcgatcagaacaagctgaaacctgagatggacgagaagggcaacctgaccaccgccggctttgcctgctctcagtgtggccagcccctgttcgtgtacaagctggagcaggtgtctgagaagggcaaggcttacaccaactacttcggacggtgcaatgtggccgagcacgaaaagctgatcctgctggcccagctgaagcccgagaaggatagcgacgaagccgtgacatatagcctgggaaagtttgggcagagggccctggatttctacagcattcatgtgaccaaggagtccacccaccccgtgaagcccctggcccagatcgccggaaacagatacgcctccggacctgtgggaaaggccctgagcgacgcatgtatgggcacaatcgcctccttcctgtctaagtaccaggacatcatcatcgaacaccagaaggtggtgaagggcaaccagaagagactggagagcctgcgggagctggccggcaaggaaaacctggaataccctagcgtgaccctgccacctcagcctcacaccaaggagggcgttgatgcctacaacgaagtgatcgcccgggtgcgaatgtgggtgaacctgaacctgtggcagaagctgaagctaagcagagatgatgccaagcctctgctgagactgaagggattcccttcctttcctctggtcgagagacaggccaacgaagtggactggtgggacatggtgtgtaacgtgaagaagctgatcaacgagaaaaaggaggatggcaaggtgttttggcagaatctggctggctacaagagacaggaagccctgagaccatacctgagcagcgaggaagatcggaagaagggaaagaaattcgctcggtaccagctgggcgacctgctgctgcacctggaaaagaagcacggcgaggactggggaaaggtgtacgacgaggcctgggagcggattgacaagaaagtggaaggcctgagcaagcacatcaagctggaagaggaacggagaagcgaggacgcccagagcaaggccgccctgaccgactggctgcgggctaaggccagcttcgtgatcgagggcctgaaggaggccgacaaggacgagttctgcagatgcgagctgaagctgcagaagtggtacggggacctgcggggaaagcccttcgccatcgaagccgagaacagcatcctggacatcagcggcttcagcaagcagtacaactgtgccttcatctggcagaaggacggcgtgaagaagctgaacctgtacctgatcatcaactacttcaagggcggcaagctgcggttcaagaagatcaaacctgaagccttcgaagccaacagattctacaccgtgatcaacaaaaagagcggcgagatcgtgcccatggaggtgaacttcaacttcgacgaccccaacctgatcatcctgcctctggcctttggcaagagacagggcagagaattcatctggaacgacctgctgtccctggaaaccggcagcctgaagctggccaacggaagagtgatcgagaagacactgtacaacagaagaacccggcaggatgagcctgccctgttcgtggccctgaccttcgagcggcgggaggtcctggactcctccaatatcaaaccaatgaacctgatcggcgtggcaagaggcgaaaacatccccgccgtgatcgccctgaccgaccccgagggctgcccactgagccggtttaaggatagcctgggaaacccaacccacatcctgagaatcggcgagagctataaggagaagcagcggaccatccaggccaagaaggaggtggagcagcggagagccggcggctacagccggaagtacgccagcaaagccaagaatctggcagacgatatggtgagaaacaccgctagagatctgctgtactacgccgtgacccaggatgccatgctgatcttcgccaacctgagccggggcttcggccggcagggcaagcggaccttcatggccgagagacagtacacacggatggaggactggctgaccgccaagctggcctacgagggcctgagcaagacctacctgtccaagacactggcccagtacacctccaagacatgcagcaactgtgggtttaccatcaccagcgccgactacgacagggtgctggagaagctgaagaagacagcaacaggctggatgaccacaattaacggcaaggagctgaaggtggagggccagattacctactacaacagatacaagagacagaacgtagtcaaggacctgtccgtcgagctggatagactgagcgaagaatctgtgaacaacgacatctcctcctggacaaagggcagaagcggagaagctctgagcctcctgaagaaaagattctcccatagacccgtgcaggagaagttcgtgtgcctgaactgcggcttcgagacacacgcagccgagcaagccgccctgaacatcgccagatcctggctgttcctgcggagccaggagtacaagaaataccagacaaacaagacaaccggcaacaccgataagagagccttcgtcgagacctggcagtccttttaccggaagaagcttaaggaggtgtggaaacctgccgtgcggtctggcggatctggcggaggctccacaagcatgcccgccaacgaggacgccccccagcccggcgagcacggcagcgcctgcgaggtgagcgtgagcttcgaggacgtgaccgtggacttcagcagggaggagtggcagcagctggacagcacccagaggaggctgtaccaggacgtgatgctggagaactacagccacctgctgagcgtgggcttcgaggtgcccaagcccgaggtgatcttcaagctggagcagggcgagggcccctggaccaccagccccaagaaaaagagaaaagtctaagctgccttctgcggggcttgccttctggccatgcccttcttctctcccttgcacctgtacctcttggtctttgaataaagcctgagtaggaaggctagcaaaaaaaaaaaaaaaaaaaaaaaaaaaaaaaaaaaaaaaaaaaaaaaaaaaaaaaaaaaaaaaaaaaaaaaaaaaaaaaa

SEQ ID NO: 3740 - RNA, 5419 nt, synthetic construct
  source 1..5419: mol_type = other RNA
aggaaataagagagaaaagaagagtaagaagaaatataagagccaccatggcccctaagaagaagcgtaaagtgagccgggtgaacggcagcggcagcggcggcggcatgaaccacgaccaggagttcgacccccctaaggtgtaccctcccgtccccgccgagaagagaaagcccatccgggtcctgagcctgttcgatggcatcgccaccggtctgctggtgctgaaggacctgggcatccaggtggataggtacattgcctccgaggtgtgcgaggactccatcaccgtgggaatggtgcgtcatcagggcaagatcatgtacgtgggcgacgtgcggagcgtgacacagaagcatatccaggagtggggccctttcgacctggtgatcggcggcagcccttgcaatgacctgagcatcgtgaacccagcccggaagggcctgtacgagggaaccggcagactgttcttcgagttttacagactgctgcacgacgcccggcctaaggaaggcgacgaccggcccttcttttggctgttcgagaatgtggtggccatgggagtcagcgacaagcgggatattagccggttcctggagagcaaccccgtgatgatcgatgccaaggaagtgagcgccgcccaccgggccagatacttctggggcaatctgcctggcatgaacagacccctggccagcaccgtgaacgacaagctggagctgcaggagtgcctggagcacggccggatcgccaagttcagcaaggtgagaaccatcaccacccgaagcaacagcatcaaacaaggcaaggaccagcactttcctgtgttcatgaacgagaaggaggacatcctgtggtgtaccgagatggagagagtgttcgggttcccagtccactacacagatgtcagcaacatgtctagactggccagacagagactgctgggaagaagctggtccgtccctgtgatcagacacctgttcgcccctctgaaggagtacttcgcctgcgtgagcagcggcaacagcaacgccaacagccggggccccagcttctctagcggcctggtgccactgtccctgagagggagccacatgggccccatggagatctacaaaaccgtgagcgcctggaagcggcagcctgtgcgcgtgctgagcctgtttcggaatatcgataaagtcctgaaaagcctgggattcctggagagcggctctggctccggcggtggcaccctgaagtacgtggaggatgtgacaaacgtggtcagacgggatgtggagaagtggggccccttcgatctggtgtacggcagcacccaacccctgggcagctcttgtgaccggtgccctggctggtacatgtttcagttccaccggatcctgcagtacgccctgccgagacaggagtcccagcggccattcttttggattttcatggacaacttgctgctgaccgaggatgaccaggaaactaccactcggttcctgcagaccgaagccgtgaccctgcaggacgtgagaggccgggactaccagaacgccatgcgggtgtggtccaacatccctggactgaaaagcaagcacgcacctctgacccctaaagaagaggagtacctgcaggcccaggtgcggagcagaagcaagctggacgcccctaaggtggatctgctggtgaagaattgcctcctgcccctgagagagtacttcaagtatttcagccagaatagtctgcccctgggcggcccaagcagcggcgcccctcctcccagcggcggcagcccagccggctccccaacctctaccgaggagggcacctctgagtccgccacccccgagagcggccctggcacctccaccgagcccagcgagggcagcgcacccggcagccctgccggcagccccacctccacagaggagggaaccagcaccgagcccagcgaaggcagcgccccaggcaccagcaccgagcctagtgagggcggctctggcggcggcagcgcccaggagattaaacggatcaacaagatcagaagaagacttgtgaaagacagcaacaccaagaaggccggcaagacaggccccatgaaaaccctgctggttagagtgatgacacccgatctgagagagcggctggaaaacctgagaaagaagcctgaaaatatcccccagcccatcagcaatacatctagagccaacctgaataagctgctgaccgattacaccgaaatgaagaaggcgatcctgcatgtgtactgggaagagttccagaaggaccctgtgggcctgatgagccgggtggcccagcctgccagcaagaagatcgatcagaacaagctgaaacctgagatggacgagaagggcaacctgaccaccgccggctttgcctgctctcagtgtggccagcccctgttcgtgtacaagctggagcaggtgtctgagaagggcaaggcttacaccaactacttcggacggtgcaatgtggccgagcacgaaaagctgatcctgctggcccagctgaagcccgagaaggatagcgacgaagccgtgacatatagcctgggaaagtttgggcagagggccctggatttctacagcattcatgtgaccaaggagtccacccaccccgtgaagcccctggcccagatcgccggaaacagatacgcctccggacctgtgggaaaggccctgagcgacgcatgtatgggcacaatcgcctccttcctgtctaagtaccaggacatcatcatcgaacaccagaaggtggtgaagggcaaccagaagagactggagagcctgcgggagctggccggcaaggaaaacctggaataccctagcgtgaccctgccacctcagcctcacaccaaggagggcgttgatgcctacaacgaagtgatcgcccgggtgcgaatgtgggtgaacctgaacctgtggcagaagctgaagctaagcagagatgatgccaagcctctgctgagactgaagggattcccttcctttcctctggtcgagagacaggccaacgaagtggactggtgggacatggtgtgtaacgtgaagaagctgatcaacgagaaaaaggaggatggcaaggtgttttggcagaatctggctggctacaagagacaggaagccctgagaccatacctgagcagcgaggaagatcggaagaagggaaagaaattcgctcggtaccagctgggcgacctgctgctgcacctggaaaagaagcacggcgaggactggggaaaggtgtacgacgaggcctgggagcggattgacaagaaagtggaaggcctgagcaagcacatcaagctggaagaggaacggagaagcgaggacgcccagagcaaggccgccctgaccgactggctgcgggctaaggccagcttcgtgatcgagggcctgaaggaggccgacaaggacgagttctgcagatgcgagctgaagctgcagaagtggtacggggacctgcggggaaagcccttcgccatcgaagccgagaacagcatcctggacatcagcggcttcagcaagcagtacaactgtgccttcatctggcagaaggacggcgtgaagaagctgaacctgtacctgatcatcaactacttcaagggcggcaagctgcggttcaagaagatcaaacctgaagccttcgaagccaacagattctacaccgtgatcaacaaaaagagcggcgagatcgtgcccatggaggtgaacttcaacttcgacgaccccaacctgatcatcctgcctctggcctttggcaagagacagggcagagaattcatctggaacgacctgctgtccctggaaaccggcagcctgaagctggccaacggaagagtgatcgagaagacactgtacaacagaagaacccggcaggatgagcctgccctgttcgtggccctgaccttcgagcggcgggaggtcctggactcctccaatatcaaaccaatgaacctgatcggcgtggcaagaggcgaaaacatccccgccgtgatcgccctgaccgaccccgagggctgcccactgagccggtttaaggatagcctgggaaacccaacccacatcctgagaatcggcgagagctataaggagaagcagcggaccatccaggccaagaaggaggtggagcagcggagagccggcggctacagccggaagtacgccagcaaagccaagaatctggcagacgatatggtgagaaacaccgctagagatctgctgtactacgccgtgacccaggatgccatgctgatcttcgccaacctgagccggggcttcggccggcagggcaagcggaccttcatggccgagagacagtacacacggatggaggactggctgaccgccaagctggcctacgagggcctgagcaagacctacctgtccaagacactggcccagtacacctccaagacatgcagcaactgtgggtttaccatcaccagcgccgactacgacagggtgctggagaagctgaagaagacagcaacaggctggatgaccacaattaacggcaaggagctgaaggtggagggccagattacctactacaacagatacaagagacagaacgtagtcaaggacctgtccgtcgagctggatagactgagcgaagaatctgtgaacaacgacatctcctcctggacaaagggcagaagcggagaagctctgagcctcctgaagaaaagattctcccatagacccgtgcaggagaagttcgtgtgcctgaactgcggcttcgagacacacgcagccgagcaagccgccctgaacatcgccagatcctggctgttcctgcggagccaggagtacaagaaataccagacaaacaagacaaccggcaacaccgataagagagccttcgtcgagacctggcagtccttttaccggaagaagcttaaggaggtgtggaaacctgccgtgcggtctggcggatctggcggaggctccacaagcgcccaggaggccgtgaccttcaaggacgtggccgtggacttcaccagggaggagtggaggctgctgagccccccccagaaggagctgtacaaggaggtgatgctggagaacgcccagaacctgctgaccgtgggcctgcccgccccccccgagaacgtgatcagcgccctgggcgccgagggcagccccgtggacgccaggggcaggaggcccgagggcgcctgctgccccggcgagatcatcaccagccccaagaaaaagagaaaagtctaagctgccttctgcggggcttgccttctggccatgcccttcttctctcccttgcacctgtacctcttggtctttgaataaagcctgagtaggaaggctagcaaaaaaaaaaaaaaaaaaaaaaaaaaaaaaaaaaaaaaaaaaaaaaaaaaaaaaaaaaaaaaaaaaaaaaaaaaaaaaaa

SEQ ID NO: 3741 - RNA, 5419 nt, synthetic construct
  source 1..5419: mol_type = other RNA
aggaaataagagagaaaagaagagtaagaagaaatataagagccaccatggcccctaagaagaagcgtaaagtgagccgggtgaacggcagcggcagcggcggcggcatgaaccacgaccaggagttcgacccccctaaggtgtaccctcccgtccccgccgagaagagaaagcccatccgggtcctgagcctgttcgatggcatcgccaccggtctgctggtgctgaaggacctgggcatccaggtggataggtacattgcctccgaggtgtgcgaggactccatcaccgtgggaatggtgcgtcatcagggcaagatcatgtacgtgggcgacgtgcggagcgtgacacagaagcatatccaggagtggggccctttcgacctggtgatcggcggcagcccttgcaatgacctgagcatcgtgaacccagcccggaagggcctgtacgagggaaccggcagactgttcttcgagttttacagactgctgcacgacgcccggcctaaggaaggcgacgaccggcccttcttttggctgttcgagaatgtggtggccatgggagtcagcgacaagcgggatattagccggttcctggagagcaaccccgtgatgatcgatgccaaggaagtgagcgccgcccaccgggccagatacttctggggcaatctgcctggcatgaacagacccctggccagcaccgtgaacgacaagctggagctgcaggagtgcctggagcacggccggatcgccaagttcagcaaggtgagaaccatcaccacccgaagcaacagcatcaaacaaggcaaggaccagcactttcctgtgttcatgaacgagaaggaggacatcctgtggtgtaccgagatggagagagtgttcgggttcccagtccactacacagatgtcagcaacatgtctagactggccagacagagactgctgggaagaagctggtccgtccctgtgatcagacacctgttcgcccctctgaaggagtacttcgcctgcgtgagcagcggcaacagcaacgccaacagccggggccccagcttctctagcggcctggtgccactgtccctgagagggagccacatgggccccatggagatctacaaaaccgtgagcgcctggaagcggcagcctgtgcgcgtgctgagcctgtttcggaatatcgataaagtcctgaaaagcctgggattcctggagagcggctctggctccggcggtggcaccctgaagtacgtggaggatgtgacaaacgtggtcagacgggatgtggagaagtggggccccttcgatctggtgtacggcagcacccaacccctgggcagctcttgtgaccggtgccctggctggtacatgtttcagttccaccggatcctgcagtacgccctgccgagacaggagtcccagcggccattcttttggattttcatggacaacttgctgctgaccgaggatgaccaggaaactaccactcggttcctgcagaccgaagccgtgaccctgcaggacgtgagaggccgggactaccagaacgccatgcgggtgtggtccaacatccctggactgaaaagcaagcacgcacctctgacccctaaagaagaggagtacctgcaggcccaggtgcggagcagaagcaagctggacgcccctaaggtggatctgctggtgaagaattgcctcctgcccctgagagagtacttcaagtatttcagccagaatagtctgcccctgggcggcccaagcagcggcgcccctcctcccagcggcggcagcccagccggctccccaacctctaccgaggagggcacctctgagtccgccacccccgagagcggccctggcacctccaccgagcccagcgagggcagcgcacccggcagccctgccggcagccccacctccacagaggagggaaccagcaccgagcccagcgaaggcagcgccccaggcaccagcaccgagcctagtgagggcggctctggcggcggcagcgcccaggagattaaacggatcaacaagatcagaagaagacttgtgaaagacagcaacaccaagaaggccggcaagacaggccccatgaaaaccctgctggttagagtgatgacacccgatctgagagagcggctggaaaacctgagaaagaagcctgaaaatatcccccagcccatcagcaatacatctagagccaacctgaataagctgctgaccgattacaccgaaatgaagaaggcgatcctgcatgtgtactgggaagagttccagaaggaccctgtgggcctgatgagccgggtggcccagcctgccagcaagaagatcgatcagaacaagctgaaacctgagatggacgagaagggcaacctgaccaccgccggctttgcctgctctcagtgtggccagcccctgttcgtgtacaagctggagcaggtgtctgagaagggcaaggcttacaccaactacttcggacggtgcaatgtggccgagcacgaaaagctgatcctgctggcccagctgaagcccgagaaggatagcgacgaagccgtgacatatagcctgggaaagtttgggcagagggccctggatttctacagcattcatgtgaccaaggagtccacccaccccgtgaagcccctggcccagatcgccggaaacagatacgcctccggacctgtgggaaaggccctgagcgacgcatgtatgggcacaatcgcctccttcctgtctaagtaccaggacatcatcatcgaacaccagaaggtggtgaagggcaaccagaagagactggagagcctgcgggagctggccggcaaggaaaacctggaataccctagcgtgaccctgccacctcagcctcacaccaaggagggcgttgatgcctacaacgaagtgatcgcccgggtgcgaatgtgggtgaacctgaacctgtggcagaagctgaagctaagcagagatgatgccaagcctctgctgagactgaagggattcccttcctttcctctggtcgagagacaggccaacgaagtggactggtgggacatggtgtgtaacgtgaagaagctgatcaacgagaaaaaggaggatggcaaggtgttttggcagaatctggctggctacaagagacaggaagccctgagaccatacctgagcagcgaggaagatcggaagaagggaaagaaattcgctcggtaccagctgggcgacctgctgctgcacctggaaaagaagcacggcgaggactggggaaaggtgtacgacgaggcctgggagcggattgacaagaaagtggaaggcctgagcaagcacatcaagctggaagaggaacggagaagcgaggacgcccagagcaaggccgccctgaccgactggctgcgggctaaggccagcttcgtgatcgagggcctgaaggaggccgacaaggacgagttctgcagatgcgagctgaagctgcagaagtggtacggggacctgcggggaaagcccttcgccatcgaagccgagaacagcatcctggacatcagcggcttcagcaagcagtacaactgtgccttcatctggcagaaggacggcgtgaagaagctgaacctgtacctgatcatcaactacttcaagggcggcaagctgcggttcaagaagatcaaacctgaagccttcgaagccaacagattctacaccgtgatcaacaaaaagagcggcgagatcgtgcccatggaggtgaacttcaacttcgacgaccccaacctgatcatcctgcctctggcctttggcaagagacagggcagagaattcatctggaacgacctgctgtccctggaaaccggcagcctgaagctggccaacggaagagtgatcgagaagacactgtacaacagaagaacccggcaggatgagcctgccctgttcgtggccctgaccttcgagcggcgggaggtcctggactcctccaatatcaaaccaatgaacctgatcggcgtggcaagaggcgaaaacatccccgccgtgatcgccctgaccgaccccgagggctgcccactgagccggtttaaggatagcctgggaaacccaacccacatcctgagaatcggcgagagctataaggagaagcagcggaccatccaggccaagaaggaggtggagcagcggagagccggcggctacagccggaagtacgccagcaaagccaagaatctggcagacgatatggtgagaaacaccgctagagatctgctgtactacgccgtgacccaggatgccatgctgatcttcgccaacctgagccggggcttcggccggcagggcaagcggaccttcatggccgagagacagtacacacggatggaggactggctgaccgccaagctggcctacgagggcctgagcaagacctacctgtccaagacactggcccagtacacctccaagacatgcagcaactgtgggtttaccatcaccagcgccgactacgacagggtgctggagaagctgaagaagacagcaacaggctggatgaccacaattaacggcaaggagctgaaggtggagggccagattacctactacaacagatacaagagacagaacgtagtcaaggacctgtccgtcgagctggatagactgagcgaagaatctgtgaacaacgacatctcctcctggacaaagggcagaagcggagaagctctgagcctcctgaagaaaagattctcccatagacccgtgcaggagaagttcgtgtgcctgaactgcggcttcgagacacacgcagccgagcaagccgccctgaacatcgccagatcctggctgttcctgcggagccaggagtacaagaaataccagacaaacaagacaaccggcaacaccgataagagagccttcgtcgagacctggcagtccttttaccggaagaagcttaaggaggtgtggaaacctgccgtgcggtctggcggatctggcggaggctccacaagcttcaaggagctggtggtgttcagggacgtggccgtggagttctgcagggaggagtgggagtgcctggaccccaggcagaggagcctgtacagggacgtgatgctggagacctacggcaacttcgtgagcctgggcctggccatcagcaagcccagcgtgatcagcctgctggagcagggcaaggagccctggatggtggagcaggccggctggtaccccgacctgctgagcgtgaacgagaccaccagccccaagaaaaagagaaaagtctaagctgccttctgcggggcttgccttctggccatgcccttcttctctcccttgcacctgtacctcttggtctttgaataaagcctgagtaggaaggctagcaaaaaaaaaaaaaaaaaaaaaaaaaaaaaaaaaaaaaaaaaaaaaaaaaaaaaaaaaaaaaaaaaaaaaaaaaaaaaaaa

SEQ ID NO: 3742 - RNA, 5419 nt, synthetic construct
  source 1..5419: mol_type = other RNA
aggaaataagagagaaaagaagagtaagaagaaatataagagccaccatggcccctaagaagaagcgtaaagtgagccgggtgaacggcagcggcagcggcggcggcatgaaccacgaccaggagttcgacccccctaaggtgtaccctcccgtccccgccgagaagagaaagcccatccgggtcctgagcctgttcgatggcatcgccaccggtctgctggtgctgaaggacctgggcatccaggtggataggtacattgcctccgaggtgtgcgaggactccatcaccgtgggaatggtgcgtcatcagggcaagatcatgtacgtgggcgacgtgcggagcgtgacacagaagcatatccaggagtggggccctttcgacctggtgatcggcggcagcccttgcaatgacctgagcatcgtgaacccagcccggaagggcctgtacgagggaaccggcagactgttcttcgagttttacagactgctgcacgacgcccggcctaaggaaggcgacgaccggcccttcttttggctgttcgagaatgtggtggccatgggagtcagcgacaagcgggatattagccggttcctggagagcaaccccgtgatgatcgatgccaaggaagtgagcgccgcccaccgggccagatacttctggggcaatctgcctggcatgaacagacccctggccagcaccgtgaacgacaagctggagctgcaggagtgcctggagcacggccggatcgccaagttcagcaaggtgagaaccatcaccacccgaagcaacagcatcaaacaaggcaaggaccagcactttcctgtgttcatgaacgagaaggaggacatcctgtggtgtaccgagatggagagagtgttcgggttcccagtccactacacagatgtcagcaacatgtctagactggccagacagagactgctgggaagaagctggtccgtccctgtgatcagacacctgttcgcccctctgaaggagtacttcgcctgcgtgagcagcggcaacagcaacgccaacagccggggccccagcttctctagcggcctggtgccactgtccctgagagggagccacatgggccccatggagatctacaaaaccgtgagcgcctggaagcggcagcctgtgcgcgtgctgagcctgtttcggaatatcgataaagtcctgaaaagcctgggattcctggagagcggctctggctccggcggtggcaccctgaagtacgtggaggatgtgacaaacgtggtcagacgggatgtggagaagtggggccccttcgatctggtgtacggcagcacccaacccctgggcagctcttgtgaccggtgccctggctggtacatgtttcagttccaccggatcctgcagtacgccctgccgagacaggagtcccagcggccattcttttggattttcatggacaacttgctgctgaccgaggatgaccaggaaactaccactcggttcctgcagaccgaagccgtgaccctgcaggacgtgagaggccgggactaccagaacgccatgcgggtgtggtccaacatccctggactgaaaagcaagcacgcacctctgacccctaaagaagaggagtacctgcaggcccaggtgcggagcagaagcaagctggacgcccctaaggtggatctgctggtgaagaattgcctcctgcccctgagagagtacttcaagtatttcagccagaatagtctgcccctgggcggcccaagcagcggcgcccctcctcccagcggcggcagcccagccggctccccaacctctaccgaggagggcacctctgagtccgccacccccgagagcggccctggcacctccaccgagcccagcgagggcagcgcacccggcagccctgccggcagccccacctccacagaggagggaaccagcaccgagcccagcgaaggcagcgccccaggcaccagcaccgagcctagtgagggcggctctggcggcggcagcgcccaggagattaaacggatcaacaagatcagaagaagacttgtgaaagacagcaacaccaagaaggccggcaagacaggccccatgaaaaccctgctggttagagtgatgacacccgatctgagagagcggctggaaaacctgagaaagaagcctgaaaatatcccccagcccatcagcaatacatctagagccaacctgaataagctgctgaccgattacaccgaaatgaagaaggcgatcctgcatgtgtactgggaagagttccagaaggaccctgtgggcctgatgagccgggtggcccagcctgccagcaagaagatcgatcagaacaagctgaaacctgagatggacgagaagggcaacctgaccaccgccggctttgcctgctctcagtgtggccagcccctgttcgtgtacaagctggagcaggtgtctgagaagggcaaggcttacaccaactacttcggacggtgcaatgtggccgagcacgaaaagctgatcctgctggcccagctgaagcccgagaaggatagcgacgaagccgtgacatatagcctgggaaagtttgggcagagggccctggatttctacagcattcatgtgaccaaggagtccacccaccccgtgaagcccctggcccagatcgccggaaacagatacgcctccggacctgtgggaaaggccctgagcgacgcatgtatgggcacaatcgcctccttcctgtctaagtaccaggacatcatcatcgaacaccagaaggtggtgaagggcaaccagaagagactggagagcctgcgggagctggccggcaaggaaaacctggaataccctagcgtgaccctgccacctcagcctcacaccaaggagggcgttgatgcctacaacgaagtgatcgcccgggtgcgaatgtgggtgaacctgaacctgtggcagaagctgaagctaagcagagatgatgccaagcctctgctgagactgaagggattcccttcctttcctctggtcgagagacaggccaacgaagtggactggtgggacatggtgtgtaacgtgaagaagctgatcaacgagaaaaaggaggatggcaaggtgttttggcagaatctggctggctacaagagacaggaagccctgagaccatacctgagcagcgaggaagatcggaagaagggaaagaaattcgctcggtaccagctgggcgacctgctgctgcacctggaaaagaagcacggcgaggactggggaaaggtgtacgacgaggcctgggagcggattgacaagaaagtggaaggcctgagcaagcacatcaagctggaagaggaacggagaagcgaggacgcccagagcaaggccgccctgaccgactggctgcgggctaaggccagcttcgtgatcgagggcctgaaggaggccgacaaggacgagttctgcagatgcgagctgaagctgcagaagtggtacggggacctgcggggaaagcccttcgccatcgaagccgagaacagcatcctggacatcagcggcttcagcaagcagtacaactgtgccttcatctggcagaaggacggcgtgaagaagctgaacctgtacctgatcatcaactacttcaagggcggcaagctgcggttcaagaagatcaaacctgaagccttcgaagccaacagattctacaccgtgatcaacaaaaagagcggcgagatcgtgcccatggaggtgaacttcaacttcgacgaccccaacctgatcatcctgcctctggcctttggcaagagacagggcagagaattcatctggaacgacctgctgtccctggaaaccggcagcctgaagctggccaacggaagagtgatcgagaagacactgtacaacagaagaacccggcaggatgagcctgccctgttcgtggccctgaccttcgagcggcgggaggtcctggactcctccaatatcaaaccaatgaacctgatcggcgtggcaagaggcgaaaacatccccgccgtgatcgccctgaccgaccccgagggctgcccactgagccggtttaaggatagcctgggaaacccaacccacatcctgagaatcggcgagagctataaggagaagcagcggaccatccaggccaagaaggaggtggagcagcggagagccggcggctacagccggaagtacgccagcaaagccaagaatctggcagacgatatggtgagaaacaccgctagagatctgctgtactacgccgtgacccaggatgccatgctgatcttcgccaacctgagccggggcttcggccggcagggcaagcggaccttcatggccgagagacagtacacacggatggaggactggctgaccgccaagctggcctacgagggcctgagcaagacctacctgtccaagacactggcccagtacacctccaagacatgcagcaactgtgggtttaccatcaccagcgccgactacgacagggtgctggagaagctgaagaagacagcaacaggctggatgaccacaattaacggcaaggagctgaaggtggagggccagattacctactacaacagatacaagagacagaacgtagtcaaggacctgtccgtcgagctggatagactgagcgaagaatctgtgaacaacgacatctcctcctggacaaagggcagaagcggagaagctctgagcctcctgaagaaaagattctcccatagacccgtgcaggagaagttcgtgtgcctgaactgcggcttcgagacacacgcagccgagcaagccgccctgaacatcgccagatcctggctgttcctgcggagccaggagtacaagaaataccagacaaacaagacaaccggcaacaccgataagagagccttcgtcgagacctggcagtccttttaccggaagaagcttaaggaggtgtggaaacctgccgtgcggtctggcggatctggcggaggctccacaagcgccgagaccagcagcagcggcctgctggaggagcagaagatgatgaagagccagggcctggtgagcttcaaggacgtggccgtggacttcacccaggaggagtggcagcagctggaccccagccagaggaccctgtacagggacgtgatgctggagaactacagccacctggtgagcatgggctaccccgtgagcaagcccgacgtgatcagcaagctggagcagggcgaggagccctggatcaccagccccaagaaaaagagaaaagtctaagctgccttctgcggggcttgccttctggccatgcccttcttctctcccttgcacctgtacctcttggtctttgaataaagcctgagtaggaaggctagcaaaaaaaaaaaaaaaaaaaaaaaaaaaaaaaaaaaaaaaaaaaaaaaaaaaaaaaaaaaaaaaaaaaaaaaaaaaaaaaa

SEQ ID NO: 3743 - RNA, 5419 nt, synthetic construct
  source 1..5419: mol_type = other RNA
aggaaataagagagaaaagaagagtaagaagaaatataagagccaccatggcccctaagaagaagcgtaaagtgagccgggtgaacggcagcggcagcggcggcggcatgaaccacgaccaggagttcgacccccctaaggtgtaccctcccgtccccgccgagaagagaaagcccatccgggtcctgagcctgttcgatggcatcgccaccggtctgctggtgctgaaggacctgggcatccaggtggataggtacattgcctccgaggtgtgcgaggactccatcaccgtgggaatggtgcgtcatcagggcaagatcatgtacgtgggcgacgtgcggagcgtgacacagaagcatatccaggagtggggccctttcgacctggtgatcggcggcagcccttgcaatgacctgagcatcgtgaacccagcccggaagggcctgtacgagggaaccggcagactgttcttcgagttttacagactgctgcacgacgcccggcctaaggaaggcgacgaccggcccttcttttggctgttcgagaatgtggtggccatgggagtcagcgacaagcgggatattagccggttcctggagagcaaccccgtgatgatcgatgccaaggaagtgagcgccgcccaccgggccagatacttctggggcaatctgcctggcatgaacagacccctggccagcaccgtgaacgacaagctggagctgcaggagtgcctggagcacggccggatcgccaagttcagcaaggtgagaaccatcaccacccgaagcaacagcatcaaacaaggcaaggaccagcactttcctgtgttcatgaacgagaaggaggacatcctgtggtgtaccgagatggagagagtgttcgggttcccagtccactacacagatgtcagcaacatgtctagactggccagacagagactgctgggaagaagctggtccgtccctgtgatcagacacctgttcgcccctctgaaggagtacttcgcctgcgtgagcagcggcaacagcaacgccaacagccggggccccagcttctctagcggcctggtgccactgtccctgagagggagccacatgggccccatggagatctacaaaaccgtgagcgcctggaagcggcagcctgtgcgcgtgctgagcctgtttcggaatatcgataaagtcctgaaaagcctgggattcctggagagcggctctggctccggcggtggcaccctgaagtacgtggaggatgtgacaaacgtggtcagacgggatgtggagaagtggggccccttcgatctggtgtacggcagcacccaacccctgggcagctcttgtgaccggtgccctggctggtacatgtttcagttccaccggatcctgcagtacgccctgccgagacaggagtcccagcggccattcttttggattttcatggacaacttgctgctgaccgaggatgaccaggaaactaccactcggttcctgcagaccgaagccgtgaccctgcaggacgtgagaggccgggactaccagaacgccatgcgggtgtggtccaacatccctggactgaaaagcaagcacgcacctctgacccctaaagaagaggagtacctgcaggcccaggtgcggagcagaagcaagctggacgcccctaaggtggatctgctggtgaagaattgcctcctgcccctgagagagtacttcaagtatttcagccagaatagtctgcccctgggcggcccaagcagcggcgcccctcctcccagcggcggcagcccagccggctccccaacctctaccgaggagggcacctctgagtccgccacccccgagagcggccctggcacctccaccgagcccagcgagggcagcgcacccggcagccctgccggcagccccacctccacagaggagggaaccagcaccgagcccagcgaaggcagcgccccaggcaccagcaccgagcctagtgagggcggctctggcggcggcagcgcccaggagattaaacggatcaacaagatcagaagaagacttgtgaaagacagcaacaccaagaaggccggcaagacaggccccatgaaaaccctgctggttagagtgatgacacccgatctgagagagcggctggaaaacctgagaaagaagcctgaaaatatcccccagcccatcagcaatacatctagagccaacctgaataagctgctgaccgattacaccgaaatgaagaaggcgatcctgcatgtgtactgggaagagttccagaaggaccctgtgggcctgatgagccgggtggcccagcctgccagcaagaagatcgatcagaacaagctgaaacctgagatggacgagaagggcaacctgaccaccgccggctttgcctgctctcagtgtggccagcccctgttcgtgtacaagctggagcaggtgtctgagaagggcaaggcttacaccaactacttcggacggtgcaatgtggccgagcacgaaaagctgatcctgctggcccagctgaagcccgagaaggatagcgacgaagccgtgacatatagcctgggaaagtttgggcagagggccctggatttctacagcattcatgtgaccaaggagtccacccaccccgtgaagcccctggcccagatcgccggaaacagatacgcctccggacctgtgggaaaggccctgagcgacgcatgtatgggcacaatcgcctccttcctgtctaagtaccaggacatcatcatcgaacaccagaaggtggtgaagggcaaccagaagagactggagagcctgcgggagctggccggcaaggaaaacctggaataccctagcgtgaccctgccacctcagcctcacaccaaggagggcgttgatgcctacaacgaagtgatcgcccgggtgcgaatgtgggtgaacctgaacctgtggcagaagctgaagctaagcagagatgatgccaagcctctgctgagactgaagggattcccttcctttcctctggtcgagagacaggccaacgaagtggactggtgggacatggtgtgtaacgtgaagaagctgatcaacgagaaaaaggaggatggcaaggtgttttggcagaatctggctggctacaagagacaggaagccctgagaccatacctgagcagcgaggaagatcggaagaagggaaagaaattcgctcggtaccagctgggcgacctgctgctgcacctggaaaagaagcacggcgaggactggggaaaggtgtacgacgaggcctgggagcggattgacaagaaagtggaaggcctgagcaagcacatcaagctggaagaggaacggagaagcgaggacgcccagagcaaggccgccctgaccgactggctgcgggctaaggccagcttcgtgatcgagggcctgaaggaggccgacaaggacgagttctgcagatgcgagctgaagctgcagaagtggtacggggacctgcggggaaagcccttcgccatcgaagccgagaacagcatcctggacatcagcggcttcagcaagcagtacaactgtgccttcatctggcagaaggacggcgtgaagaagctgaacctgtacctgatcatcaactacttcaagggcggcaagctgcggttcaagaagatcaaacctgaagccttcgaagccaacagattctacaccgtgatcaacaaaaagagcggcgagatcgtgcccatggaggtgaacttcaacttcgacgaccccaacctgatcatcctgcctctggcctttggcaagagacagggcagagaattcatctggaacgacctgctgtccctggaaaccggcagcctgaagctggccaacggaagagtgatcgagaagacactgtacaacagaagaacccggcaggatgagcctgccctgttcgtggccctgaccttcgagcggcgggaggtcctggactcctccaatatcaaaccaatgaacctgatcggcgtggcaagaggcgaaaacatccccgccgtgatcgccctgaccgaccccgagggctgcccactgagccggtttaaggatagcctgggaaacccaacccacatcctgagaatcggcgagagctataaggagaagcagcggaccatccaggccaagaaggaggtggagcagcggagagccggcggctacagccggaagtacgccagcaaagccaagaatctggcagacgatatggtgagaaacaccgctagagatctgctgtactacgccgtgacccaggatgccatgctgatcttcgccaacctgagccggggcttcggccggcagggcaagcggaccttcatggccgagagacagtacacacggatggaggactggctgaccgccaagctggcctacgagggcctgagcaagacctacctgtccaagacactggcccagtacacctccaagacatgcagcaactgtgggtttaccatcaccagcgccgactacgacagggtgctggagaagctgaagaagacagcaacaggctggatgaccacaattaacggcaaggagctgaaggtggagggccagattacctactacaacagatacaagagacagaacgtagtcaaggacctgtccgtcgagctggatagactgagcgaagaatctgtgaacaacgacatctcctcctggacaaagggcagaagcggagaagctctgagcctcctgaagaaaagattctcccatagacccgtgcaggagaagttcgtgtgcctgaactgcggcttcgagacacacgcagccgagcaagccgccctgaacatcgccagatcctggctgttcctgcggagccaggagtacaagaaataccagacaaacaagacaaccggcaacaccgataagagagccttcgtcgagacctggcagtccttttaccggaagaagcttaaggaggtgtggaaacctgccgtgcggtctggcggatctggcggaggctccacaagcttccaggacctgctgagcttcaccgacgtggccatcgacttcagcgccgacgagtgcgagtgcctggagcccgcccagtggaacctgtacaaggaggtgatgctggagaactacagcaacctggtgttcctgggcctggccttcagcaagccctacctggtgaccttcctggagcagagcagcgacccctggagcatgaagaggaaggccagcgccgccatccacctgggcctgaagccccacaccagccccaagaaaaagagaaaagtctaagctgccttctgcggggcttgccttctggccatgcccttcttctctcccttgcacctgtacctcttggtctttgaataaagcctgagtaggaaggctagcaaaaaaaaaaaaaaaaaaaaaaaaaaaaaaaaaaaaaaaaaaaaaaaaaaaaaaaaaaaaaaaaaaaaaaaaaaaaaaaa

SEQ ID NO: 3744 - RNA, 5419 nt, synthetic construct
  source 1..5419: mol_type = other RNA
aggaaataagagagaaaagaagagtaagaagaaatataagagccaccatggcccctaagaagaagcgtaaagtgagccgggtgaacggcagcggcagcggcggcggcatgaaccacgaccaggagttcgacccccctaaggtgtaccctcccgtccccgccgagaagagaaagcccatccgggtcctgagcctgttcgatggcatcgccaccggtctgctggtgctgaaggacctgggcatccaggtggataggtacattgcctccgaggtgtgcgaggactccatcaccgtgggaatggtgcgtcatcagggcaagatcatgtacgtgggcgacgtgcggagcgtgacacagaagcatatccaggagtggggccctttcgacctggtgatcggcggcagcccttgcaatgacctgagcatcgtgaacccagcccggaagggcctgtacgagggaaccggcagactgttcttcgagttttacagactgctgcacgacgcccggcctaaggaaggcgacgaccggcccttcttttggctgttcgagaatgtggtggccatgggagtcagcgacaagcgggatattagccggttcctggagagcaaccccgtgatgatcgatgccaaggaagtgagcgccgcccaccgggccagatacttctggggcaatctgcctggcatgaacagacccctggccagcaccgtgaacgacaagctggagctgcaggagtgcctggagcacggccggatcgccaagttcagcaaggtgagaaccatcaccacccgaagcaacagcatcaaacaaggcaaggaccagcactttcctgtgttcatgaacgagaaggaggacatcctgtggtgtaccgagatggagagagtgttcgggttcccagtccactacacagatgtcagcaacatgtctagactggccagacagagactgctgggaagaagctggtccgtccctgtgatcagacacctgttcgcccctctgaaggagtacttcgcctgcgtgagcagcggcaacagcaacgccaacagccggggccccagcttctctagcggcctggtgccactgtccctgagagggagccacatgggccccatggagatctacaaaaccgtgagcgcctggaagcggcagcctgtgcgcgtgctgagcctgtttcggaatatcgataaagtcctgaaaagcctgggattcctggagagcggctctggctccggcggtggcaccctgaagtacgtggaggatgtgacaaacgtggtcagacgggatgtggagaagtggggccccttcgatctggtgtacggcagcacccaacccctgggcagctcttgtgaccggtgccctggctggtacatgtttcagttccaccggatcctgcagtacgccctgccgagacaggagtcccagcggccattcttttggattttcatggacaacttgctgctgaccgaggatgaccaggaaactaccactcggttcctgcagaccgaagccgtgaccctgcaggacgtgagaggccgggactaccagaacgccatgcgggtgtggtccaacatccctggactgaaaagcaagcacgcacctctgacccctaaagaagaggagtacctgcaggcccaggtgcggagcagaagcaagctggacgcccctaaggtggatctgctggtgaagaattgcctcctgcccctgagagagtacttcaagtatttcagccagaatagtctgcccctgggcggcccaagcagcggcgcccctcctcccagcggcggcagcccagccggctccccaacctctaccgaggagggcacctctgagtccgccacccccgagagcggccctggcacctccaccgagcccagcgagggcagcgcacccggcagccctgccggcagccccacctccacagaggagggaaccagcaccgagcccagcgaaggcagcgccccaggcaccagcaccgagcctagtgagggcggctctggcggcggcagcgcccaggagattaaacggatcaacaagatcagaagaagacttgtgaaagacagcaacaccaagaaggccggcaagacaggccccatgaaaaccctgctggttagagtgatgacacccgatctgagagagcggctggaaaacctgagaaagaagcctgaaaatatcccccagcccatcagcaatacatctagagccaacctgaataagctgctgaccgattacaccgaaatgaagaaggcgatcctgcatgtgtactgggaagagttccagaaggaccctgtgggcctgatgagccgggtggcccagcctgccagcaagaagatcgatcagaacaagctgaaacctgagatggacgagaagggcaacctgaccaccgccggctttgcctgctctcagtgtggccagcccctgttcgtgtacaagctggagcaggtgtctgagaagggcaaggcttacaccaactacttcggacggtgcaatgtggccgagcacgaaaagctgatcctgctggcccagctgaagcccgagaaggatagcgacgaagccgtgacatatagcctgggaaagtttgggcagagggccctggatttctacagcattcatgtgaccaaggagtccacccaccccgtgaagcccctggcccagatcgccggaaacagatacgcctccggacctgtgggaaaggccctgagcgacgcatgtatgggcacaatcgcctccttcctgtctaagtaccaggacatcatcatcgaacaccagaaggtggtgaagggcaaccagaagagactggagagcctgcgggagctggccggcaaggaaaacctggaataccctagcgtgaccctgccacctcagcctcacaccaaggagggcgttgatgcctacaacgaagtgatcgcccgggtgcgaatgtgggtgaacctgaacctgtggcagaagctgaagctaagcagagatgatgccaagcctctgctgagactgaagggattcccttcctttcctctggtcgagagacaggccaacgaagtggactggtgggacatggtgtgtaacgtgaagaagctgatcaacgagaaaaaggaggatggcaaggtgttttggcagaatctggctggctacaagagacaggaagccctgagaccatacctgagcagcgaggaagatcggaagaagggaaagaaattcgctcggtaccagctgggcgacctgctgctgcacctggaaaagaagcacggcgaggactggggaaaggtgtacgacgaggcctgggagcggattgacaagaaagtggaaggcctgagcaagcacatcaagctggaagaggaacggagaagcgaggacgcccagagcaaggccgccctgaccgactggctgcgggctaaggccagcttcgtgatcgagggcctgaaggaggccgacaaggacgagttctgcagatgcgagctgaagctgcagaagtggtacggggacctgcggggaaagcccttcgccatcgaagccgagaacagcatcctggacatcagcggcttcagcaagcagtacaactgtgccttcatctggcagaaggacggcgtgaagaagctgaacctgtacctgatcatcaactacttcaagggcggcaagctgcggttcaagaagatcaaacctgaagccttcgaagccaacagattctacaccgtgatcaacaaaaagagcggcgagatcgtgcccatggaggtgaacttcaacttcgacgaccccaacctgatcatcctgcctctggcctttggcaagagacagggcagagaattcatctggaacgacctgctgtccctggaaaccggcagcctgaagctggccaacggaagagtgatcgagaagacactgtacaacagaagaacccggcaggatgagcctgccctgttcgtggccctgaccttcgagcggcgggaggtcctggactcctccaatatcaaaccaatgaacctgatcggcgtggcaagaggcgaaaacatccccgccgtgatcgccctgaccgaccccgagggctgcccactgagccggtttaaggatagcctgggaaacccaacccacatcctgagaatcggcgagagctataaggagaagcagcggaccatccaggccaagaaggaggtggagcagcggagagccggcggctacagccggaagtacgccagcaaagccaagaatctggcagacgatatggtgagaaacaccgctagagatctgctgtactacgccgtgacccaggatgccatgctgatcttcgccaacctgagccggggcttcggccggcagggcaagcggaccttcatggccgagagacagtacacacggatggaggactggctgaccgccaagctggcctacgagggcctgagcaagacctacctgtccaagacactggcccagtacacctccaagacatgcagcaactgtgggtttaccatcaccagcgccgactacgacagggtgctggagaagctgaagaagacagcaacaggctggatgaccacaattaacggcaaggagctgaaggtggagggccagattacctactacaacagatacaagagacagaacgtagtcaaggacctgtccgtcgagctggatagactgagcgaagaatctgtgaacaacgacatctcctcctggacaaagggcagaagcggagaagctctgagcctcctgaagaaaagattctcccatagacccgtgcaggagaagttcgtgtgcctgaactgcggcttcgagacacacgcagccgagcaagccgccctgaacatcgccagatcctggctgttcctgcggagccaggagtacaagaaataccagacaaacaagacaaccggcaacaccgataagagagccttcgtcgagacctggcagtccttttaccggaagaagcttaaggaggtgtggaaacctgccgtgcggtctggcggatctggcggaggctccacaagccccaaggtgaccgtgagcttcgaggacgtgagcgtgtacttcaccaagaccgagtggaagctgctggacctgaagcagaggaacctgtacaagcaggtgatgctggagaactacagccacctggtgagcgtgggcttcgccttcagcaagcccaacctggtgagccagctggagaggggcgagaagccctggatcagggacgacaggatggagagcgccgccaggagcagggccggcaacaggaccagccccaagaaaaagagaaaagtctaagctgccttctgcggggcttgccttctggccatgcccttcttctctcccttgcacctgtacctcttggtctttgaataaagcctgagtaggaaggctagcaaaaaaaaaaaaaaaaaaaaaaaaaaaaaaaaaaaaaaaaaaaaaaaaaaaaaaaaaaaaaaaaaaaaaaaaaaaaaaaa

SEQ ID NO: 3745 - RNA, 5419 nt, synthetic construct
  source 1..5419: mol_type = other RNA
aggaaataagagagaaaagaagagtaagaagaaatataagagccaccatggcccctaagaagaagcgtaaagtgagccgggtgaacggcagcggcagcggcggcggcatgaaccacgaccaggagttcgacccccctaaggtgtaccctcccgtccccgccgagaagagaaagcccatccgggtcctgagcctgttcgatggcatcgccaccggtctgctggtgctgaaggacctgggcatccaggtggataggtacattgcctccgaggtgtgcgaggactccatcaccgtgggaatggtgcgtcatcagggcaagatcatgtacgtgggcgacgtgcggagcgtgacacagaagcatatccaggagtggggccctttcgacctggtgatcggcggcagcccttgcaatgacctgagcatcgtgaacccagcccggaagggcctgtacgagggaaccggcagactgttcttcgagttttacagactgctgcacgacgcccggcctaaggaaggcgacgaccggcccttcttttggctgttcgagaatgtggtggccatgggagtcagcgacaagcgggatattagccggttcctggagagcaaccccgtgatgatcgatgccaaggaagtgagcgccgcccaccgggccagatacttctggggcaatctgcctggcatgaacagacccctggccagcaccgtgaacgacaagctggagctgcaggagtgcctggagcacggccggatcgccaagttcagcaaggtgagaaccatcaccacccgaagcaacagcatcaaacaaggcaaggaccagcactttcctgtgttcatgaacgagaaggaggacatcctgtggtgtaccgagatggagagagtgttcgggttcccagtccactacacagatgtcagcaacatgtctagactggccagacagagactgctgggaagaagctggtccgtccctgtgatcagacacctgttcgcccctctgaaggagtacttcgcctgcgtgagcagcggcaacagcaacgccaacagccggggccccagcttctctagcggcctggtgccactgtccctgagagggagccacatgggccccatggagatctacaaaaccgtgagcgcctggaagcggcagcctgtgcgcgtgctgagcctgtttcggaatatcgataaagtcctgaaaagcctgggattcctggagagcggctctggctccggcggtggcaccctgaagtacgtggaggatgtgacaaacgtggtcagacgggatgtggagaagtggggccccttcgatctggtgtacggcagcacccaacccctgggcagctcttgtgaccggtgccctggctggtacatgtttcagttccaccggatcctgcagtacgccctgccgagacaggagtcccagcggccattcttttggattttcatggacaacttgctgctgaccgaggatgaccaggaaactaccactcggttcctgcagaccgaagccgtgaccctgcaggacgtgagaggccgggactaccagaacgccatgcgggtgtggtccaacatccctggactgaaaagcaagcacgcacctctgacccctaaagaagaggagtacctgcaggcccaggtgcggagcagaagcaagctggacgcccctaaggtggatctgctggtgaagaattgcctcctgcccctgagagagtacttcaagtatttcagccagaatagtctgcccctgggcggcccaagcagcggcgcccctcctcccagcggcggcagcccagccggctccccaacctctaccgaggagggcacctctgagtccgccacccccgagagcggccctggcacctccaccgagcccagcgagggcagcgcacccggcagccctgccggcagccccacctccacagaggagggaaccagcaccgagcccagcgaaggcagcgccccaggcaccagcaccgagcctagtgagggcggctctggcggcggcagcgcccaggagattaaacggatcaacaagatcagaagaagacttgtgaaagacagcaacaccaagaaggccggcaagacaggccccatgaaaaccctgctggttagagtgatgacacccgatctgagagagcggctggaaaacctgagaaagaagcctgaaaatatcccccagcccatcagcaatacatctagagccaacctgaataagctgctgaccgattacaccgaaatgaagaaggcgatcctgcatgtgtactgggaagagttccagaaggaccctgtgggcctgatgagccgggtggcccagcctgccagcaagaagatcgatcagaacaagctgaaacctgagatggacgagaagggcaacctgaccaccgccggctttgcctgctctcagtgtggccagcccctgttcgtgtacaagctggagcaggtgtctgagaagggcaaggcttacaccaactacttcggacggtgcaatgtggccgagcacgaaaagctgatcctgctggcccagctgaagcccgagaaggatagcgacgaagccgtgacatatagcctgggaaagtttgggcagagggccctggatttctacagcattcatgtgaccaaggagtccacccaccccgtgaagcccctggcccagatcgccggaaacagatacgcctccggacctgtgggaaaggccctgagcgacgcatgtatgggcacaatcgcctccttcctgtctaagtaccaggacatcatcatcgaacaccagaaggtggtgaagggcaaccagaagagactggagagcctgcgggagctggccggcaaggaaaacctggaataccctagcgtgaccctgccacctcagcctcacaccaaggagggcgttgatgcctacaacgaagtgatcgcccgggtgcgaatgtgggtgaacctgaacctgtggcagaagctgaagctaagcagagatgatgccaagcctctgctgagactgaagggattcccttcctttcctctggtcgagagacaggccaacgaagtggactggtgggacatggtgtgtaacgtgaagaagctgatcaacgagaaaaaggaggatggcaaggtgttttggcagaatctggctggctacaagagacaggaagccctgagaccatacctgagcagcgaggaagatcggaagaagggaaagaaattcgctcggtaccagctgggcgacctgctgctgcacctggaaaagaagcacggcgaggactggggaaaggtgtacgacgaggcctgggagcggattgacaagaaagtggaaggcctgagcaagcacatcaagctggaagaggaacggagaagcgaggacgcccagagcaaggccgccctgaccgactggctgcgggctaaggccagcttcgtgatcgagggcctgaaggaggccgacaaggacgagttctgcagatgcgagctgaagctgcagaagtggtacggggacctgcggggaaagcccttcgccatcgaagccgagaacagcatcctggacatcagcggcttcagcaagcagtacaactgtgccttcatctggcagaaggacggcgtgaagaagctgaacctgtacctgatcatcaactacttcaagggcggcaagctgcggttcaagaagatcaaacctgaagccttcgaagccaacagattctacaccgtgatcaacaaaaagagcggcgagatcgtgcccatggaggtgaacttcaacttcgacgaccccaacctgatcatcctgcctctggcctttggcaagagacagggcagagaattcatctggaacgacctgctgtccctggaaaccggcagcctgaagctggccaacggaagagtgatcgagaagacactgtacaacagaagaacccggcaggatgagcctgccctgttcgtggccctgaccttcgagcggcgggaggtcctggactcctccaatatcaaaccaatgaacctgatcggcgtggcaagaggcgaaaacatccccgccgtgatcgccctgaccgaccccgagggctgcccactgagccggtttaaggatagcctgggaaacccaacccacatcctgagaatcggcgagagctataaggagaagcagcggaccatccaggccaagaaggaggtggagcagcggagagccggcggctacagccggaagtacgccagcaaagccaagaatctggcagacgatatggtgagaaacaccgctagagatctgctgtactacgccgtgacccaggatgccatgctgatcttcgccaacctgagccggggcttcggccggcagggcaagcggaccttcatggccgagagacagtacacacggatggaggactggctgaccgccaagctggcctacgagggcctgagcaagacctacctgtccaagacactggcccagtacacctccaagacatgcagcaactgtgggtttaccatcaccagcgccgactacgacagggtgctggagaagctgaagaagacagcaacaggctggatgaccacaattaacggcaaggagctgaaggtggagggccagattacctactacaacagatacaagagacagaacgtagtcaaggacctgtccgtcgagctggatagactgagcgaagaatctgtgaacaacgacatctcctcctggacaaagggcagaagcggagaagctctgagcctcctgaagaaaagattctcccatagacccgtgcaggagaagttcgtgtgcctgaactgcggcttcgagacacacgcagccgagcaagccgccctgaacatcgccagatcctggctgttcctgcggagccaggagtacaagaaataccagacaaacaagacaaccggcaacaccgataagagagccttcgtcgagacctggcagtccttttaccggaagaagcttaaggaggtgtggaaacctgccgtgcggtctggcggatctggcggaggctccacaagcttccaccagctggtgaccttcgaggacgtggccgtgtacctgagcaaggaggagtggaagaggctgaacctggcccagagggagctgtacagggacgtgatgctggagaactacgagaacctgctgagcctgggcttccccgtgagcaagcccgacatcatcagccagctggagcagaggaaggaggcctggatcgtgcagggccccgagaagaggaagttcagccagaacgcccacagggacaccagccccaagaaaaagagaaaagtctaagctgccttctgcggggcttgccttctggccatgcccttcttctctcccttgcacctgtacctcttggtctttgaataaagcctgagtaggaaggctagcaaaaaaaaaaaaaaaaaaaaaaaaaaaaaaaaaaaaaaaaaaaaaaaaaaaaaaaaaaaaaaaaaaaaaaaaaaaaaaaa

SEQ ID NO: 3746 - RNA, 5419 nt, synthetic construct
  source 1..5419: mol_type = other RNA
aggaaataagagagaaaagaagagtaagaagaaatataagagccaccatggcccctaagaagaagcgtaaagtgagccgggtgaacggcagcggcagcggcggcggcatgaaccacgaccaggagttcgacccccctaaggtgtaccctcccgtccccgccgagaagagaaagcccatccgggtcctgagcctgttcgatggcatcgccaccggtctgctggtgctgaaggacctgggcatccaggtggataggtacattgcctccgaggtgtgcgaggactccatcaccgtgggaatggtgcgtcatcagggcaagatcatgtacgtgggcgacgtgcggagcgtgacacagaagcatatccaggagtggggccctttcgacctggtgatcggcggcagcccttgcaatgacctgagcatcgtgaacccagcccggaagggcctgtacgagggaaccggcagactgttcttcgagttttacagactgctgcacgacgcccggcctaaggaaggcgacgaccggcccttcttttggctgttcgagaatgtggtggccatgggagtcagcgacaagcgggatattagccggttcctggagagcaaccccgtgatgatcgatgccaaggaagtgagcgccgcccaccgggccagatacttctggggcaatctgcctggcatgaacagacccctggccagcaccgtgaacgacaagctggagctgcaggagtgcctggagcacggccggatcgccaagttcagcaaggtgagaaccatcaccacccgaagcaacagcatcaaacaaggcaaggaccagcactttcctgtgttcatgaacgagaaggaggacatcctgtggtgtaccgagatggagagagtgttcgggttcccagtccactacacagatgtcagcaacatgtctagactggccagacagagactgctgggaagaagctggtccgtccctgtgatcagacacctgttcgcccctctgaaggagtacttcgcctgcgtgagcagcggcaacagcaacgccaacagccggggccccagcttctctagcggcctggtgccactgtccctgagagggagccacatgggccccatggagatctacaaaaccgtgagcgcctggaagcggcagcctgtgcgcgtgctgagcctgtttcggaatatcgataaagtcctgaaaagcctgggattcctggagagcggctctggctccggcggtggcaccctgaagtacgtggaggatgtgacaaacgtggtcagacgggatgtggagaagtggggccccttcgatctggtgtacggcagcacccaacccctgggcagctcttgtgaccggtgccctggctggtacatgtttcagttccaccggatcctgcagtacgccctgccgagacaggagtcccagcggccattcttttggattttcatggacaacttgctgctgaccgaggatgaccaggaaactaccactcggttcctgcagaccgaagccgtgaccctgcaggacgtgagaggccgggactaccagaacgccatgcgggtgtggtccaacatccctggactgaaaagcaagcacgcacctctgacccctaaagaagaggagtacctgcaggcccaggtgcggagcagaagcaagctggacgcccctaaggtggatctgctggtgaagaattgcctcctgcccctgagagagtacttcaagtatttcagccagaatagtctgcccctgggcggcccaagcagcggcgcccctcctcccagcggcggcagcccagccggctccccaacctctaccgaggagggcacctctgagtccgccacccccgagagcggccctggcacctccaccgagcccagcgagggcagcgcacccggcagccctgccggcagccccacctccacagaggagggaaccagcaccgagcccagcgaaggcagcgccccaggcaccagcaccgagcctagtgagggcggctctggcggcggcagcgcccaggagattaaacggatcaacaagatcagaagaagacttgtgaaagacagcaacaccaagaaggccggcaagacaggccccatgaaaaccctgctggttagagtgatgacacccgatctgagagagcggctggaaaacctgagaaagaagcctgaaaatatcccccagcccatcagcaatacatctagagccaacctgaataagctgctgaccgattacaccgaaatgaagaaggcgatcctgcatgtgtactgggaagagttccagaaggaccctgtgggcctgatgagccgggtggcccagcctgccagcaagaagatcgatcagaacaagctgaaacctgagatggacgagaagggcaacctgaccaccgccggctttgcctgctctcagtgtggccagcccctgttcgtgtacaagctggagcaggtgtctgagaagggcaaggcttacaccaactacttcggacggtgcaatgtggccgagcacgaaaagctgatcctgctggcccagctgaagcccgagaaggatagcgacgaagccgtgacatatagcctgggaaagtttgggcagagggccctggatttctacagcattcatgtgaccaaggagtccacccaccccgtgaagcccctggcccagatcgccggaaacagatacgcctccggacctgtgggaaaggccctgagcgacgcatgtatgggcacaatcgcctccttcctgtctaagtaccaggacatcatcatcgaacaccagaaggtggtgaagggcaaccagaagagactggagagcctgcgggagctggccggcaaggaaaacctggaataccctagcgtgaccctgccacctcagcctcacaccaaggagggcgttgatgcctacaacgaagtgatcgcccgggtgcgaatgtgggtgaacctgaacctgtggcagaagctgaagctaagcagagatgatgccaagcctctgctgagactgaagggattcccttcctttcctctggtcgagagacaggccaacgaagtggactggtgggacatggtgtgtaacgtgaagaagctgatcaacgagaaaaaggaggatggcaaggtgttttggcagaatctggctggctacaagagacaggaagccctgagaccatacctgagcagcgaggaagatcggaagaagggaaagaaattcgctcggtaccagctgggcgacctgctgctgcacctggaaaagaagcacggcgaggactggggaaaggtgtacgacgaggcctgggagcggattgacaagaaagtggaaggcctgagcaagcacatcaagctggaagaggaacggagaagcgaggacgcccagagcaaggccgccctgaccgactggctgcgggctaaggccagcttcgtgatcgagggcctgaaggaggccgacaaggacgagttctgcagatgcgagctgaagctgcagaagtggtacggggacctgcggggaaagcccttcgccatcgaagccgagaacagcatcctggacatcagcggcttcagcaagcagtacaactgtgccttcatctggcagaaggacggcgtgaagaagctgaacctgtacctgatcatcaactacttcaagggcggcaagctgcggttcaagaagatcaaacctgaagccttcgaagccaacagattctacaccgtgatcaacaaaaagagcggcgagatcgtgcccatggaggtgaacttcaacttcgacgaccccaacctgatcatcctgcctctggcctttggcaagagacagggcagagaattcatctggaacgacctgctgtccctggaaaccggcagcctgaagctggccaacggaagagtgatcgagaagacactgtacaacagaagaacccggcaggatgagcctgccctgttcgtggccctgaccttcgagcggcgggaggtcctggactcctccaatatcaaaccaatgaacctgatcggcgtggcaagaggcgaaaacatccccgccgtgatcgccctgaccgaccccgagggctgcccactgagccggtttaaggatagcctgggaaacccaacccacatcctgagaatcggcgagagctataaggagaagcagcggaccatccaggccaagaaggaggtggagcagcggagagccggcggctacagccggaagtacgccagcaaagccaagaatctggcagacgatatggtgagaaacaccgctagagatctgctgtactacgccgtgacccaggatgccatgctgatcttcgccaacctgagccggggcttcggccggcagggcaagcggaccttcatggccgagagacagtacacacggatggaggactggctgaccgccaagctggcctacgagggcctgagcaagacctacctgtccaagacactggcccagtacacctccaagacatgcagcaactgtgggtttaccatcaccagcgccgactacgacagggtgctggagaagctgaagaagacagcaacaggctggatgaccacaattaacggcaaggagctgaaggtggagggccagattacctactacaacagatacaagagacagaacgtagtcaaggacctgtccgtcgagctggatagactgagcgaagaatctgtgaacaacgacatctcctcctggacaaagggcagaagcggagaagctctgagcctcctgaagaaaagattctcccatagacccgtgcaggagaagttcgtgtgcctgaactgcggcttcgagacacacgcagccgagcaagccgccctgaacatcgccagatcctggctgttcctgcggagccaggagtacaagaaataccagacaaacaagacaaccggcaacaccgataagagagccttcgtcgagacctggcagtccttttaccggaagaagcttaaggaggtgtggaaacctgccgtgcggtctggcggatctggcggaggctccacaagcgccagggccagcctgagcttcgaggacgtggccgtgggcttcagctgggaggagtggcagctgctggcccccagccagaaggacctgtacagggacgtgatgctggagaactacaggaacctggtgagcgtgggctaccaggccagcaagctggacagcctgttccagagcgagcagggcggccccccctggaccgtggagggcgccgcccagagccagacctgccccgaggagatctgggagaccagccccaagaaaaagagaaaagtctaagctgccttctgcggggcttgccttctggccatgcccttcttctctcccttgcacctgtacctcttggtctttgaataaagcctgagtaggaaggctagcaaaaaaaaaaaaaaaaaaaaaaaaaaaaaaaaaaaaaaaaaaaaaaaaaaaaaaaaaaaaaaaaaaaaaaaaaaaaaaaa

SEQ ID NO: 3747 - RNA, 5416 nt, synthetic construct
  source 1..5416: mol_type = other RNA
aggaaataagagagaaaagaagagtaagaagaaatataagagccaccatggcccctaagaagaagcgtaaagtgagccgggtgaacggcagcggcagcggcggcggcatgaaccacgaccaggagttcgacccccctaaggtgtaccctcccgtccccgccgagaagagaaagcccatccgggtcctgagcctgttcgatggcatcgccaccggtctgctggtgctgaaggacctgggcatccaggtggataggtacattgcctccgaggtgtgcgaggactccatcaccgtgggaatggtgcgtcatcagggcaagatcatgtacgtgggcgacgtgcggagcgtgacacagaagcatatccaggagtggggccctttcgacctggtgatcggcggcagcccttgcaatgacctgagcatcgtgaacccagcccggaagggcctgtacgagggaaccggcagactgttcttcgagttttacagactgctgcacgacgcccggcctaaggaaggcgacgaccggcccttcttttggctgttcgagaatgtggtggccatgggagtcagcgacaagcgggatattagccggttcctggagagcaaccccgtgatgatcgatgccaaggaagtgagcgccgcccaccgggccagatacttctggggcaatctgcctggcatgaacagacccctggccagcaccgtgaacgacaagctggagctgcaggagtgcctggagcacggccggatcgccaagttcagcaaggtgagaaccatcaccacccgaagcaacagcatcaaacaaggcaaggaccagcactttcctgtgttcatgaacgagaaggaggacatcctgtggtgtaccgagatggagagagtgttcgggttcccagtccactacacagatgtcagcaacatgtctagactggccagacagagactgctgggaagaagctggtccgtccctgtgatcagacacctgttcgcccctctgaaggagtacttcgcctgcgtgagcagcggcaacagcaacgccaacagccggggccccagcttctctagcggcctggtgccactgtccctgagagggagccacatgggccccatggagatctacaaaaccgtgagcgcctggaagcggcagcctgtgcgcgtgctgagcctgtttcggaatatcgataaagtcctgaaaagcctgggattcctggagagcggctctggctccggcggtggcaccctgaagtacgtggaggatgtgacaaacgtggtcagacgggatgtggagaagtggggccccttcgatctggtgtacggcagcacccaacccctgggcagctcttgtgaccggtgccctggctggtacatgtttcagttccaccggatcctgcagtacgccctgccgagacaggagtcccagcggccattcttttggattttcatggacaacttgctgctgaccgaggatgaccaggaaactaccactcggttcctgcagaccgaagccgtgaccctgcaggacgtgagaggccgggactaccagaacgccatgcgggtgtggtccaacatccctggactgaaaagcaagcacgcacctctgacccctaaagaagaggagtacctgcaggcccaggtgcggagcagaagcaagctggacgcccctaaggtggatctgctggtgaagaattgcctcctgcccctgagagagtacttcaagtatttcagccagaatagtctgcccctgggcggcccaagcagcggcgcccctcctcccagcggcggcagcccagccggctccccaacctctaccgaggagggcacctctgagtccgccacccccgagagcggccctggcacctccaccgagcccagcgagggcagcgcacccggcagccctgccggcagccccacctccacagaggagggaaccagcaccgagcccagcgaaggcagcgccccaggcaccagcaccgagcctagtgagggcggctctggcggcggcagcgcccaggagattaaacggatcaacaagatcagaagaagacttgtgaaagacagcaacaccaagaaggccggcaagacaggccccatgaaaaccctgctggttagagtgatgacacccgatctgagagagcggctggaaaacctgagaaagaagcctgaaaatatcccccagcccatcagcaatacatctagagccaacctgaataagctgctgaccgattacaccgaaatgaagaaggcgatcctgcatgtgtactgggaagagttccagaaggaccctgtgggcctgatgagccgggtggcccagcctgccagcaagaagatcgatcagaacaagctgaaacctgagatggacgagaagggcaacctgaccaccgccggctttgcctgctctcagtgtggccagcccctgttcgtgtacaagctggagcaggtgtctgagaagggcaaggcttacaccaactacttcggacggtgcaatgtggccgagcacgaaaagctgatcctgctggcccagctgaagcccgagaaggatagcgacgaagccgtgacatatagcctgggaaagtttgggcagagggccctggatttctacagcattcatgtgaccaaggagtccacccaccccgtgaagcccctggcccagatcgccggaaacagatacgcctccggacctgtgggaaaggccctgagcgacgcatgtatgggcacaatcgcctccttcctgtctaagtaccaggacatcatcatcgaacaccagaaggtggtgaagggcaaccagaagagactggagagcctgcgggagctggccggcaaggaaaacctggaataccctagcgtgaccctgccacctcagcctcacaccaaggagggcgttgatgcctacaacgaagtgatcgcccgggtgcgaatgtgggtgaacctgaacctgtggcagaagctgaagctaagcagagatgatgccaagcctctgctgagactgaagggattcccttcctttcctctggtcgagagacaggccaacgaagtggactggtgggacatggtgtgtaacgtgaagaagctgatcaacgagaaaaaggaggatggcaaggtgttttggcagaatctggctggctacaagagacaggaagccctgagaccatacctgagcagcgaggaagatcggaagaagggaaagaaattcgctcggtaccagctgggcgacctgctgctgcacctggaaaagaagcacggcgaggactggggaaaggtgtacgacgaggcctgggagcggattgacaagaaagtggaaggcctgagcaagcacatcaagctggaagaggaacggagaagcgaggacgcccagagcaaggccgccctgaccgactggctgcgggctaaggccagcttcgtgatcgagggcctgaaggaggccgacaaggacgagttctgcagatgcgagctgaagctgcagaagtggtacggggacctgcggggaaagcccttcgccatcgaagccgagaacagcatcctggacatcagcggcttcagcaagcagtacaactgtgccttcatctggcagaaggacggcgtgaagaagctgaacctgtacctgatcatcaactacttcaagggcggcaagctgcggttcaagaagatcaaacctgaagccttcgaagccaacagattctacaccgtgatcaacaaaaagagcggcgagatcgtgcccatggaggtgaacttcaacttcgacgaccccaacctgatcatcctgcctctggcctttggcaagagacagggcagagaattcatctggaacgacctgctgtccctggaaaccggcagcctgaagctggccaacggaagagtgatcgagaagacactgtacaacagaagaacccggcaggatgagcctgccctgttcgtggccctgaccttcgagcggcgggaggtcctggactcctccaatatcaaaccaatgaacctgatcggcgtggcaagaggcgaaaacatccccgccgtgatcgccctgaccgaccccgagggctgcccactgagccggtttaaggatagcctgggaaacccaacccacatcctgagaatcggcgagagctataaggagaagcagcggaccatccaggccaagaaggaggtggagcagcggagagccggcggctacagccggaagtacgccagcaaagccaagaatctggcagacgatatggtgagaaacaccgctagagatctgctgtactacgccgtgacccaggatgccatgctgatcttcgccaacctgagccggggcttcggccggcagggcaagcggaccttcatggccgagagacagtacacacggatggaggactggctgaccgccaagctggcctacgagggcctgagcaagacctacctgtccaagacactggcccagtacacctccaagacatgcagcaactgtgggtttaccatcaccagcgccgactacgacagggtgctggagaagctgaagaagacagcaacaggctggatgaccacaattaacggcaaggagctgaaggtggagggccagattacctactacaacagatacaagagacagaacgtagtcaaggacctgtccgtcgagctggatagactgagcgaagaatctgtgaacaacgacatctcctcctggacaaagggcagaagcggagaagctctgagcctcctgaagaaaagattctcccatagacccgtgcaggagaagttcgtgtgcctgaactgcggcttcgagacacacgcagccgagcaagccgccctgaacatcgccagatcctggctgttcctgcggagccaggagtacaagaaataccagacaaacaagacaaccggcaacaccgataagagagccttcgtcgagacctggcagtccttttaccggaagaagcttaaggaggtgtggaaacctgccgtgcggtctggcggatctggcggaggctccacaagcacccagcccgacgaggacctgcacctgcaggccgaggagacccagctggtgaaggagagcgtgaccttcaaggacgtggccatcgacttcaccctggaggagtggagactgatggaccccacccagagaaacctgcacaaggacgtgatgctggagaactacagaaacctggtgagcctgggcctggccgtgagcaagcccgacatgatcagccacctggagaacggcaagggcccctggaccagccccaagaaaaagagaaaagtctaagctgccttctgcggggcttgccttctggccatgcccttcttctctcccttgcacctgtacctcttggtctttgaataaagcctgagtaggaaggctagcaaaaaaaaaaaaaaaaaaaaaaaaaaaaaaaaaaaaaaaaaaaaaaaaaaaaaaaaaaaaaaaaaaaaaaaaaaaaaaaa

SEQ ID NO: 3748 - RNA, 5419 nt, synthetic construct
  source 1..5419: mol_type = other RNA
aggaaataagagagaaaagaagagtaagaagaaatataagagccaccatggcccctaagaagaagcgtaaagtgagccgggtgaacggcagcggcagcggcggcggcatgaaccacgaccaggagttcgacccccctaaggtgtaccctcccgtccccgccgagaagagaaagcccatccgggtcctgagcctgttcgatggcatcgccaccggtctgctggtgctgaaggacctgggcatccaggtggataggtacattgcctccgaggtgtgcgaggactccatcaccgtgggaatggtgcgtcatcagggcaagatcatgtacgtgggcgacgtgcggagcgtgacacagaagcatatccaggagtggggccctttcgacctggtgatcggcggcagcccttgcaatgacctgagcatcgtgaacccagcccggaagggcctgtacgagggaaccggcagactgttcttcgagttttacagactgctgcacgacgcccggcctaaggaaggcgacgaccggcccttcttttggctgttcgagaatgtggtggccatgggagtcagcgacaagcgggatattagccggttcctggagagcaaccccgtgatgatcgatgccaaggaagtgagcgccgcccaccgggccagatacttctggggcaatctgcctggcatgaacagacccctggccagcaccgtgaacgacaagctggagctgcaggagtgcctggagcacggccggatcgccaagttcagcaaggtgagaaccatcaccacccgaagcaacagcatcaaacaaggcaaggaccagcactttcctgtgttcatgaacgagaaggaggacatcctgtggtgtaccgagatggagagagtgttcgggttcccagtccactacacagatgtcagcaacatgtctagactggccagacagagactgctgggaagaagctggtccgtccctgtgatcagacacctgttcgcccctctgaaggagtacttcgcctgcgtgagcagcggcaacagcaacgccaacagccggggccccagcttctctagcggcctggtgccactgtccctgagagggagccacatgggccccatggagatctacaaaaccgtgagcgcctggaagcggcagcctgtgcgcgtgctgagcctgtttcggaatatcgataaagtcctgaaaagcctgggattcctggagagcggctctggctccggcggtggcaccctgaagtacgtggaggatgtgacaaacgtggtcagacgggatgtggagaagtggggccccttcgatctggtgtacggcagcacccaacccctgggcagctcttgtgaccggtgccctggctggtacatgtttcagttccaccggatcctgcagtacgccctgccgagacaggagtcccagcggccattcttttggattttcatggacaacttgctgctgaccgaggatgaccaggaaactaccactcggttcctgcagaccgaagccgtgaccctgcaggacgtgagaggccgggactaccagaacgccatgcgggtgtggtccaacatccctggactgaaaagcaagcacgcacctctgacccctaaagaagaggagtacctgcaggcccaggtgcggagcagaagcaagctggacgcccctaaggtggatctgctggtgaagaattgcctcctgcccctgagagagtacttcaagtatttcagccagaatagtctgcccctgggcggcccaagcagcggcgcccctcctcccagcggcggcagcccagccggctccccaacctctaccgaggagggcacctctgagtccgccacccccgagagcggccctggcacctccaccgagcccagcgagggcagcgcacccggcagccctgccggcagccccacctccacagaggagggaaccagcaccgagcccagcgaaggcagcgccccaggcaccagcaccgagcctagtgagggcggctctggcggcggcagcgcccaggagattaaacggatcaacaagatcagaagaagacttgtgaaagacagcaacaccaagaaggccggcaagacaggccccatgaaaaccctgctggttagagtgatgacacccgatctgagagagcggctggaaaacctgagaaagaagcctgaaaatatcccccagcccatcagcaatacatctagagccaacctgaataagctgctgaccgattacaccgaaatgaagaaggcgatcctgcatgtgtactgggaagagttccagaaggaccctgtgggcctgatgagccgggtggcccagcctgccagcaagaagatcgatcagaacaagctgaaacctgagatggacgagaagggcaacctgaccaccgccggctttgcctgctctcagtgtggccagcccctgttcgtgtacaagctggagcaggtgtctgagaagggcaaggcttacaccaactacttcggacggtgcaatgtggccgagcacgaaaagctgatcctgctggcccagctgaagcccgagaaggatagcgacgaagccgtgacatatagcctgggaaagtttgggcagagggccctggatttctacagcattcatgtgaccaaggagtccacccaccccgtgaagcccctggcccagatcgccggaaacagatacgcctccggacctgtgggaaaggccctgagcgacgcatgtatgggcacaatcgcctccttcctgtctaagtaccaggacatcatcatcgaacaccagaaggtggtgaagggcaaccagaagagactggagagcctgcgggagctggccggcaaggaaaacctggaataccctagcgtgaccctgccacctcagcctcacaccaaggagggcgttgatgcctacaacgaagtgatcgcccgggtgcgaatgtgggtgaacctgaacctgtggcagaagctgaagctaagcagagatgatgccaagcctctgctgagactgaagggattcccttcctttcctctggtcgagagacaggccaacgaagtggactggtgggacatggtgtgtaacgtgaagaagctgatcaacgagaaaaaggaggatggcaaggtgttttggcagaatctggctggctacaagagacaggaagccctgagaccatacctgagcagcgaggaagatcggaagaagggaaagaaattcgctcggtaccagctgggcgacctgctgctgcacctggaaaagaagcacggcgaggactggggaaaggtgtacgacgaggcctgggagcggattgacaagaaagtggaaggcctgagcaagcacatcaagctggaagaggaacggagaagcgaggacgcccagagcaaggccgccctgaccgactggctgcgggctaaggccagcttcgtgatcgagggcctgaaggaggccgacaaggacgagttctgcagatgcgagctgaagctgcagaagtggtacggggacctgcggggaaagcccttcgccatcgaagccgagaacagcatcctggacatcagcggcttcagcaagcagtacaactgtgccttcatctggcagaaggacggcgtgaagaagctgaacctgtacctgatcatcaactacttcaagggcggcaagctgcggttcaagaagatcaaacctgaagccttcgaagccaacagattctacaccgtgatcaacaaaaagagcggcgagatcgtgcccatggaggtgaacttcaacttcgacgaccccaacctgatcatcctgcctctggcctttggcaagagacagggcagagaattcatctggaacgacctgctgtccctggaaaccggcagcctgaagctggccaacggaagagtgatcgagaagacactgtacaacagaagaacccggcaggatgagcctgccctgttcgtggccctgaccttcgagcggcgggaggtcctggactcctccaatatcaaaccaatgaacctgatcggcgtggcaagaggcgaaaacatccccgccgtgatcgccctgaccgaccccgagggctgcccactgagccggtttaaggatagcctgggaaacccaacccacatcctgagaatcggcgagagctataaggagaagcagcggaccatccaggccaagaaggaggtggagcagcggagagccggcggctacagccggaagtacgccagcaaagccaagaatctggcagacgatatggtgagaaacaccgctagagatctgctgtactacgccgtgacccaggatgccatgctgatcttcgccaacctgagccggggcttcggccggcagggcaagcggaccttcatggccgagagacagtacacacggatggaggactggctgaccgccaagctggcctacgagggcctgagcaagacctacctgtccaagacactggcccagtacacctccaagacatgcagcaactgtgggtttaccatcaccagcgccgactacgacagggtgctggagaagctgaagaagacagcaacaggctggatgaccacaattaacggcaaggagctgaaggtggagggccagattacctactacaacagatacaagagacagaacgtagtcaaggacctgtccgtcgagctggatagactgagcgaagaatctgtgaacaacgacatctcctcctggacaaagggcagaagcggagaagctctgagcctcctgaagaaaagattctcccatagacccgtgcaggagaagttcgtgtgcctgaactgcggcttcgagacacacgcagccgagcaagccgccctgaacatcgccagatcctggctgttcctgcggagccaggagtacaagaaataccagacaaacaagacaaccggcaacaccgataagagagccttcgtcgagacctggcagtccttttaccggaagaagcttaaggaggtgtggaaacctgccgtgcggtctggcggatctggcggaggctccacaagcagctacaggagcaagaccatggcccagggcagcctgaccttcagcgacgtggccatcggcttcagccagcaggagtgggagtgcctggaccccgtgcagaagaccctgtacagggacgtgatgatggagaactacggcaacctggtgagcctgggccacagcatcagcaagcccaacgtgatcaccctgctggagcagggcaaggagccctggatcgtggtgagggaggagaccaggagctggaccagccccaagaaaaagagaaaagtctaagctgccttctgcggggcttgccttctggccatgcccttcttctctcccttgcacctgtacctcttggtctttgaataaagcctgagtaggaaggctagcaaaaaaaaaaaaaaaaaaaaaaaaaaaaaaaaaaaaaaaaaaaaaaaaaaaaaaaaaaaaaaaaaaaaaaaaaaaaaaaa

SEQ ID NO: 3749 - RNA, 5419 nt, synthetic construct
  source 1..5419: mol_type = other RNA
aggaaataagagagaaaagaagagtaagaagaaatataagagccaccatggcccctaagaagaagcgtaaagtgagccgggtgaacggcagcggcagcggcggcggcatgaaccacgaccaggagttcgacccccctaaggtgtaccctcccgtccccgccgagaagagaaagcccatccgggtcctgagcctgttcgatggcatcgccaccggtctgctggtgctgaaggacctgggcatccaggtggataggtacattgcctccgaggtgtgcgaggactccatcaccgtgggaatggtgcgtcatcagggcaagatcatgtacgtgggcgacgtgcggagcgtgacacagaagcatatccaggagtggggccctttcgacctggtgatcggcggcagcccttgcaatgacctgagcatcgtgaacccagcccggaagggcctgtacgagggaaccggcagactgttcttcgagttttacagactgctgcacgacgcccggcctaaggaaggcgacgaccggcccttcttttggctgttcgagaatgtggtggccatgggagtcagcgacaagcgggatattagccggttcctggagagcaaccccgtgatgatcgatgccaaggaagtgagcgccgcccaccgggccagatacttctggggcaatctgcctggcatgaacagacccctggccagcaccgtgaacgacaagctggagctgcaggagtgcctggagcacggccggatcgccaagttcagcaaggtgagaaccatcaccacccgaagcaacagcatcaaacaaggcaaggaccagcactttcctgtgttcatgaacgagaaggaggacatcctgtggtgtaccgagatggagagagtgttcgggttcccagtccactacacagatgtcagcaacatgtctagactggccagacagagactgctgggaagaagctggtccgtccctgtgatcagacacctgttcgcccctctgaaggagtacttcgcctgcgtgagcagcggcaacagcaacgccaacagccggggccccagcttctctagcggcctggtgccactgtccctgagagggagccacatgggccccatggagatctacaaaaccgtgagcgcctggaagcggcagcctgtgcgcgtgctgagcctgtttcggaatatcgataaagtcctgaaaagcctgggattcctggagagcggctctggctccggcggtggcaccctgaagtacgtggaggatgtgacaaacgtggtcagacgggatgtggagaagtggggccccttcgatctggtgtacggcagcacccaacccctgggcagctcttgtgaccggtgccctggctggtacatgtttcagttccaccggatcctgcagtacgccctgccgagacaggagtcccagcggccattcttttggattttcatggacaacttgctgctgaccgaggatgaccaggaaactaccactcggttcctgcagaccgaagccgtgaccctgcaggacgtgagaggccgggactaccagaacgccatgcgggtgtggtccaacatccctggactgaaaagcaagcacgcacctctgacccctaaagaagaggagtacctgcaggcccaggtgcggagcagaagcaagctggacgcccctaaggtggatctgctggtgaagaattgcctcctgcccctgagagagtacttcaagtatttcagccagaatagtctgcccctgggcggcccaagcagcggcgcccctcctcccagcggcggcagcccagccggctccccaacctctaccgaggagggcacctctgagtccgccacccccgagagcggccctggcacctccaccgagcccagcgagggcagcgcacccggcagccctgccggcagccccacctccacagaggagggaaccagcaccgagcccagcgaaggcagcgccccaggcaccagcaccgagcctagtgagggcggctctggcggcggcagcgcccaggagattaaacggatcaacaagatcagaagaagacttgtgaaagacagcaacaccaagaaggccggcaagacaggccccatgaaaaccctgctggttagagtgatgacacccgatctgagagagcggctggaaaacctgagaaagaagcctgaaaatatcccccagcccatcagcaatacatctagagccaacctgaataagctgctgaccgattacaccgaaatgaagaaggcgatcctgcatgtgtactgggaagagttccagaaggaccctgtgggcctgatgagccgggtggcccagcctgccagcaagaagatcgatcagaacaagctgaaacctgagatggacgagaagggcaacctgaccaccgccggctttgcctgctctcagtgtggccagcccctgttcgtgtacaagctggagcaggtgtctgagaagggcaaggcttacaccaactacttcggacggtgcaatgtggccgagcacgaaaagctgatcctgctggcccagctgaagcccgagaaggatagcgacgaagccgtgacatatagcctgggaaagtttgggcagagggccctggatttctacagcattcatgtgaccaaggagtccacccaccccgtgaagcccctggcccagatcgccggaaacagatacgcctccggacctgtgggaaaggccctgagcgacgcatgtatgggcacaatcgcctccttcctgtctaagtaccaggacatcatcatcgaacaccagaaggtggtgaagggcaaccagaagagactggagagcctgcgggagctggccggcaaggaaaacctggaataccctagcgtgaccctgccacctcagcctcacaccaaggagggcgttgatgcctacaacgaagtgatcgcccgggtgcgaatgtgggtgaacctgaacctgtggcagaagctgaagctaagcagagatgatgccaagcctctgctgagactgaagggattcccttcctttcctctggtcgagagacaggccaacgaagtggactggtgggacatggtgtgtaacgtgaagaagctgatcaacgagaaaaaggaggatggcaaggtgttttggcagaatctggctggctacaagagacaggaagccctgagaccatacctgagcagcgaggaagatcggaagaagggaaagaaattcgctcggtaccagctgggcgacctgctgctgcacctggaaaagaagcacggcgaggactggggaaaggtgtacgacgaggcctgggagcggattgacaagaaagtggaaggcctgagcaagcacatcaagctggaagaggaacggagaagcgaggacgcccagagcaaggccgccctgaccgactggctgcgggctaaggccagcttcgtgatcgagggcctgaaggaggccgacaaggacgagttctgcagatgcgagctgaagctgcagaagtggtacggggacctgcggggaaagcccttcgccatcgaagccgagaacagcatcctggacatcagcggcttcagcaagcagtacaactgtgccttcatctggcagaaggacggcgtgaagaagctgaacctgtacctgatcatcaactacttcaagggcggcaagctgcggttcaagaagatcaaacctgaagccttcgaagccaacagattctacaccgtgatcaacaaaaagagcggcgagatcgtgcccatggaggtgaacttcaacttcgacgaccccaacctgatcatcctgcctctggcctttggcaagagacagggcagagaattcatctggaacgacctgctgtccctggaaaccggcagcctgaagctggccaacggaagagtgatcgagaagacactgtacaacagaagaacccggcaggatgagcctgccctgttcgtggccctgaccttcgagcggcgggaggtcctggactcctccaatatcaaaccaatgaacctgatcggcgtggcaagaggcgaaaacatccccgccgtgatcgccctgaccgaccccgagggctgcccactgagccggtttaaggatagcctgggaaacccaacccacatcctgagaatcggcgagagctataaggagaagcagcggaccatccaggccaagaaggaggtggagcagcggagagccggcggctacagccggaagtacgccagcaaagccaagaatctggcagacgatatggtgagaaacaccgctagagatctgctgtactacgccgtgacccaggatgccatgctgatcttcgccaacctgagccggggcttcggccggcagggcaagcggaccttcatggccgagagacagtacacacggatggaggactggctgaccgccaagctggcctacgagggcctgagcaagacctacctgtccaagacactggcccagtacacctccaagacatgcagcaactgtgggtttaccatcaccagcgccgactacgacagggtgctggagaagctgaagaagacagcaacaggctggatgaccacaattaacggcaaggagctgaaggtggagggccagattacctactacaacagatacaagagacagaacgtagtcaaggacctgtccgtcgagctggatagactgagcgaagaatctgtgaacaacgacatctcctcctggacaaagggcagaagcggagaagctctgagcctcctgaagaaaagattctcccatagacccgtgcaggagaagttcgtgtgcctgaactgcggcttcgagacacacgcagccgagcaagccgccctgaacatcgccagatcctggctgttcctgcggagccaggagtacaagaaataccagacaaacaagacaaccggcaacaccgataagagagccttcgtcgagacctggcagtccttttaccggaagaagcttaaggaggtgtggaaacctgccgtgcggtctggcggatctggcggaggctccacaagcgaggaggtgcccgtggtgttcgaggacgtggccgtgtacttcaccagggaggagtggggcaccctggacaagaggcagaaggagctgtacagggacgtgatgaggatgaactacgagctgctggccagcctgggccccgccgccgccaagcccgccctgatcagcaagctggagaggagggccgccccctggatccaggaccccaacggccccaagtggggcaagggcaggccccccggcaagaccagccccaagaaaaagagaaaagtctaagctgccttctgcggggcttgccttctggccatgcccttcttctctcccttgcacctgtacctcttggtctttgaataaagcctgagtaggaaggctagcaaaaaaaaaaaaaaaaaaaaaaaaaaaaaaaaaaaaaaaaaaaaaaaaaaaaaaaaaaaaaaaaaaaaaaaaaaaaaaaa

SEQ ID NO: 3750 - RNA, 5419 nt, synthetic construct
  source 1..5419: mol_type = other RNA
aggaaataagagagaaaagaagagtaagaagaaatataagagccaccatggcccctaagaagaagcgtaaagtgagccgggtgaacggcagcggcagcggcggcggcatgaaccacgaccaggagttcgacccccctaaggtgtaccctcccgtccccgccgagaagagaaagcccatccgggtcctgagcctgttcgatggcatcgccaccggtctgctggtgctgaaggacctgggcatccaggtggataggtacattgcctccgaggtgtgcgaggactccatcaccgtgggaatggtgcgtcatcagggcaagatcatgtacgtgggcgacgtgcggagcgtgacacagaagcatatccaggagtggggccctttcgacctggtgatcggcggcagcccttgcaatgacctgagcatcgtgaacccagcccggaagggcctgtacgagggaaccggcagactgttcttcgagttttacagactgctgcacgacgcccggcctaaggaaggcgacgaccggcccttcttttggctgttcgagaatgtggtggccatgggagtcagcgacaagcgggatattagccggttcctggagagcaaccccgtgatgatcgatgccaaggaagtgagcgccgcccaccgggccagatacttctggggcaatctgcctggcatgaacagacccctggccagcaccgtgaacgacaagctggagctgcaggagtgcctggagcacggccggatcgccaagttcagcaaggtgagaaccatcaccacccgaagcaacagcatcaaacaaggcaaggaccagcactttcctgtgttcatgaacgagaaggaggacatcctgtggtgtaccgagatggagagagtgttcgggttcccagtccactacacagatgtcagcaacatgtctagactggccagacagagactgctgggaagaagctggtccgtccctgtgatcagacacctgttcgcccctctgaaggagtacttcgcctgcgtgagcagcggcaacagcaacgccaacagccggggccccagcttctctagcggcctggtgccactgtccctgagagggagccacatgggccccatggagatctacaaaaccgtgagcgcctggaagcggcagcctgtgcgcgtgctgagcctgtttcggaatatcgataaagtcctgaaaagcctgggattcctggagagcggctctggctccggcggtggcaccctgaagtacgtggaggatgtgacaaacgtggtcagacgggatgtggagaagtggggccccttcgatctggtgtacggcagcacccaacccctgggcagctcttgtgaccggtgccctggctggtacatgtttcagttccaccggatcctgcagtacgccctgccgagacaggagtcccagcggccattcttttggattttcatggacaacttgctgctgaccgaggatgaccaggaaactaccactcggttcctgcagaccgaagccgtgaccctgcaggacgtgagaggccgggactaccagaacgccatgcgggtgtggtccaacatccctggactgaaaagcaagcacgcacctctgacccctaaagaagaggagtacctgcaggcccaggtgcggagcagaagcaagctggacgcccctaaggtggatctgctggtgaagaattgcctcctgcccctgagagagtacttcaagtatttcagccagaatagtctgcccctgggcggcccaagcagcggcgcccctcctcccagcggcggcagcccagccggctccccaacctctaccgaggagggcacctctgagtccgccacccccgagagcggccctggcacctccaccgagcccagcgagggcagcgcacccggcagccctgccggcagccccacctccacagaggagggaaccagcaccgagcccagcgaaggcagcgccccaggcaccagcaccgagcctagtgagggcggctctggcggcggcagcgcccaggagattaaacggatcaacaagatcagaagaagacttgtgaaagacagcaacaccaagaaggccggcaagacaggccccatgaaaaccctgctggttagagtgatgacacccgatctgagagagcggctggaaaacctgagaaagaagcctgaaaatatcccccagcccatcagcaatacatctagagccaacctgaataagctgctgaccgattacaccgaaatgaagaaggcgatcctgcatgtgtactgggaagagttccagaaggaccctgtgggcctgatgagccgggtggcccagcctgccagcaagaagatcgatcagaacaagctgaaacctgagatggacgagaagggcaacctgaccaccgccggctttgcctgctctcagtgtggccagcccctgttcgtgtacaagctggagcaggtgtctgagaagggcaaggcttacaccaactacttcggacggtgcaatgtggccgagcacgaaaagctgatcctgctggcccagctgaagcccgagaaggatagcgacgaagccgtgacatatagcctgggaaagtttgggcagagggccctggatttctacagcattcatgtgaccaaggagtccacccaccccgtgaagcccctggcccagatcgccggaaacagatacgcctccggacctgtgggaaaggccctgagcgacgcatgtatgggcacaatcgcctccttcctgtctaagtaccaggacatcatcatcgaacaccagaaggtggtgaagggcaaccagaagagactggagagcctgcgggagctggccggcaaggaaaacctggaataccctagcgtgaccctgccacctcagcctcacaccaaggagggcgttgatgcctacaacgaagtgatcgcccgggtgcgaatgtgggtgaacctgaacctgtggcagaagctgaagctaagcagagatgatgccaagcctctgctgagactgaagggattcccttcctttcctctggtcgagagacaggccaacgaagtggactggtgggacatggtgtgtaacgtgaagaagctgatcaacgagaaaaaggaggatggcaaggtgttttggcagaatctggctggctacaagagacaggaagccctgagaccatacctgagcagcgaggaagatcggaagaagggaaagaaattcgctcggtaccagctgggcgacctgctgctgcacctggaaaagaagcacggcgaggactggggaaaggtgtacgacgaggcctgggagcggattgacaagaaagtggaaggcctgagcaagcacatcaagctggaagaggaacggagaagcgaggacgcccagagcaaggccgccctgaccgactggctgcgggctaaggccagcttcgtgatcgagggcctgaaggaggccgacaaggacgagttctgcagatgcgagctgaagctgcagaagtggtacggggacctgcggggaaagcccttcgccatcgaagccgagaacagcatcctggacatcagcggcttcagcaagcagtacaactgtgccttcatctggcagaaggacggcgtgaagaagctgaacctgtacctgatcatcaactacttcaagggcggcaagctgcggttcaagaagatcaaacctgaagccttcgaagccaacagattctacaccgtgatcaacaaaaagagcggcgagatcgtgcccatggaggtgaacttcaacttcgacgaccccaacctgatcatcctgcctctggcctttggcaagagacagggcagagaattcatctggaacgacctgctgtccctggaaaccggcagcctgaagctggccaacggaagagtgatcgagaagacactgtacaacagaagaacccggcaggatgagcctgccctgttcgtggccctgaccttcgagcggcgggaggtcctggactcctccaatatcaaaccaatgaacctgatcggcgtggcaagaggcgaaaacatccccgccgtgatcgccctgaccgaccccgagggctgcccactgagccggtttaaggatagcctgggaaacccaacccacatcctgagaatcggcgagagctataaggagaagcagcggaccatccaggccaagaaggaggtggagcagcggagagccggcggctacagccggaagtacgccagcaaagccaagaatctggcagacgatatggtgagaaacaccgctagagatctgctgtactacgccgtgacccaggatgccatgctgatcttcgccaacctgagccggggcttcggccggcagggcaagcggaccttcatggccgagagacagtacacacggatggaggactggctgaccgccaagctggcctacgagggcctgagcaagacctacctgtccaagacactggcccagtacacctccaagacatgcagcaactgtgggtttaccatcaccagcgccgactacgacagggtgctggagaagctgaagaagacagcaacaggctggatgaccacaattaacggcaaggagctgaaggtggagggccagattacctactacaacagatacaagagacagaacgtagtcaaggacctgtccgtcgagctggatagactgagcgaagaatctgtgaacaacgacatctcctcctggacaaagggcagaagcggagaagctctgagcctcctgaagaaaagattctcccatagacccgtgcaggagaagttcgtgtgcctgaactgcggcttcgagacacacgcagccgagcaagccgccctgaacatcgccagatcctggctgttcctgcggagccaggagtacaagaaataccagacaaacaagacaaccggcaacaccgataagagagccttcgtcgagacctggcagtccttttaccggaagaagcttaaggaggtgtggaaacctgccgtgcggtctggcggatctggcggaggctccacaagcatgatcgagagccagatcagcttcgaggacgtggccgtggacttcaccctggaggagtggcagctgctgaaccccacccagaagaacctgtacagggacgtgatgctggagaactacagcaacctggccttcctgggctaccagatcatcaagcccgacgccgtgttccagctggagcaggaggagcagtggatcaccgacgaggagatcctgaaccacagctgccccgaggaggtgtggctgaccagccccaagaaaaagagaaaagtctaagctgccttctgcggggcttgccttctggccatgcccttcttctctcccttgcacctgtacctcttggtctttgaataaagcctgagtaggaaggctagcaaaaaaaaaaaaaaaaaaaaaaaaaaaaaaaaaaaaaaaaaaaaaaaaaaaaaaaaaaaaaaaaaaaaaaaaaaaaaaaa

SEQ ID NO: 3751 - RNA, 5419 nt, synthetic construct
  source 1..5419: mol_type = other RNA
aggaaataagagagaaaagaagagtaagaagaaatataagagccaccatggcccctaagaagaagcgtaaagtgagccgggtgaacggcagcggcagcggcggcggcatgaaccacgaccaggagttcgacccccctaaggtgtaccctcccgtccccgccgagaagagaaagcccatccgggtcctgagcctgttcgatggcatcgccaccggtctgctggtgctgaaggacctgggcatccaggtggataggtacattgcctccgaggtgtgcgaggactccatcaccgtgggaatggtgcgtcatcagggcaagatcatgtacgtgggcgacgtgcggagcgtgacacagaagcatatccaggagtggggccctttcgacctggtgatcggcggcagcccttgcaatgacctgagcatcgtgaacccagcccggaagggcctgtacgagggaaccggcagactgttcttcgagttttacagactgctgcacgacgcccggcctaaggaaggcgacgaccggcccttcttttggctgttcgagaatgtggtggccatgggagtcagcgacaagcgggatattagccggttcctggagagcaaccccgtgatgatcgatgccaaggaagtgagcgccgcccaccgggccagatacttctggggcaatctgcctggcatgaacagacccctggccagcaccgtgaacgacaagctggagctgcaggagtgcctggagcacggccggatcgccaagttcagcaaggtgagaaccatcaccacccgaagcaacagcatcaaacaaggcaaggaccagcactttcctgtgttcatgaacgagaaggaggacatcctgtggtgtaccgagatggagagagtgttcgggttcccagtccactacacagatgtcagcaacatgtctagactggccagacagagactgctgggaagaagctggtccgtccctgtgatcagacacctgttcgcccctctgaaggagtacttcgcctgcgtgagcagcggcaacagcaacgccaacagccggggccccagcttctctagcggcctggtgccactgtccctgagagggagccacatgggccccatggagatctacaaaaccgtgagcgcctggaagcggcagcctgtgcgcgtgctgagcctgtttcggaatatcgataaagtcctgaaaagcctgggattcctggagagcggctctggctccggcggtggcaccctgaagtacgtggaggatgtgacaaacgtggtcagacgggatgtggagaagtggggccccttcgatctggtgtacggcagcacccaacccctgggcagctcttgtgaccggtgccctggctggtacatgtttcagttccaccggatcctgcagtacgccctgccgagacaggagtcccagcggccattcttttggattttcatggacaacttgctgctgaccgaggatgaccaggaaactaccactcggttcctgcagaccgaagccgtgaccctgcaggacgtgagaggccgggactaccagaacgccatgcgggtgtggtccaacatccctggactgaaaagcaagcacgcacctctgacccctaaagaagaggagtacctgcaggcccaggtgcggagcagaagcaagctggacgcccctaaggtggatctgctggtgaagaattgcctcctgcccctgagagagtacttcaagtatttcagccagaatagtctgcccctgggcggcccaagcagcggcgcccctcctcccagcggcggcagcccagccggctccccaacctctaccgaggagggcacctctgagtccgccacccccgagagcggccctggcacctccaccgagcccagcgagggcagcgcacccggcagccctgccggcagccccacctccacagaggagggaaccagcaccgagcccagcgaaggcagcgccccaggcaccagcaccgagcctagtgagggcggctctggcggcggcagcgcccaggagattaaacggatcaacaagatcagaagaagacttgtgaaagacagcaacaccaagaaggccggcaagacaggccccatgaaaaccctgctggttagagtgatgacacccgatctgagagagcggctggaaaacctgagaaagaagcctgaaaatatcccccagcccatcagcaatacatctagagccaacctgaataagctgctgaccgattacaccgaaatgaagaaggcgatcctgcatgtgtactgggaagagttccagaaggaccctgtgggcctgatgagccgggtggcccagcctgccagcaagaagatcgatcagaacaagctgaaacctgagatggacgagaagggcaacctgaccaccgccggctttgcctgctctcagtgtggccagcccctgttcgtgtacaagctggagcaggtgtctgagaagggcaaggcttacaccaactacttcggacggtgcaatgtggccgagcacgaaaagctgatcctgctggcccagctgaagcccgagaaggatagcgacgaagccgtgacatatagcctgggaaagtttgggcagagggccctggatttctacagcattcatgtgaccaaggagtccacccaccccgtgaagcccctggcccagatcgccggaaacagatacgcctccggacctgtgggaaaggccctgagcgacgcatgtatgggcacaatcgcctccttcctgtctaagtaccaggacatcatcatcgaacaccagaaggtggtgaagggcaaccagaagagactggagagcctgcgggagctggccggcaaggaaaacctggaataccctagcgtgaccctgccacctcagcctcacaccaaggagggcgttgatgcctacaacgaagtgatcgcccgggtgcgaatgtgggtgaacctgaacctgtggcagaagctgaagctaagcagagatgatgccaagcctctgctgagactgaagggattcccttcctttcctctggtcgagagacaggccaacgaagtggactggtgggacatggtgtgtaacgtgaagaagctgatcaacgagaaaaaggaggatggcaaggtgttttggcagaatctggctggctacaagagacaggaagccctgagaccatacctgagcagcgaggaagatcggaagaagggaaagaaattcgctcggtaccagctgggcgacctgctgctgcacctggaaaagaagcacggcgaggactggggaaaggtgtacgacgaggcctgggagcggattgacaagaaagtggaaggcctgagcaagcacatcaagctggaagaggaacggagaagcgaggacgcccagagcaaggccgccctgaccgactggctgcgggctaaggccagcttcgtgatcgagggcctgaaggaggccgacaaggacgagttctgcagatgcgagctgaagctgcagaagtggtacggggacctgcggggaaagcccttcgccatcgaagccgagaacagcatcctggacatcagcggcttcagcaagcagtacaactgtgccttcatctggcagaaggacggcgtgaagaagctgaacctgtacctgatcatcaactacttcaagggcggcaagctgcggttcaagaagatcaaacctgaagccttcgaagccaacagattctacaccgtgatcaacaaaaagagcggcgagatcgtgcccatggaggtgaacttcaacttcgacgaccccaacctgatcatcctgcctctggcctttggcaagagacagggcagagaattcatctggaacgacctgctgtccctggaaaccggcagcctgaagctggccaacggaagagtgatcgagaagacactgtacaacagaagaacccggcaggatgagcctgccctgttcgtggccctgaccttcgagcggcgggaggtcctggactcctccaatatcaaaccaatgaacctgatcggcgtggcaagaggcgaaaacatccccgccgtgatcgccctgaccgaccccgagggctgcccactgagccggtttaaggatagcctgggaaacccaacccacatcctgagaatcggcgagagctataaggagaagcagcggaccatccaggccaagaaggaggtggagcagcggagagccggcggctacagccggaagtacgccagcaaagccaagaatctggcagacgatatggtgagaaacaccgctagagatctgctgtactacgccgtgacccaggatgccatgctgatcttcgccaacctgagccggggcttcggccggcagggcaagcggaccttcatggccgagagacagtacacacggatggaggactggctgaccgccaagctggcctacgagggcctgagcaagacctacctgtccaagacactggcccagtacacctccaagacatgcagcaactgtgggtttaccatcaccagcgccgactacgacagggtgctggagaagctgaagaagacagcaacaggctggatgaccacaattaacggcaaggagctgaaggtggagggccagattacctactacaacagatacaagagacagaacgtagtcaaggacctgtccgtcgagctggatagactgagcgaagaatctgtgaacaacgacatctcctcctggacaaagggcagaagcggagaagctctgagcctcctgaagaaaagattctcccatagacccgtgcaggagaagttcgtgtgcctgaactgcggcttcgagacacacgcagccgagcaagccgccctgaacatcgccagatcctggctgttcctgcggagccaggagtacaagaaataccagacaaacaagacaaccggcaacaccgataagagagccttcgtcgagacctggcagtccttttaccggaagaagcttaaggaggtgtggaaacctgccgtgcggtctggcggatctggcggaggctccacaagccagatgcccgtgaagttcgaggacatcgccgtgagcttcagccaggaggagtgggagtacctggacgaggagcagaaggagctgtacagggaggtgatgaaggagaactaccagaccctgatcagcctgggcaccggcagccccagcatcacccccgacatcatcagccacatcgagaggggcgaggagccctacatcagggaggagcccggcagcgaggagagggagcccggcaggagcagcaccagccccaagaaaaagagaaaagtctaagctgccttctgcggggcttgccttctggccatgcccttcttctctcccttgcacctgtacctcttggtctttgaataaagcctgagtaggaaggctagcaaaaaaaaaaaaaaaaaaaaaaaaaaaaaaaaaaaaaaaaaaaaaaaaaaaaaaaaaaaaaaaaaaaaaaaaaaaaaaaa

SEQ ID NO: 3752 - RNA, 5419 nt, synthetic construct
  source 1..5419: mol_type = other RNA
aggaaataagagagaaaagaagagtaagaagaaatataagagccaccatggcccctaagaagaagcgtaaagtgagccgggtgaacggcagcggcagcggcggcggcatgaaccacgaccaggagttcgacccccctaaggtgtaccctcccgtccccgccgagaagagaaagcccatccgggtcctgagcctgttcgatggcatcgccaccggtctgctggtgctgaaggacctgggcatccaggtggataggtacattgcctccgaggtgtgcgaggactccatcaccgtgggaatggtgcgtcatcagggcaagatcatgtacgtgggcgacgtgcggagcgtgacacagaagcatatccaggagtggggccctttcgacctggtgatcggcggcagcccttgcaatgacctgagcatcgtgaacccagcccggaagggcctgtacgagggaaccggcagactgttcttcgagttttacagactgctgcacgacgcccggcctaaggaaggcgacgaccggcccttcttttggctgttcgagaatgtggtggccatgggagtcagcgacaagcgggatattagccggttcctggagagcaaccccgtgatgatcgatgccaaggaagtgagcgccgcccaccgggccagatacttctggggcaatctgcctggcatgaacagacccctggccagcaccgtgaacgacaagctggagctgcaggagtgcctggagcacggccggatcgccaagttcagcaaggtgagaaccatcaccacccgaagcaacagcatcaaacaaggcaaggaccagcactttcctgtgttcatgaacgagaaggaggacatcctgtggtgtaccgagatggagagagtgttcgggttcccagtccactacacagatgtcagcaacatgtctagactggccagacagagactgctgggaagaagctggtccgtccctgtgatcagacacctgttcgcccctctgaaggagtacttcgcctgcgtgagcagcggcaacagcaacgccaacagccggggccccagcttctctagcggcctggtgccactgtccctgagagggagccacatgggccccatggagatctacaaaaccgtgagcgcctggaagcggcagcctgtgcgcgtgctgagcctgtttcggaatatcgataaagtcctgaaaagcctgggattcctggagagcggctctggctccggcggtggcaccctgaagtacgtggaggatgtgacaaacgtggtcagacgggatgtggagaagtggggccccttcgatctggtgtacggcagcacccaacccctgggcagctcttgtgaccggtgccctggctggtacatgtttcagttccaccggatcctgcagtacgccctgccgagacaggagtcccagcggccattcttttggattttcatggacaacttgctgctgaccgaggatgaccaggaaactaccactcggttcctgcagaccgaagccgtgaccctgcaggacgtgagaggccgggactaccagaacgccatgcgggtgtggtccaacatccctggactgaaaagcaagcacgcacctctgacccctaaagaagaggagtacctgcaggcccaggtgcggagcagaagcaagctggacgcccctaaggtggatctgctggtgaagaattgcctcctgcccctgagagagtacttcaagtatttcagccagaatagtctgcccctgggcggcccaagcagcggcgcccctcctcccagcggcggcagcccagccggctccccaacctctaccgaggagggcacctctgagtccgccacccccgagagcggccctggcacctccaccgagcccagcgagggcagcgcacccggcagccctgccggcagccccacctccacagaggagggaaccagcaccgagcccagcgaaggcagcgccccaggcaccagcaccgagcctagtgagggcggctctggcggcggcagcgcccaggagattaaacggatcaacaagatcagaagaagacttgtgaaagacagcaacaccaagaaggccggcaagacaggccccatgaaaaccctgctggttagagtgatgacacccgatctgagagagcggctggaaaacctgagaaagaagcctgaaaatatcccccagcccatcagcaatacatctagagccaacctgaataagctgctgaccgattacaccgaaatgaagaaggcgatcctgcatgtgtactgggaagagttccagaaggaccctgtgggcctgatgagccgggtggcccagcctgccagcaagaagatcgatcagaacaagctgaaacctgagatggacgagaagggcaacctgaccaccgccggctttgcctgctctcagtgtggccagcccctgttcgtgtacaagctggagcaggtgtctgagaagggcaaggcttacaccaactacttcggacggtgcaatgtggccgagcacgaaaagctgatcctgctggcccagctgaagcccgagaaggatagcgacgaagccgtgacatatagcctgggaaagtttgggcagagggccctggatttctacagcattcatgtgaccaaggagtccacccaccccgtgaagcccctggcccagatcgccggaaacagatacgcctccggacctgtgggaaaggccctgagcgacgcatgtatgggcacaatcgcctccttcctgtctaagtaccaggacatcatcatcgaacaccagaaggtggtgaagggcaaccagaagagactggagagcctgcgggagctggccggcaaggaaaacctggaataccctagcgtgaccctgccacctcagcctcacaccaaggagggcgttgatgcctacaacgaagtgatcgcccgggtgcgaatgtgggtgaacctgaacctgtggcagaagctgaagctaagcagagatgatgccaagcctctgctgagactgaagggattcccttcctttcctctggtcgagagacaggccaacgaagtggactggtgggacatggtgtgtaacgtgaagaagctgatcaacgagaaaaaggaggatggcaaggtgttttggcagaatctggctggctacaagagacaggaagccctgagaccatacctgagcagcgaggaagatcggaagaagggaaagaaattcgctcggtaccagctgggcgacctgctgctgcacctggaaaagaagcacggcgaggactggggaaaggtgtacgacgaggcctgggagcggattgacaagaaagtggaaggcctgagcaagcacatcaagctggaagaggaacggagaagcgaggacgcccagagcaaggccgccctgaccgactggctgcgggctaaggccagcttcgtgatcgagggcctgaaggaggccgacaaggacgagttctgcagatgcgagctgaagctgcagaagtggtacggggacctgcggggaaagcccttcgccatcgaagccgagaacagcatcctggacatcagcggcttcagcaagcagtacaactgtgccttcatctggcagaaggacggcgtgaagaagctgaacctgtacctgatcatcaactacttcaagggcggcaagctgcggttcaagaagatcaaacctgaagccttcgaagccaacagattctacaccgtgatcaacaaaaagagcggcgagatcgtgcccatggaggtgaacttcaacttcgacgaccccaacctgatcatcctgcctctggcctttggcaagagacagggcagagaattcatctggaacgacctgctgtccctggaaaccggcagcctgaagctggccaacggaagagtgatcgagaagacactgtacaacagaagaacccggcaggatgagcctgccctgttcgtggccctgaccttcgagcggcgggaggtcctggactcctccaatatcaaaccaatgaacctgatcggcgtggcaagaggcgaaaacatccccgccgtgatcgccctgaccgaccccgagggctgcccactgagccggtttaaggatagcctgggaaacccaacccacatcctgagaatcggcgagagctataaggagaagcagcggaccatccaggccaagaaggaggtggagcagcggagagccggcggctacagccggaagtacgccagcaaagccaagaatctggcagacgatatggtgagaaacaccgctagagatctgctgtactacgccgtgacccaggatgccatgctgatcttcgccaacctgagccggggcttcggccggcagggcaagcggaccttcatggccgagagacagtacacacggatggaggactggctgaccgccaagctggcctacgagggcctgagcaagacctacctgtccaagacactggcccagtacacctccaagacatgcagcaactgtgggtttaccatcaccagcgccgactacgacagggtgctggagaagctgaagaagacagcaacaggctggatgaccacaattaacggcaaggagctgaaggtggagggccagattacctactacaacagatacaagagacagaacgtagtcaaggacctgtccgtcgagctggatagactgagcgaagaatctgtgaacaacgacatctcctcctggacaaagggcagaagcggagaagctctgagcctcctgaagaaaagattctcccatagacccgtgcaggagaagttcgtgtgcctgaactgcggcttcgagacacacgcagccgagcaagccgccctgaacatcgccagatcctggctgttcctgcggagccaggagtacaagaaataccagacaaacaagacaaccggcaacaccgataagagagccttcgtcgagacctggcagtccttttaccggaagaagcttaaggaggtgtggaaacctgccgtgcggtctggcggatctggcggaggctccacaagccaccaggaggtggtgaccttcgaggacgtggccgtgtacttcacccagaccgagtgggccggcctgagccccgcccagagggccctgtacaggagcgtgatgctggagatctacggcaacctgaccagcctgggctaccccgtgcccaagcccgccctggtgagcctgctggagaggggcgacctgccctggggcctggagacccaggacgacccccccgcccagggcaccaagcacatctgcaccagccccaagaaaaagagaaaagtctaagctgccttctgcggggcttgccttctggccatgcccttcttctctcccttgcacctgtacctcttggtctttgaataaagcctgagtaggaaggctagcaaaaaaaaaaaaaaaaaaaaaaaaaaaaaaaaaaaaaaaaaaaaaaaaaaaaaaaaaaaaaaaaaaaaaaaaaaaaaaaa

SEQ ID NO: 3753 - RNA, 5419 nt, synthetic construct
  source 1..5419: mol_type = other RNA
aggaaataagagagaaaagaagagtaagaagaaatataagagccaccatggcccctaagaagaagcgtaaagtgagccgggtgaacggcagcggcagcggcggcggcatgaaccacgaccaggagttcgacccccctaaggtgtaccctcccgtccccgccgagaagagaaagcccatccgggtcctgagcctgttcgatggcatcgccaccggtctgctggtgctgaaggacctgggcatccaggtggataggtacattgcctccgaggtgtgcgaggactccatcaccgtgggaatggtgcgtcatcagggcaagatcatgtacgtgggcgacgtgcggagcgtgacacagaagcatatccaggagtggggccctttcgacctggtgatcggcggcagcccttgcaatgacctgagcatcgtgaacccagcccggaagggcctgtacgagggaaccggcagactgttcttcgagttttacagactgctgcacgacgcccggcctaaggaaggcgacgaccggcccttcttttggctgttcgagaatgtggtggccatgggagtcagcgacaagcgggatattagccggttcctggagagcaaccccgtgatgatcgatgccaaggaagtgagcgccgcccaccgggccagatacttctggggcaatctgcctggcatgaacagacccctggccagcaccgtgaacgacaagctggagctgcaggagtgcctggagcacggccggatcgccaagttcagcaaggtgagaaccatcaccacccgaagcaacagcatcaaacaaggcaaggaccagcactttcctgtgttcatgaacgagaaggaggacatcctgtggtgtaccgagatggagagagtgttcgggttcccagtccactacacagatgtcagcaacatgtctagactggccagacagagactgctgggaagaagctggtccgtccctgtgatcagacacctgttcgcccctctgaaggagtacttcgcctgcgtgagcagcggcaacagcaacgccaacagccggggccccagcttctctagcggcctggtgccactgtccctgagagggagccacatgggccccatggagatctacaaaaccgtgagcgcctggaagcggcagcctgtgcgcgtgctgagcctgtttcggaatatcgataaagtcctgaaaagcctgggattcctggagagcggctctggctccggcggtggcaccctgaagtacgtggaggatgtgacaaacgtggtcagacgggatgtggagaagtggggccccttcgatctggtgtacggcagcacccaacccctgggcagctcttgtgaccggtgccctggctggtacatgtttcagttccaccggatcctgcagtacgccctgccgagacaggagtcccagcggccattcttttggattttcatggacaacttgctgctgaccgaggatgaccaggaaactaccactcggttcctgcagaccgaagccgtgaccctgcaggacgtgagaggccgggactaccagaacgccatgcgggtgtggtccaacatccctggactgaaaagcaagcacgcacctctgacccctaaagaagaggagtacctgcaggcccaggtgcggagcagaagcaagctggacgcccctaaggtggatctgctggtgaagaattgcctcctgcccctgagagagtacttcaagtatttcagccagaatagtctgcccctgggcggcccaagcagcggcgcccctcctcccagcggcggcagcccagccggctccccaacctctaccgaggagggcacctctgagtccgccacccccgagagcggccctggcacctccaccgagcccagcgagggcagcgcacccggcagccctgccggcagccccacctccacagaggagggaaccagcaccgagcccagcgaaggcagcgccccaggcaccagcaccgagcctagtgagggcggctctggcggcggcagcgcccaggagattaaacggatcaacaagatcagaagaagacttgtgaaagacagcaacaccaagaaggccggcaagacaggccccatgaaaaccctgctggttagagtgatgacacccgatctgagagagcggctggaaaacctgagaaagaagcctgaaaatatcccccagcccatcagcaatacatctagagccaacctgaataagctgctgaccgattacaccgaaatgaagaaggcgatcctgcatgtgtactgggaagagttccagaaggaccctgtgggcctgatgagccgggtggcccagcctgccagcaagaagatcgatcagaacaagctgaaacctgagatggacgagaagggcaacctgaccaccgccggctttgcctgctctcagtgtggccagcccctgttcgtgtacaagctggagcaggtgtctgagaagggcaaggcttacaccaactacttcggacggtgcaatgtggccgagcacgaaaagctgatcctgctggcccagctgaagcccgagaaggatagcgacgaagccgtgacatatagcctgggaaagtttgggcagagggccctggatttctacagcattcatgtgaccaaggagtccacccaccccgtgaagcccctggcccagatcgccggaaacagatacgcctccggacctgtgggaaaggccctgagcgacgcatgtatgggcacaatcgcctccttcctgtctaagtaccaggacatcatcatcgaacaccagaaggtggtgaagggcaaccagaagagactggagagcctgcgggagctggccggcaaggaaaacctggaataccctagcgtgaccctgccacctcagcctcacaccaaggagggcgttgatgcctacaacgaagtgatcgcccgggtgcgaatgtgggtgaacctgaacctgtggcagaagctgaagctaagcagagatgatgccaagcctctgctgagactgaagggattcccttcctttcctctggtcgagagacaggccaacgaagtggactggtgggacatggtgtgtaacgtgaagaagctgatcaacgagaaaaaggaggatggcaaggtgttttggcagaatctggctggctacaagagacaggaagccctgagaccatacctgagcagcgaggaagatcggaagaagggaaagaaattcgctcggtaccagctgggcgacctgctgctgcacctggaaaagaagcacggcgaggactggggaaaggtgtacgacgaggcctgggagcggattgacaagaaagtggaaggcctgagcaagcacatcaagctggaagaggaacggagaagcgaggacgcccagagcaaggccgccctgaccgactggctgcgggctaaggccagcttcgtgatcgagggcctgaaggaggccgacaaggacgagttctgcagatgcgagctgaagctgcagaagtggtacggggacctgcggggaaagcccttcgccatcgaagccgagaacagcatcctggacatcagcggcttcagcaagcagtacaactgtgccttcatctggcagaaggacggcgtgaagaagctgaacctgtacctgatcatcaactacttcaagggcggcaagctgcggttcaagaagatcaaacctgaagccttcgaagccaacagattctacaccgtgatcaacaaaaagagcggcgagatcgtgcccatggaggtgaacttcaacttcgacgaccccaacctgatcatcctgcctctggcctttggcaagagacagggcagagaattcatctggaacgacctgctgtccctggaaaccggcagcctgaagctggccaacggaagagtgatcgagaagacactgtacaacagaagaacccggcaggatgagcctgccctgttcgtggccctgaccttcgagcggcgggaggtcctggactcctccaatatcaaaccaatgaacctgatcggcgtggcaagaggcgaaaacatccccgccgtgatcgccctgaccgaccccgagggctgcccactgagccggtttaaggatagcctgggaaacccaacccacatcctgagaatcggcgagagctataaggagaagcagcggaccatccaggccaagaaggaggtggagcagcggagagccggcggctacagccggaagtacgccagcaaagccaagaatctggcagacgatatggtgagaaacaccgctagagatctgctgtactacgccgtgacccaggatgccatgctgatcttcgccaacctgagccggggcttcggccggcagggcaagcggaccttcatggccgagagacagtacacacggatggaggactggctgaccgccaagctggcctacgagggcctgagcaagacctacctgtccaagacactggcccagtacacctccaagacatgcagcaactgtgggtttaccatcaccagcgccgactacgacagggtgctggagaagctgaagaagacagcaacaggctggatgaccacaattaacggcaaggagctgaaggtggagggccagattacctactacaacagatacaagagacagaacgtagtcaaggacctgtccgtcgagctggatagactgagcgaagaatctgtgaacaacgacatctcctcctggacaaagggcagaagcggagaagctctgagcctcctgaagaaaagattctcccatagacccgtgcaggagaagttcgtgtgcctgaactgcggcttcgagacacacgcagccgagcaagccgccctgaacatcgccagatcctggctgttcctgcggagccaggagtacaagaaataccagacaaacaagacaaccggcaacaccgataagagagccttcgtcgagacctggcagtccttttaccggaagaagcttaaggaggtgtggaaacctgccgtgcggtctggcggatctggcggaggctccacaagcagcctggagagcgacctgttcagggacgtggccgtggtgttcagccaggaggagtgggagcagctggtgcccacccagagggacctgtacagggacgtgatgctggagacctacaacaacctggtgagcctgggcctggccatcagcaagcccgacgtgatcagcttcctggagcagggcaaggagccctggatggtggagaaggccgccaccggcggcctgtgccccgtgctggagagcaggaccagccccaagaaaaagagaaaagtctaagctgccttctgcggggcttgccttctggccatgcccttcttctctcccttgcacctgtacctcttggtctttgaataaagcctgagtaggaaggctagcaaaaaaaaaaaaaaaaaaaaaaaaaaaaaaaaaaaaaaaaaaaaaaaaaaaaaaaaaaaaaaaaaaaaaaaaaaaaaaaa

SEQ ID NO: 3754 - RNA, 5419 nt, synthetic construct
  source 1..5419: mol_type = other RNA
aggaaataagagagaaaagaagagtaagaagaaatataagagccaccatggcccctaagaagaagcgtaaagtgagccgggtgaacggcagcggcagcggcggcggcatgaaccacgaccaggagttcgacccccctaaggtgtaccctcccgtccccgccgagaagagaaagcccatccgggtcctgagcctgttcgatggcatcgccaccggtctgctggtgctgaaggacctgggcatccaggtggataggtacattgcctccgaggtgtgcgaggactccatcaccgtgggaatggtgcgtcatcagggcaagatcatgtacgtgggcgacgtgcggagcgtgacacagaagcatatccaggagtggggccctttcgacctggtgatcggcggcagcccttgcaatgacctgagcatcgtgaacccagcccggaagggcctgtacgagggaaccggcagactgttcttcgagttttacagactgctgcacgacgcccggcctaaggaaggcgacgaccggcccttcttttggctgttcgagaatgtggtggccatgggagtcagcgacaagcgggatattagccggttcctggagagcaaccccgtgatgatcgatgccaaggaagtgagcgccgcccaccgggccagatacttctggggcaatctgcctggcatgaacagacccctggccagcaccgtgaacgacaagctggagctgcaggagtgcctggagcacggccggatcgccaagttcagcaaggtgagaaccatcaccacccgaagcaacagcatcaaacaaggcaaggaccagcactttcctgtgttcatgaacgagaaggaggacatcctgtggtgtaccgagatggagagagtgttcgggttcccagtccactacacagatgtcagcaacatgtctagactggccagacagagactgctgggaagaagctggtccgtccctgtgatcagacacctgttcgcccctctgaaggagtacttcgcctgcgtgagcagcggcaacagcaacgccaacagccggggccccagcttctctagcggcctggtgccactgtccctgagagggagccacatgggccccatggagatctacaaaaccgtgagcgcctggaagcggcagcctgtgcgcgtgctgagcctgtttcggaatatcgataaagtcctgaaaagcctgggattcctggagagcggctctggctccggcggtggcaccctgaagtacgtggaggatgtgacaaacgtggtcagacgggatgtggagaagtggggccccttcgatctggtgtacggcagcacccaacccctgggcagctcttgtgaccggtgccctggctggtacatgtttcagttccaccggatcctgcagtacgccctgccgagacaggagtcccagcggccattcttttggattttcatggacaacttgctgctgaccgaggatgaccaggaaactaccactcggttcctgcagaccgaagccgtgaccctgcaggacgtgagaggccgggactaccagaacgccatgcgggtgtggtccaacatccctggactgaaaagcaagcacgcacctctgacccctaaagaagaggagtacctgcaggcccaggtgcggagcagaagcaagctggacgcccctaaggtggatctgctggtgaagaattgcctcctgcccctgagagagtacttcaagtatttcagccagaatagtctgcccctgggcggcccaagcagcggcgcccctcctcccagcggcggcagcccagccggctccccaacctctaccgaggagggcacctctgagtccgccacccccgagagcggccctggcacctccaccgagcccagcgagggcagcgcacccggcagccctgccggcagccccacctccacagaggagggaaccagcaccgagcccagcgaaggcagcgccccaggcaccagcaccgagcctagtgagggcggctctggcggcggcagcgcccaggagattaaacggatcaacaagatcagaagaagacttgtgaaagacagcaacaccaagaaggccggcaagacaggccccatgaaaaccctgctggttagagtgatgacacccgatctgagagagcggctggaaaacctgagaaagaagcctgaaaatatcccccagcccatcagcaatacatctagagccaacctgaataagctgctgaccgattacaccgaaatgaagaaggcgatcctgcatgtgtactgggaagagttccagaaggaccctgtgggcctgatgagccgggtggcccagcctgccagcaagaagatcgatcagaacaagctgaaacctgagatggacgagaagggcaacctgaccaccgccggctttgcctgctctcagtgtggccagcccctgttcgtgtacaagctggagcaggtgtctgagaagggcaaggcttacaccaactacttcggacggtgcaatgtggccgagcacgaaaagctgatcctgctggcccagctgaagcccgagaaggatagcgacgaagccgtgacatatagcctgggaaagtttgggcagagggccctggatttctacagcattcatgtgaccaaggagtccacccaccccgtgaagcccctggcccagatcgccggaaacagatacgcctccggacctgtgggaaaggccctgagcgacgcatgtatgggcacaatcgcctccttcctgtctaagtaccaggacatcatcatcgaacaccagaaggtggtgaagggcaaccagaagagactggagagcctgcgggagctggccggcaaggaaaacctggaataccctagcgtgaccctgccacctcagcctcacaccaaggagggcgttgatgcctacaacgaagtgatcgcccgggtgcgaatgtgggtgaacctgaacctgtggcagaagctgaagctaagcagagatgatgccaagcctctgctgagactgaagggattcccttcctttcctctggtcgagagacaggccaacgaagtggactggtgggacatggtgtgtaacgtgaagaagctgatcaacgagaaaaaggaggatggcaaggtgttttggcagaatctggctggctacaagagacaggaagccctgagaccatacctgagcagcgaggaagatcggaagaagggaaagaaattcgctcggtaccagctgggcgacctgctgctgcacctggaaaagaagcacggcgaggactggggaaaggtgtacgacgaggcctgggagcggattgacaagaaagtggaaggcctgagcaagcacatcaagctggaagaggaacggagaagcgaggacgcccagagcaaggccgccctgaccgactggctgcgggctaaggccagcttcgtgatcgagggcctgaaggaggccgacaaggacgagttctgcagatgcgagctgaagctgcagaagtggtacggggacctgcggggaaagcccttcgccatcgaagccgagaacagcatcctggacatcagcggcttcagcaagcagtacaactgtgccttcatctggcagaaggacggcgtgaagaagctgaacctgtacctgatcatcaactacttcaagggcggcaagctgcggttcaagaagatcaaacctgaagccttcgaagccaacagattctacaccgtgatcaacaaaaagagcggcgagatcgtgcccatggaggtgaacttcaacttcgacgaccccaacctgatcatcctgcctctggcctttggcaagagacagggcagagaattcatctggaacgacctgctgtccctggaaaccggcagcctgaagctggccaacggaagagtgatcgagaagacactgtacaacagaagaacccggcaggatgagcctgccctgttcgtggccctgaccttcgagcggcgggaggtcctggactcctccaatatcaaaccaatgaacctgatcggcgtggcaagaggcgaaaacatccccgccgtgatcgccctgaccgaccccgagggctgcccactgagccggtttaaggatagcctgggaaacccaacccacatcctgagaatcggcgagagctataaggagaagcagcggaccatccaggccaagaaggaggtggagcagcggagagccggcggctacagccggaagtacgccagcaaagccaagaatctggcagacgatatggtgagaaacaccgctagagatctgctgtactacgccgtgacccaggatgccatgctgatcttcgccaacctgagccggggcttcggccggcagggcaagcggaccttcatggccgagagacagtacacacggatggaggactggctgaccgccaagctggcctacgagggcctgagcaagacctacctgtccaagacactggcccagtacacctccaagacatgcagcaactgtgggtttaccatcaccagcgccgactacgacagggtgctggagaagctgaagaagacagcaacaggctggatgaccacaattaacggcaaggagctgaaggtggagggccagattacctactacaacagatacaagagacagaacgtagtcaaggacctgtccgtcgagctggatagactgagcgaagaatctgtgaacaacgacatctcctcctggacaaagggcagaagcggagaagctctgagcctcctgaagaaaagattctcccatagacccgtgcaggagaagttcgtgtgcctgaactgcggcttcgagacacacgcagccgagcaagccgccctgaacatcgccagatcctggctgttcctgcggagccaggagtacaagaaataccagacaaacaagacaaccggcaacaccgataagagagccttcgtcgagacctggcagtccttttaccggaagaagcttaaggaggtgtggaaacctgccgtgcggtctggcggatctggcggaggctccacaagccaggccggcagcgacctgttcagggacgtggccgtggtgttcagccaggaggagtgggagcagctggcccccacccagagggacctgtacagggacgtgatgctggagacctacagcaacctggtgagcctgggcctggccgtgagcaagcccgacgtgatcagcttcctggagcagggcaaggagccctggaccgtggagggcgtggccaccggcggcctgtgccccgtgctgaagagcaggaccagccccaagaaaaagagaaaagtctaagctgccttctgcggggcttgccttctggccatgcccttcttctctcccttgcacctgtacctcttggtctttgaataaagcctgagtaggaaggctagcaaaaaaaaaaaaaaaaaaaaaaaaaaaaaaaaaaaaaaaaaaaaaaaaaaaaaaaaaaaaaaaaaaaaaaaaaaaaaaaa

SEQ ID NO: 3755 - RNA, 5419 nt, synthetic construct
  source 1..5419: mol_type = other RNA
aggaaataagagagaaaagaagagtaagaagaaatataagagccaccatggcccctaagaagaagcgtaaagtgagccgggtgaacggcagcggcagcggcggcggcatgaaccacgaccaggagttcgacccccctaaggtgtaccctcccgtccccgccgagaagagaaagcccatccgggtcctgagcctgttcgatggcatcgccaccggtctgctggtgctgaaggacctgggcatccaggtggataggtacattgcctccgaggtgtgcgaggactccatcaccgtgggaatggtgcgtcatcagggcaagatcatgtacgtgggcgacgtgcggagcgtgacacagaagcatatccaggagtggggccctttcgacctggtgatcggcggcagcccttgcaatgacctgagcatcgtgaacccagcccggaagggcctgtacgagggaaccggcagactgttcttcgagttttacagactgctgcacgacgcccggcctaaggaaggcgacgaccggcccttcttttggctgttcgagaatgtggtggccatgggagtcagcgacaagcgggatattagccggttcctggagagcaaccccgtgatgatcgatgccaaggaagtgagcgccgcccaccgggccagatacttctggggcaatctgcctggcatgaacagacccctggccagcaccgtgaacgacaagctggagctgcaggagtgcctggagcacggccggatcgccaagttcagcaaggtgagaaccatcaccacccgaagcaacagcatcaaacaaggcaaggaccagcactttcctgtgttcatgaacgagaaggaggacatcctgtggtgtaccgagatggagagagtgttcgggttcccagtccactacacagatgtcagcaacatgtctagactggccagacagagactgctgggaagaagctggtccgtccctgtgatcagacacctgttcgcccctctgaaggagtacttcgcctgcgtgagcagcggcaacagcaacgccaacagccggggccccagcttctctagcggcctggtgccactgtccctgagagggagccacatgggccccatggagatctacaaaaccgtgagcgcctggaagcggcagcctgtgcgcgtgctgagcctgtttcggaatatcgataaagtcctgaaaagcctgggattcctggagagcggctctggctccggcggtggcaccctgaagtacgtggaggatgtgacaaacgtggtcagacgggatgtggagaagtggggccccttcgatctggtgtacggcagcacccaacccctgggcagctcttgtgaccggtgccctggctggtacatgtttcagttccaccggatcctgcagtacgccctgccgagacaggagtcccagcggccattcttttggattttcatggacaacttgctgctgaccgaggatgaccaggaaactaccactcggttcctgcagaccgaagccgtgaccctgcaggacgtgagaggccgggactaccagaacgccatgcgggtgtggtccaacatccctggactgaaaagcaagcacgcacctctgacccctaaagaagaggagtacctgcaggcccaggtgcggagcagaagcaagctggacgcccctaaggtggatctgctggtgaagaattgcctcctgcccctgagagagtacttcaagtatttcagccagaatagtctgcccctgggcggcccaagcagcggcgcccctcctcccagcggcggcagcccagccggctccccaacctctaccgaggagggcacctctgagtccgccacccccgagagcggccctggcacctccaccgagcccagcgagggcagcgcacccggcagccctgccggcagccccacctccacagaggagggaaccagcaccgagcccagcgaaggcagcgccccaggcaccagcaccgagcctagtgagggcggctctggcggcggcagcgcccaggagattaaacggatcaacaagatcagaagaagacttgtgaaagacagcaacaccaagaaggccggcaagacaggccccatgaaaaccctgctggttagagtgatgacacccgatctgagagagcggctggaaaacctgagaaagaagcctgaaaatatcccccagcccatcagcaatacatctagagccaacctgaataagctgctgaccgattacaccgaaatgaagaaggcgatcctgcatgtgtactgggaagagttccagaaggaccctgtgggcctgatgagccgggtggcccagcctgccagcaagaagatcgatcagaacaagctgaaacctgagatggacgagaagggcaacctgaccaccgccggctttgcctgctctcagtgtggccagcccctgttcgtgtacaagctggagcaggtgtctgagaagggcaaggcttacaccaactacttcggacggtgcaatgtggccgagcacgaaaagctgatcctgctggcccagctgaagcccgagaaggatagcgacgaagccgtgacatatagcctgggaaagtttgggcagagggccctggatttctacagcattcatgtgaccaaggagtccacccaccccgtgaagcccctggcccagatcgccggaaacagatacgcctccggacctgtgggaaaggccctgagcgacgcatgtatgggcacaatcgcctccttcctgtctaagtaccaggacatcatcatcgaacaccagaaggtggtgaagggcaaccagaagagactggagagcctgcgggagctggccggcaaggaaaacctggaataccctagcgtgaccctgccacctcagcctcacaccaaggagggcgttgatgcctacaacgaagtgatcgcccgggtgcgaatgtgggtgaacctgaacctgtggcagaagctgaagctaagcagagatgatgccaagcctctgctgagactgaagggattcccttcctttcctctggtcgagagacaggccaacgaagtggactggtgggacatggtgtgtaacgtgaagaagctgatcaacgagaaaaaggaggatggcaaggtgttttggcagaatctggctggctacaagagacaggaagccctgagaccatacctgagcagcgaggaagatcggaagaagggaaagaaattcgctcggtaccagctgggcgacctgctgctgcacctggaaaagaagcacggcgaggactggggaaaggtgtacgacgaggcctgggagcggattgacaagaaagtggaaggcctgagcaagcacatcaagctggaagaggaacggagaagcgaggacgcccagagcaaggccgccctgaccgactggctgcgggctaaggccagcttcgtgatcgagggcctgaaggaggccgacaaggacgagttctgcagatgcgagctgaagctgcagaagtggtacggggacctgcggggaaagcccttcgccatcgaagccgagaacagcatcctggacatcagcggcttcagcaagcagtacaactgtgccttcatctggcagaaggacggcgtgaagaagctgaacctgtacctgatcatcaactacttcaagggcggcaagctgcggttcaagaagatcaaacctgaagccttcgaagccaacagattctacaccgtgatcaacaaaaagagcggcgagatcgtgcccatggaggtgaacttcaacttcgacgaccccaacctgatcatcctgcctctggcctttggcaagagacagggcagagaattcatctggaacgacctgctgtccctggaaaccggcagcctgaagctggccaacggaagagtgatcgagaagacactgtacaacagaagaacccggcaggatgagcctgccctgttcgtggccctgaccttcgagcggcgggaggtcctggactcctccaatatcaaaccaatgaacctgatcggcgtggcaagaggcgaaaacatccccgccgtgatcgccctgaccgaccccgagggctgcccactgagccggtttaaggatagcctgggaaacccaacccacatcctgagaatcggcgagagctataaggagaagcagcggaccatccaggccaagaaggaggtggagcagcggagagccggcggctacagccggaagtacgccagcaaagccaagaatctggcagacgatatggtgagaaacaccgctagagatctgctgtactacgccgtgacccaggatgccatgctgatcttcgccaacctgagccggggcttcggccggcagggcaagcggaccttcatggccgagagacagtacacacggatggaggactggctgaccgccaagctggcctacgagggcctgagcaagacctacctgtccaagacactggcccagtacacctccaagacatgcagcaactgtgggtttaccatcaccagcgccgactacgacagggtgctggagaagctgaagaagacagcaacaggctggatgaccacaattaacggcaaggagctgaaggtggagggccagattacctactacaacagatacaagagacagaacgtagtcaaggacctgtccgtcgagctggatagactgagcgaagaatctgtgaacaacgacatctcctcctggacaaagggcagaagcggagaagctctgagcctcctgaagaaaagattctcccatagacccgtgcaggagaagttcgtgtgcctgaactgcggcttcgagacacacgcagccgagcaagccgccctgaacatcgccagatcctggctgttcctgcggagccaggagtacaagaaataccagacaaacaagacaaccggcaacaccgataagagagccttcgtcgagacctggcagtccttttaccggaagaagcttaaggaggtgtggaaacctgccgtgcggtctggcggatctggcggaggctccacaagcagccaggagcccgtgaccttcgccgacgtggccgtggtgttcacccccgaggagtgggtgttcctggacagcacccagaggagcctgtacagggacgtgatgctggagaactacaggaacctggccagcgtggccggcgaccagctgaggaagcccaacgccagcagcgacctggagcagaggggcgagcagtggaacaccgagaggggcgtgatcagcgacacctgccccgagccccagctgaccagccccaagaaaaagagaaaagtctaagctgccttctgcggggcttgccttctggccatgcccttcttctctcccttgcacctgtacctcttggtctttgaataaagcctgagtaggaaggctagcaaaaaaaaaaaaaaaaaaaaaaaaaaaaaaaaaaaaaaaaaaaaaaaaaaaaaaaaaaaaaaaaaaaaaaaaaaaaaaaa

SEQ ID NO: 3756 - RNA, 5419 nt, synthetic construct
  source 1..5419: mol_type = other RNA
aggaaataagagagaaaagaagagtaagaagaaatataagagccaccatggcccctaagaagaagcgtaaagtgagccgggtgaacggcagcggcagcggcggcggcatgaaccacgaccaggagttcgacccccctaaggtgtaccctcccgtccccgccgagaagagaaagcccatccgggtcctgagcctgttcgatggcatcgccaccggtctgctggtgctgaaggacctgggcatccaggtggataggtacattgcctccgaggtgtgcgaggactccatcaccgtgggaatggtgcgtcatcagggcaagatcatgtacgtgggcgacgtgcggagcgtgacacagaagcatatccaggagtggggccctttcgacctggtgatcggcggcagcccttgcaatgacctgagcatcgtgaacccagcccggaagggcctgtacgagggaaccggcagactgttcttcgagttttacagactgctgcacgacgcccggcctaaggaaggcgacgaccggcccttcttttggctgttcgagaatgtggtggccatgggagtcagcgacaagcgggatattagccggttcctggagagcaaccccgtgatgatcgatgccaaggaagtgagcgccgcccaccgggccagatacttctggggcaatctgcctggcatgaacagacccctggccagcaccgtgaacgacaagctggagctgcaggagtgcctggagcacggccggatcgccaagttcagcaaggtgagaaccatcaccacccgaagcaacagcatcaaacaaggcaaggaccagcactttcctgtgttcatgaacgagaaggaggacatcctgtggtgtaccgagatggagagagtgttcgggttcccagtccactacacagatgtcagcaacatgtctagactggccagacagagactgctgggaagaagctggtccgtccctgtgatcagacacctgttcgcccctctgaaggagtacttcgcctgcgtgagcagcggcaacagcaacgccaacagccggggccccagcttctctagcggcctggtgccactgtccctgagagggagccacatgggccccatggagatctacaaaaccgtgagcgcctggaagcggcagcctgtgcgcgtgctgagcctgtttcggaatatcgataaagtcctgaaaagcctgggattcctggagagcggctctggctccggcggtggcaccctgaagtacgtggaggatgtgacaaacgtggtcagacgggatgtggagaagtggggccccttcgatctggtgtacggcagcacccaacccctgggcagctcttgtgaccggtgccctggctggtacatgtttcagttccaccggatcctgcagtacgccctgccgagacaggagtcccagcggccattcttttggattttcatggacaacttgctgctgaccgaggatgaccaggaaactaccactcggttcctgcagaccgaagccgtgaccctgcaggacgtgagaggccgggactaccagaacgccatgcgggtgtggtccaacatccctggactgaaaagcaagcacgcacctctgacccctaaagaagaggagtacctgcaggcccaggtgcggagcagaagcaagctggacgcccctaaggtggatctgctggtgaagaattgcctcctgcccctgagagagtacttcaagtatttcagccagaatagtctgcccctgggcggcccaagcagcggcgcccctcctcccagcggcggcagcccagccggctccccaacctctaccgaggagggcacctctgagtccgccacccccgagagcggccctggcacctccaccgagcccagcgagggcagcgcacccggcagccctgccggcagccccacctccacagaggagggaaccagcaccgagcccagcgaaggcagcgccccaggcaccagcaccgagcctagtgagggcggctctggcggcggcagcgcccaggagattaaacggatcaacaagatcagaagaagacttgtgaaagacagcaacaccaagaaggccggcaagacaggccccatgaaaaccctgctggttagagtgatgacacccgatctgagagagcggctggaaaacctgagaaagaagcctgaaaatatcccccagcccatcagcaatacatctagagccaacctgaataagctgctgaccgattacaccgaaatgaagaaggcgatcctgcatgtgtactgggaagagttccagaaggaccctgtgggcctgatgagccgggtggcccagcctgccagcaagaagatcgatcagaacaagctgaaacctgagatggacgagaagggcaacctgaccaccgccggctttgcctgctctcagtgtggccagcccctgttcgtgtacaagctggagcaggtgtctgagaagggcaaggcttacaccaactacttcggacggtgcaatgtggccgagcacgaaaagctgatcctgctggcccagctgaagcccgagaaggatagcgacgaagccgtgacatatagcctgggaaagtttgggcagagggccctggatttctacagcattcatgtgaccaaggagtccacccaccccgtgaagcccctggcccagatcgccggaaacagatacgcctccggacctgtgggaaaggccctgagcgacgcatgtatgggcacaatcgcctccttcctgtctaagtaccaggacatcatcatcgaacaccagaaggtggtgaagggcaaccagaagagactggagagcctgcgggagctggccggcaaggaaaacctggaataccctagcgtgaccctgccacctcagcctcacaccaaggagggcgttgatgcctacaacgaagtgatcgcccgggtgcgaatgtgggtgaacctgaacctgtggcagaagctgaagctaagcagagatgatgccaagcctctgctgagactgaagggattcccttcctttcctctggtcgagagacaggccaacgaagtggactggtgggacatggtgtgtaacgtgaagaagctgatcaacgagaaaaaggaggatggcaaggtgttttggcagaatctggctggctacaagagacaggaagccctgagaccatacctgagcagcgaggaagatcggaagaagggaaagaaattcgctcggtaccagctgggcgacctgctgctgcacctggaaaagaagcacggcgaggactggggaaaggtgtacgacgaggcctgggagcggattgacaagaaagtggaaggcctgagcaagcacatcaagctggaagaggaacggagaagcgaggacgcccagagcaaggccgccctgaccgactggctgcgggctaaggccagcttcgtgatcgagggcctgaaggaggccgacaaggacgagttctgcagatgcgagctgaagctgcagaagtggtacggggacctgcggggaaagcccttcgccatcgaagccgagaacagcatcctggacatcagcggcttcagcaagcagtacaactgtgccttcatctggcagaaggacggcgtgaagaagctgaacctgtacctgatcatcaactacttcaagggcggcaagctgcggttcaagaagatcaaacctgaagccttcgaagccaacagattctacaccgtgatcaacaaaaagagcggcgagatcgtgcccatggaggtgaacttcaacttcgacgaccccaacctgatcatcctgcctctggcctttggcaagagacagggcagagaattcatctggaacgacctgctgtccctggaaaccggcagcctgaagctggccaacggaagagtgatcgagaagacactgtacaacagaagaacccggcaggatgagcctgccctgttcgtggccctgaccttcgagcggcgggaggtcctggactcctccaatatcaaaccaatgaacctgatcggcgtggcaagaggcgaaaacatccccgccgtgatcgccctgaccgaccccgagggctgcccactgagccggtttaaggatagcctgggaaacccaacccacatcctgagaatcggcgagagctataaggagaagcagcggaccatccaggccaagaaggaggtggagcagcggagagccggcggctacagccggaagtacgccagcaaagccaagaatctggcagacgatatggtgagaaacaccgctagagatctgctgtactacgccgtgacccaggatgccatgctgatcttcgccaacctgagccggggcttcggccggcagggcaagcggaccttcatggccgagagacagtacacacggatggaggactggctgaccgccaagctggcctacgagggcctgagcaagacctacctgtccaagacactggcccagtacacctccaagacatgcagcaactgtgggtttaccatcaccagcgccgactacgacagggtgctggagaagctgaagaagacagcaacaggctggatgaccacaattaacggcaaggagctgaaggtggagggccagattacctactacaacagatacaagagacagaacgtagtcaaggacctgtccgtcgagctggatagactgagcgaagaatctgtgaacaacgacatctcctcctggacaaagggcagaagcggagaagctctgagcctcctgaagaaaagattctcccatagacccgtgcaggagaagttcgtgtgcctgaactgcggcttcgagacacacgcagccgagcaagccgccctgaacatcgccagatcctggctgttcctgcggagccaggagtacaagaaataccagacaaacaagacaaccggcaacaccgataagagagccttcgtcgagacctggcagtccttttaccggaagaagcttaaggaggtgtggaaacctgccgtgcggtctggcggatctggcggaggctccacaagccccctgaccttcgaggacgtggccctgtacttcagcgaggaggagtggctgatcatggaccccaaccagaggaccctgtacctggacgtgatgcaggagctgtacgagaacgtgaccagcctgggcctgaagctgaagaacgacaccggcaacgacccccccgtgagcctgcccaccctggagatccagcccagcggctgcgaggtggtgaggaaggccaccatgaaggacgccgagaccaccaccagccccaagaaaaagagaaaagtctaagctgccttctgcggggcttgccttctggccatgcccttcttctctcccttgcacctgtacctcttggtctttgaataaagcctgagtaggaaggctagcaaaaaaaaaaaaaaaaaaaaaaaaaaaaaaaaaaaaaaaaaaaaaaaaaaaaaaaaaaaaaaaaaaaaaaaaaaaaaaaa

SEQ ID NO: 3757 - RNA, 5419 nt, synthetic construct
  source 1..5419: mol_type = other RNA
aggaaataagagagaaaagaagagtaagaagaaatataagagccaccatggcccctaagaagaagcgtaaagtgagccgggtgaacggcagcggcagcggcggcggcatgaaccacgaccaggagttcgacccccctaaggtgtaccctcccgtccccgccgagaagagaaagcccatccgggtcctgagcctgttcgatggcatcgccaccggtctgctggtgctgaaggacctgggcatccaggtggataggtacattgcctccgaggtgtgcgaggactccatcaccgtgggaatggtgcgtcatcagggcaagatcatgtacgtgggcgacgtgcggagcgtgacacagaagcatatccaggagtggggccctttcgacctggtgatcggcggcagcccttgcaatgacctgagcatcgtgaacccagcccggaagggcctgtacgagggaaccggcagactgttcttcgagttttacagactgctgcacgacgcccggcctaaggaaggcgacgaccggcccttcttttggctgttcgagaatgtggtggccatgggagtcagcgacaagcgggatattagccggttcctggagagcaaccccgtgatgatcgatgccaaggaagtgagcgccgcccaccgggccagatacttctggggcaatctgcctggcatgaacagacccctggccagcaccgtgaacgacaagctggagctgcaggagtgcctggagcacggccggatcgccaagttcagcaaggtgagaaccatcaccacccgaagcaacagcatcaaacaaggcaaggaccagcactttcctgtgttcatgaacgagaaggaggacatcctgtggtgtaccgagatggagagagtgttcgggttcccagtccactacacagatgtcagcaacatgtctagactggccagacagagactgctgggaagaagctggtccgtccctgtgatcagacacctgttcgcccctctgaaggagtacttcgcctgcgtgagcagcggcaacagcaacgccaacagccggggccccagcttctctagcggcctggtgccactgtccctgagagggagccacatgggccccatggagatctacaaaaccgtgagcgcctggaagcggcagcctgtgcgcgtgctgagcctgtttcggaatatcgataaagtcctgaaaagcctgggattcctggagagcggctctggctccggcggtggcaccctgaagtacgtggaggatgtgacaaacgtggtcagacgggatgtggagaagtggggccccttcgatctggtgtacggcagcacccaacccctgggcagctcttgtgaccggtgccctggctggtacatgtttcagttccaccggatcctgcagtacgccctgccgagacaggagtcccagcggccattcttttggattttcatggacaacttgctgctgaccgaggatgaccaggaaactaccactcggttcctgcagaccgaagccgtgaccctgcaggacgtgagaggccgggactaccagaacgccatgcgggtgtggtccaacatccctggactgaaaagcaagcacgcacctctgacccctaaagaagaggagtacctgcaggcccaggtgcggagcagaagcaagctggacgcccctaaggtggatctgctggtgaagaattgcctcctgcccctgagagagtacttcaagtatttcagccagaatagtctgcccctgggcggcccaagcagcggcgcccctcctcccagcggcggcagcccagccggctccccaacctctaccgaggagggcacctctgagtccgccacccccgagagcggccctggcacctccaccgagcccagcgagggcagcgcacccggcagccctgccggcagccccacctccacagaggagggaaccagcaccgagcccagcgaaggcagcgccccaggcaccagcaccgagcctagtgagggcggctctggcggcggcagcgcccaggagattaaacggatcaacaagatcagaagaagacttgtgaaagacagcaacaccaagaaggccggcaagacaggccccatgaaaaccctgctggttagagtgatgacacccgatctgagagagcggctggaaaacctgagaaagaagcctgaaaatatcccccagcccatcagcaatacatctagagccaacctgaataagctgctgaccgattacaccgaaatgaagaaggcgatcctgcatgtgtactgggaagagttccagaaggaccctgtgggcctgatgagccgggtggcccagcctgccagcaagaagatcgatcagaacaagctgaaacctgagatggacgagaagggcaacctgaccaccgccggctttgcctgctctcagtgtggccagcccctgttcgtgtacaagctggagcaggtgtctgagaagggcaaggcttacaccaactacttcggacggtgcaatgtggccgagcacgaaaagctgatcctgctggcccagctgaagcccgagaaggatagcgacgaagccgtgacatatagcctgggaaagtttgggcagagggccctggatttctacagcattcatgtgaccaaggagtccacccaccccgtgaagcccctggcccagatcgccggaaacagatacgcctccggacctgtgggaaaggccctgagcgacgcatgtatgggcacaatcgcctccttcctgtctaagtaccaggacatcatcatcgaacaccagaaggtggtgaagggcaaccagaagagactggagagcctgcgggagctggccggcaaggaaaacctggaataccctagcgtgaccctgccacctcagcctcacaccaaggagggcgttgatgcctacaacgaagtgatcgcccgggtgcgaatgtgggtgaacctgaacctgtggcagaagctgaagctaagcagagatgatgccaagcctctgctgagactgaagggattcccttcctttcctctggtcgagagacaggccaacgaagtggactggtgggacatggtgtgtaacgtgaagaagctgatcaacgagaaaaaggaggatggcaaggtgttttggcagaatctggctggctacaagagacaggaagccctgagaccatacctgagcagcgaggaagatcggaagaagggaaagaaattcgctcggtaccagctgggcgacctgctgctgcacctggaaaagaagcacggcgaggactggggaaaggtgtacgacgaggcctgggagcggattgacaagaaagtggaaggcctgagcaagcacatcaagctggaagaggaacggagaagcgaggacgcccagagcaaggccgccctgaccgactggctgcgggctaaggccagcttcgtgatcgagggcctgaaggaggccgacaaggacgagttctgcagatgcgagctgaagctgcagaagtggtacggggacctgcggggaaagcccttcgccatcgaagccgagaacagcatcctggacatcagcggcttcagcaagcagtacaactgtgccttcatctggcagaaggacggcgtgaagaagctgaacctgtacctgatcatcaactacttcaagggcggcaagctgcggttcaagaagatcaaacctgaagccttcgaagccaacagattctacaccgtgatcaacaaaaagagcggcgagatcgtgcccatggaggtgaacttcaacttcgacgaccccaacctgatcatcctgcctctggcctttggcaagagacagggcagagaattcatctggaacgacctgctgtccctggaaaccggcagcctgaagctggccaacggaagagtgatcgagaagacactgtacaacagaagaacccggcaggatgagcctgccctgttcgtggccctgaccttcgagcggcgggaggtcctggactcctccaatatcaaaccaatgaacctgatcggcgtggcaagaggcgaaaacatccccgccgtgatcgccctgaccgaccccgagggctgcccactgagccggtttaaggatagcctgggaaacccaacccacatcctgagaatcggcgagagctataaggagaagcagcggaccatccaggccaagaaggaggtggagcagcggagagccggcggctacagccggaagtacgccagcaaagccaagaatctggcagacgatatggtgagaaacaccgctagagatctgctgtactacgccgtgacccaggatgccatgctgatcttcgccaacctgagccggggcttcggccggcagggcaagcggaccttcatggccgagagacagtacacacggatggaggactggctgaccgccaagctggcctacgagggcctgagcaagacctacctgtccaagacactggcccagtacacctccaagacatgcagcaactgtgggtttaccatcaccagcgccgactacgacagggtgctggagaagctgaagaagacagcaacaggctggatgaccacaattaacggcaaggagctgaaggtggagggccagattacctactacaacagatacaagagacagaacgtagtcaaggacctgtccgtcgagctggatagactgagcgaagaatctgtgaacaacgacatctcctcctggacaaagggcagaagcggagaagctctgagcctcctgaagaaaagattctcccatagacccgtgcaggagaagttcgtgtgcctgaactgcggcttcgagacacacgcagccgagcaagccgccctgaacatcgccagatcctggctgttcctgcggagccaggagtacaagaaataccagacaaacaagacaaccggcaacaccgataagagagccttcgtcgagacctggcagtccttttaccggaagaagcttaaggaggtgtggaaacctgccgtgcggtctggcggatctggcggaggctccacaagcagcaggaagcccgtgagcttcgccgacgtggccgtgtacttcagccccgaggagtggggctgcctgaggcccgtgcagagggccctgtacagggacgtgatgagggagacctacggccacctgggcgccctgggcttccaggacaccaagcccgccctgatcagctggatggaggaggaggccgagctgtggggcagcgacgccagggaccccgagctgggcgagtgcctgagcgaggacaccaccagccccaagaaaaagagaaaagtctaagctgccttctgcggggcttgccttctggccatgcccttcttctctcccttgcacctgtacctcttggtctttgaataaagcctgagtaggaaggctagcaaaaaaaaaaaaaaaaaaaaaaaaaaaaaaaaaaaaaaaaaaaaaaaaaaaaaaaaaaaaaaaaaaaaaaaaaaaaaaaa

SEQ ID NO: 3758 - RNA, 5419 nt, synthetic construct
  source 1..5419: mol_type = other RNA
aggaaataagagagaaaagaagagtaagaagaaatataagagccaccatggcccctaagaagaagcgtaaagtgagccgggtgaacggcagcggcagcggcggcggcatgaaccacgaccaggagttcgacccccctaaggtgtaccctcccgtccccgccgagaagagaaagcccatccgggtcctgagcctgttcgatggcatcgccaccggtctgctggtgctgaaggacctgggcatccaggtggataggtacattgcctccgaggtgtgcgaggactccatcaccgtgggaatggtgcgtcatcagggcaagatcatgtacgtgggcgacgtgcggagcgtgacacagaagcatatccaggagtggggccctttcgacctggtgatcggcggcagcccttgcaatgacctgagcatcgtgaacccagcccggaagggcctgtacgagggaaccggcagactgttcttcgagttttacagactgctgcacgacgcccggcctaaggaaggcgacgaccggcccttcttttggctgttcgagaatgtggtggccatgggagtcagcgacaagcgggatattagccggttcctggagagcaaccccgtgatgatcgatgccaaggaagtgagcgccgcccaccgggccagatacttctggggcaatctgcctggcatgaacagacccctggccagcaccgtgaacgacaagctggagctgcaggagtgcctggagcacggccggatcgccaagttcagcaaggtgagaaccatcaccacccgaagcaacagcatcaaacaaggcaaggaccagcactttcctgtgttcatgaacgagaaggaggacatcctgtggtgtaccgagatggagagagtgttcgggttcccagtccactacacagatgtcagcaacatgtctagactggccagacagagactgctgggaagaagctggtccgtccctgtgatcagacacctgttcgcccctctgaaggagtacttcgcctgcgtgagcagcggcaacagcaacgccaacagccggggccccagcttctctagcggcctggtgccactgtccctgagagggagccacatgggccccatggagatctacaaaaccgtgagcgcctggaagcggcagcctgtgcgcgtgctgagcctgtttcggaatatcgataaagtcctgaaaagcctgggattcctggagagcggctctggctccggcggtggcaccctgaagtacgtggaggatgtgacaaacgtggtcagacgggatgtggagaagtggggccccttcgatctggtgtacggcagcacccaacccctgggcagctcttgtgaccggtgccctggctggtacatgtttcagttccaccggatcctgcagtacgccctgccgagacaggagtcccagcggccattcttttggattttcatggacaacttgctgctgaccgaggatgaccaggaaactaccactcggttcctgcagaccgaagccgtgaccctgcaggacgtgagaggccgggactaccagaacgccatgcgggtgtggtccaacatccctggactgaaaagcaagcacgcacctctgacccctaaagaagaggagtacctgcaggcccaggtgcggagcagaagcaagctggacgcccctaaggtggatctgctggtgaagaattgcctcctgcccctgagagagtacttcaagtatttcagccagaatagtctgcccctgggcggcccaagcagcggcgcccctcctcccagcggcggcagcccagccggctccccaacctctaccgaggagggcacctctgagtccgccacccccgagagcggccctggcacctccaccgagcccagcgagggcagcgcacccggcagccctgccggcagccccacctccacagaggagggaaccagcaccgagcccagcgaaggcagcgccccaggcaccagcaccgagcctagtgagggcggctctggcggcggcagcgcccaggagattaaacggatcaacaagatcagaagaagacttgtgaaagacagcaacaccaagaaggccggcaagacaggccccatgaaaaccctgctggttagagtgatgacacccgatctgagagagcggctggaaaacctgagaaagaagcctgaaaatatcccccagcccatcagcaatacatctagagccaacctgaataagctgctgaccgattacaccgaaatgaagaaggcgatcctgcatgtgtactgggaagagttccagaaggaccctgtgggcctgatgagccgggtggcccagcctgccagcaagaagatcgatcagaacaagctgaaacctgagatggacgagaagggcaacctgaccaccgccggctttgcctgctctcagtgtggccagcccctgttcgtgtacaagctggagcaggtgtctgagaagggcaaggcttacaccaactacttcggacggtgcaatgtggccgagcacgaaaagctgatcctgctggcccagctgaagcccgagaaggatagcgacgaagccgtgacatatagcctgggaaagtttgggcagagggccctggatttctacagcattcatgtgaccaaggagtccacccaccccgtgaagcccctggcccagatcgccggaaacagatacgcctccggacctgtgggaaaggccctgagcgacgcatgtatgggcacaatcgcctccttcctgtctaagtaccaggacatcatcatcgaacaccagaaggtggtgaagggcaaccagaagagactggagagcctgcgggagctggccggcaaggaaaacctggaataccctagcgtgaccctgccacctcagcctcacaccaaggagggcgttgatgcctacaacgaagtgatcgcccgggtgcgaatgtgggtgaacctgaacctgtggcagaagctgaagctaagcagagatgatgccaagcctctgctgagactgaagggattcccttcctttcctctggtcgagagacaggccaacgaagtggactggtgggacatggtgtgtaacgtgaagaagctgatcaacgagaaaaaggaggatggcaaggtgttttggcagaatctggctggctacaagagacaggaagccctgagaccatacctgagcagcgaggaagatcggaagaagggaaagaaattcgctcggtaccagctgggcgacctgctgctgcacctggaaaagaagcacggcgaggactggggaaaggtgtacgacgaggcctgggagcggattgacaagaaagtggaaggcctgagcaagcacatcaagctggaagaggaacggagaagcgaggacgcccagagcaaggccgccctgaccgactggctgcgggctaaggccagcttcgtgatcgagggcctgaaggaggccgacaaggacgagttctgcagatgcgagctgaagctgcagaagtggtacggggacctgcggggaaagcccttcgccatcgaagccgagaacagcatcctggacatcagcggcttcagcaagcagtacaactgtgccttcatctggcagaaggacggcgtgaagaagctgaacctgtacctgatcatcaactacttcaagggcggcaagctgcggttcaagaagatcaaacctgaagccttcgaagccaacagattctacaccgtgatcaacaaaaagagcggcgagatcgtgcccatggaggtgaacttcaacttcgacgaccccaacctgatcatcctgcctctggcctttggcaagagacagggcagagaattcatctggaacgacctgctgtccctggaaaccggcagcctgaagctggccaacggaagagtgatcgagaagacactgtacaacagaagaacccggcaggatgagcctgccctgttcgtggccctgaccttcgagcggcgggaggtcctggactcctccaatatcaaaccaatgaacctgatcggcgtggcaagaggcgaaaacatccccgccgtgatcgccctgaccgaccccgagggctgcccactgagccggtttaaggatagcctgggaaacccaacccacatcctgagaatcggcgagagctataaggagaagcagcggaccatccaggccaagaaggaggtggagcagcggagagccggcggctacagccggaagtacgccagcaaagccaagaatctggcagacgatatggtgagaaacaccgctagagatctgctgtactacgccgtgacccaggatgccatgctgatcttcgccaacctgagccggggcttcggccggcagggcaagcggaccttcatggccgagagacagtacacacggatggaggactggctgaccgccaagctggcctacgagggcctgagcaagacctacctgtccaagacactggcccagtacacctccaagacatgcagcaactgtgggtttaccatcaccagcgccgactacgacagggtgctggagaagctgaagaagacagcaacaggctggatgaccacaattaacggcaaggagctgaaggtggagggccagattacctactacaacagatacaagagacagaacgtagtcaaggacctgtccgtcgagctggatagactgagcgaagaatctgtgaacaacgacatctcctcctggacaaagggcagaagcggagaagctctgagcctcctgaagaaaagattctcccatagacccgtgcaggagaagttcgtgtgcctgaactgcggcttcgagacacacgcagccgagcaagccgccctgaacatcgccagatcctggctgttcctgcggagccaggagtacaagaaataccagacaaacaagacaaccggcaacaccgataagagagccttcgtcgagacctggcagtccttttaccggaagaagcttaaggaggtgtggaaacctgccgtgcggtctggcggatctggcggaggctccacaagcagccaggagcccgtgagcttcctggacgtggccgtggacttcacccaggaggagtggcagcagctggaccccgtgcagaggaccacctacagggacgtgatgctggagaactacagccacctggtggccctgggctacgacagcgccaagcccaacgtgatcgtgaagctggagcagggcgaggagccctgggtggccgagggcgacctgccctgcaggagcaggcccgaggaggtgtggcagaccagccccaagaaaaagagaaaagtctaagctgccttctgcggggcttgccttctggccatgcccttcttctctcccttgcacctgtacctcttggtctttgaataaagcctgagtaggaaggctagcaaaaaaaaaaaaaaaaaaaaaaaaaaaaaaaaaaaaaaaaaaaaaaaaaaaaaaaaaaaaaaaaaaaaaaaaaaaaaaaa

SEQ ID NO: 3759 - RNA, 5419 nt, synthetic construct
  source 1..5419: mol_type = other RNA
aggaaataagagagaaaagaagagtaagaagaaatataagagccaccatggcccctaagaagaagcgtaaagtgagccgggtgaacggcagcggcagcggcggcggcatgaaccacgaccaggagttcgacccccctaaggtgtaccctcccgtccccgccgagaagagaaagcccatccgggtcctgagcctgttcgatggcatcgccaccggtctgctggtgctgaaggacctgggcatccaggtggataggtacattgcctccgaggtgtgcgaggactccatcaccgtgggaatggtgcgtcatcagggcaagatcatgtacgtgggcgacgtgcggagcgtgacacagaagcatatccaggagtggggccctttcgacctggtgatcggcggcagcccttgcaatgacctgagcatcgtgaacccagcccggaagggcctgtacgagggaaccggcagactgttcttcgagttttacagactgctgcacgacgcccggcctaaggaaggcgacgaccggcccttcttttggctgttcgagaatgtggtggccatgggagtcagcgacaagcgggatattagccggttcctggagagcaaccccgtgatgatcgatgccaaggaagtgagcgccgcccaccgggccagatacttctggggcaatctgcctggcatgaacagacccctggccagcaccgtgaacgacaagctggagctgcaggagtgcctggagcacggccggatcgccaagttcagcaaggtgagaaccatcaccacccgaagcaacagcatcaaacaaggcaaggaccagcactttcctgtgttcatgaacgagaaggaggacatcctgtggtgtaccgagatggagagagtgttcgggttcccagtccactacacagatgtcagcaacatgtctagactggccagacagagactgctgggaagaagctggtccgtccctgtgatcagacacctgttcgcccctctgaaggagtacttcgcctgcgtgagcagcggcaacagcaacgccaacagccggggccccagcttctctagcggcctggtgccactgtccctgagagggagccacatgggccccatggagatctacaaaaccgtgagcgcctggaagcggcagcctgtgcgcgtgctgagcctgtttcggaatatcgataaagtcctgaaaagcctgggattcctggagagcggctctggctccggcggtggcaccctgaagtacgtggaggatgtgacaaacgtggtcagacgggatgtggagaagtggggccccttcgatctggtgtacggcagcacccaacccctgggcagctcttgtgaccggtgccctggctggtacatgtttcagttccaccggatcctgcagtacgccctgccgagacaggagtcccagcggccattcttttggattttcatggacaacttgctgctgaccgaggatgaccaggaaactaccactcggttcctgcagaccgaagccgtgaccctgcaggacgtgagaggccgggactaccagaacgccatgcgggtgtggtccaacatccctggactgaaaagcaagcacgcacctctgacccctaaagaagaggagtacctgcaggcccaggtgcggagcagaagcaagctggacgcccctaaggtggatctgctggtgaagaattgcctcctgcccctgagagagtacttcaagtatttcagccagaatagtctgcccctgggcggcccaagcagcggcgcccctcctcccagcggcggcagcccagccggctccccaacctctaccgaggagggcacctctgagtccgccacccccgagagcggccctggcacctccaccgagcccagcgagggcagcgcacccggcagccctgccggcagccccacctccacagaggagggaaccagcaccgagcccagcgaaggcagcgccccaggcaccagcaccgagcctagtgagggcggctctggcggcggcagcgcccaggagattaaacggatcaacaagatcagaagaagacttgtgaaagacagcaacaccaagaaggccggcaagacaggccccatgaaaaccctgctggttagagtgatgacacccgatctgagagagcggctggaaaacctgagaaagaagcctgaaaatatcccccagcccatcagcaatacatctagagccaacctgaataagctgctgaccgattacaccgaaatgaagaaggcgatcctgcatgtgtactgggaagagttccagaaggaccctgtgggcctgatgagccgggtggcccagcctgccagcaagaagatcgatcagaacaagctgaaacctgagatggacgagaagggcaacctgaccaccgccggctttgcctgctctcagtgtggccagcccctgttcgtgtacaagctggagcaggtgtctgagaagggcaaggcttacaccaactacttcggacggtgcaatgtggccgagcacgaaaagctgatcctgctggcccagctgaagcccgagaaggatagcgacgaagccgtgacatatagcctgggaaagtttgggcagagggccctggatttctacagcattcatgtgaccaaggagtccacccaccccgtgaagcccctggcccagatcgccggaaacagatacgcctccggacctgtgggaaaggccctgagcgacgcatgtatgggcacaatcgcctccttcctgtctaagtaccaggacatcatcatcgaacaccagaaggtggtgaagggcaaccagaagagactggagagcctgcgggagctggccggcaaggaaaacctggaataccctagcgtgaccctgccacctcagcctcacaccaaggagggcgttgatgcctacaacgaagtgatcgcccgggtgcgaatgtgggtgaacctgaacctgtggcagaagctgaagctaagcagagatgatgccaagcctctgctgagactgaagggattcccttcctttcctctggtcgagagacaggccaacgaagtggactggtgggacatggtgtgtaacgtgaagaagctgatcaacgagaaaaaggaggatggcaaggtgttttggcagaatctggctggctacaagagacaggaagccctgagaccatacctgagcagcgaggaagatcggaagaagggaaagaaattcgctcggtaccagctgggcgacctgctgctgcacctggaaaagaagcacggcgaggactggggaaaggtgtacgacgaggcctgggagcggattgacaagaaagtggaaggcctgagcaagcacatcaagctggaagaggaacggagaagcgaggacgcccagagcaaggccgccctgaccgactggctgcgggctaaggccagcttcgtgatcgagggcctgaaggaggccgacaaggacgagttctgcagatgcgagctgaagctgcagaagtggtacggggacctgcggggaaagcccttcgccatcgaagccgagaacagcatcctggacatcagcggcttcagcaagcagtacaactgtgccttcatctggcagaaggacggcgtgaagaagctgaacctgtacctgatcatcaactacttcaagggcggcaagctgcggttcaagaagatcaaacctgaagccttcgaagccaacagattctacaccgtgatcaacaaaaagagcggcgagatcgtgcccatggaggtgaacttcaacttcgacgaccccaacctgatcatcctgcctctggcctttggcaagagacagggcagagaattcatctggaacgacctgctgtccctggaaaccggcagcctgaagctggccaacggaagagtgatcgagaagacactgtacaacagaagaacccggcaggatgagcctgccctgttcgtggccctgaccttcgagcggcgggaggtcctggactcctccaatatcaaaccaatgaacctgatcggcgtggcaagaggcgaaaacatccccgccgtgatcgccctgaccgaccccgagggctgcccactgagccggtttaaggatagcctgggaaacccaacccacatcctgagaatcggcgagagctataaggagaagcagcggaccatccaggccaagaaggaggtggagcagcggagagccggcggctacagccggaagtacgccagcaaagccaagaatctggcagacgatatggtgagaaacaccgctagagatctgctgtactacgccgtgacccaggatgccatgctgatcttcgccaacctgagccggggcttcggccggcagggcaagcggaccttcatggccgagagacagtacacacggatggaggactggctgaccgccaagctggcctacgagggcctgagcaagacctacctgtccaagacactggcccagtacacctccaagacatgcagcaactgtgggtttaccatcaccagcgccgactacgacagggtgctggagaagctgaagaagacagcaacaggctggatgaccacaattaacggcaaggagctgaaggtggagggccagattacctactacaacagatacaagagacagaacgtagtcaaggacctgtccgtcgagctggatagactgagcgaagaatctgtgaacaacgacatctcctcctggacaaagggcagaagcggagaagctctgagcctcctgaagaaaagattctcccatagacccgtgcaggagaagttcgtgtgcctgaactgcggcttcgagacacacgcagccgagcaagccgccctgaacatcgccagatcctggctgttcctgcggagccaggagtacaagaaataccagacaaacaagacaaccggcaacaccgataagagagccttcgtcgagacctggcagtccttttaccggaagaagcttaaggaggtgtggaaacctgccgtgcggtctggcggatctggcggaggctccacaagcagccagggcctggtgaccttcgaggacgtggccgtgtacttcagcctggaggagtgggagaggctggacgccgcccagagggacctgtacaaggaggtgatgcaggagaactacggcatcctggtgagcctgggctaccccatccccaagcccgacctgatcttcaggctggagcagggcgaggagccctgggtgcccgacagccccaggcccgaggagggcgacatcgtgaccggcgtgtacaccagccccaagaaaaagagaaaagtctaagctgccttctgcggggcttgccttctggccatgcccttcttctctcccttgcacctgtacctcttggtctttgaataaagcctgagtaggaaggctagcaaaaaaaaaaaaaaaaaaaaaaaaaaaaaaaaaaaaaaaaaaaaaaaaaaaaaaaaaaaaaaaaaaaaaaaaaaaaaaaa

SEQ ID NO: 3760 - RNA, 5419 nt, synthetic construct
  source 1..5419: mol_type = other RNA
aggaaataagagagaaaagaagagtaagaagaaatataagagccaccatggcccctaagaagaagcgtaaagtgagccgggtgaacggcagcggcagcggcggcggcatgaaccacgaccaggagttcgacccccctaaggtgtaccctcccgtccccgccgagaagagaaagcccatccgggtcctgagcctgttcgatggcatcgccaccggtctgctggtgctgaaggacctgggcatccaggtggataggtacattgcctccgaggtgtgcgaggactccatcaccgtgggaatggtgcgtcatcagggcaagatcatgtacgtgggcgacgtgcggagcgtgacacagaagcatatccaggagtggggccctttcgacctggtgatcggcggcagcccttgcaatgacctgagcatcgtgaacccagcccggaagggcctgtacgagggaaccggcagactgttcttcgagttttacagactgctgcacgacgcccggcctaaggaaggcgacgaccggcccttcttttggctgttcgagaatgtggtggccatgggagtcagcgacaagcgggatattagccggttcctggagagcaaccccgtgatgatcgatgccaaggaagtgagcgccgcccaccgggccagatacttctggggcaatctgcctggcatgaacagacccctggccagcaccgtgaacgacaagctggagctgcaggagtgcctggagcacggccggatcgccaagttcagcaaggtgagaaccatcaccacccgaagcaacagcatcaaacaaggcaaggaccagcactttcctgtgttcatgaacgagaaggaggacatcctgtggtgtaccgagatggagagagtgttcgggttcccagtccactacacagatgtcagcaacatgtctagactggccagacagagactgctgggaagaagctggtccgtccctgtgatcagacacctgttcgcccctctgaaggagtacttcgcctgcgtgagcagcggcaacagcaacgccaacagccggggccccagcttctctagcggcctggtgccactgtccctgagagggagccacatgggccccatggagatctacaaaaccgtgagcgcctggaagcggcagcctgtgcgcgtgctgagcctgtttcggaatatcgataaagtcctgaaaagcctgggattcctggagagcggctctggctccggcggtggcaccctgaagtacgtggaggatgtgacaaacgtggtcagacgggatgtggagaagtggggccccttcgatctggtgtacggcagcacccaacccctgggcagctcttgtgaccggtgccctggctggtacatgtttcagttccaccggatcctgcagtacgccctgccgagacaggagtcccagcggccattcttttggattttcatggacaacttgctgctgaccgaggatgaccaggaaactaccactcggttcctgcagaccgaagccgtgaccctgcaggacgtgagaggccgggactaccagaacgccatgcgggtgtggtccaacatccctggactgaaaagcaagcacgcacctctgacccctaaagaagaggagtacctgcaggcccaggtgcggagcagaagcaagctggacgcccctaaggtggatctgctggtgaagaattgcctcctgcccctgagagagtacttcaagtatttcagccagaatagtctgcccctgggcggcccaagcagcggcgcccctcctcccagcggcggcagcccagccggctccccaacctctaccgaggagggcacctctgagtccgccacccccgagagcggccctggcacctccaccgagcccagcgagggcagcgcacccggcagccctgccggcagccccacctccacagaggagggaaccagcaccgagcccagcgaaggcagcgccccaggcaccagcaccgagcctagtgagggcggctctggcggcggcagcgcccaggagattaaacggatcaacaagatcagaagaagacttgtgaaagacagcaacaccaagaaggccggcaagacaggccccatgaaaaccctgctggttagagtgatgacacccgatctgagagagcggctggaaaacctgagaaagaagcctgaaaatatcccccagcccatcagcaatacatctagagccaacctgaataagctgctgaccgattacaccgaaatgaagaaggcgatcctgcatgtgtactgggaagagttccagaaggaccctgtgggcctgatgagccgggtggcccagcctgccagcaagaagatcgatcagaacaagctgaaacctgagatggacgagaagggcaacctgaccaccgccggctttgcctgctctcagtgtggccagcccctgttcgtgtacaagctggagcaggtgtctgagaagggcaaggcttacaccaactacttcggacggtgcaatgtggccgagcacgaaaagctgatcctgctggcccagctgaagcccgagaaggatagcgacgaagccgtgacatatagcctgggaaagtttgggcagagggccctggatttctacagcattcatgtgaccaaggagtccacccaccccgtgaagcccctggcccagatcgccggaaacagatacgcctccggacctgtgggaaaggccctgagcgacgcatgtatgggcacaatcgcctccttcctgtctaagtaccaggacatcatcatcgaacaccagaaggtggtgaagggcaaccagaagagactggagagcctgcgggagctggccggcaaggaaaacctggaataccctagcgtgaccctgccacctcagcctcacaccaaggagggcgttgatgcctacaacgaagtgatcgcccgggtgcgaatgtgggtgaacctgaacctgtggcagaagctgaagctaagcagagatgatgccaagcctctgctgagactgaagggattcccttcctttcctctggtcgagagacaggccaacgaagtggactggtgggacatggtgtgtaacgtgaagaagctgatcaacgagaaaaaggaggatggcaaggtgttttggcagaatctggctggctacaagagacaggaagccctgagaccatacctgagcagcgaggaagatcggaagaagggaaagaaattcgctcggtaccagctgggcgacctgctgctgcacctggaaaagaagcacggcgaggactggggaaaggtgtacgacgaggcctgggagcggattgacaagaaagtggaaggcctgagcaagcacatcaagctggaagaggaacggagaagcgaggacgcccagagcaaggccgccctgaccgactggctgcgggctaaggccagcttcgtgatcgagggcctgaaggaggccgacaaggacgagttctgcagatgcgagctgaagctgcagaagtggtacggggacctgcggggaaagcccttcgccatcgaagccgagaacagcatcctggacatcagcggcttcagcaagcagtacaactgtgccttcatctggcagaaggacggcgtgaagaagctgaacctgtacctgatcatcaactacttcaagggcggcaagctgcggttcaagaagatcaaacctgaagccttcgaagccaacagattctacaccgtgatcaacaaaaagagcggcgagatcgtgcccatggaggtgaacttcaacttcgacgaccccaacctgatcatcctgcctctggcctttggcaagagacagggcagagaattcatctggaacgacctgctgtccctggaaaccggcagcctgaagctggccaacggaagagtgatcgagaagacactgtacaacagaagaacccggcaggatgagcctgccctgttcgtggccctgaccttcgagcggcgggaggtcctggactcctccaatatcaaaccaatgaacctgatcggcgtggcaagaggcgaaaacatccccgccgtgatcgccctgaccgaccccgagggctgcccactgagccggtttaaggatagcctgggaaacccaacccacatcctgagaatcggcgagagctataaggagaagcagcggaccatccaggccaagaaggaggtggagcagcggagagccggcggctacagccggaagtacgccagcaaagccaagaatctggcagacgatatggtgagaaacaccgctagagatctgctgtactacgccgtgacccaggatgccatgctgatcttcgccaacctgagccggggcttcggccggcagggcaagcggaccttcatggccgagagacagtacacacggatggaggactggctgaccgccaagctggcctacgagggcctgagcaagacctacctgtccaagacactggcccagtacacctccaagacatgcagcaactgtgggtttaccatcaccagcgccgactacgacagggtgctggagaagctgaagaagacagcaacaggctggatgaccacaattaacggcaaggagctgaaggtggagggccagattacctactacaacagatacaagagacagaacgtagtcaaggacctgtccgtcgagctggatagactgagcgaagaatctgtgaacaacgacatctcctcctggacaaagggcagaagcggagaagctctgagcctcctgaagaaaagattctcccatagacccgtgcaggagaagttcgtgtgcctgaactgcggcttcgagacacacgcagccgagcaagccgccctgaacatcgccagatcctggctgttcctgcggagccaggagtacaagaaataccagacaaacaagacaaccggcaacaccgataagagagccttcgtcgagacctggcagtccttttaccggaagaagcttaaggaggtgtggaaacctgccgtgcggtctggcggatctggcggaggctccacaagcagccaggagagcgtgagcttcgaggacgtggccgtgtacttcaccaggaaccagtgggccagcctggacagcgcccagaggaccctgtacagggaggtgatgctggagaactacgccaacgtgaccagcctggccgccttccccttccccaagcccgacctgatcttccagctggagaggggcaaggcccccggcggcctggacccctggacccccatcaggagggaggtgaggggcgtgtgcaccagccccaagaaaaagagaaaagtctaagctgccttctgcggggcttgccttctggccatgcccttcttctctcccttgcacctgtacctcttggtctttgaataaagcctgagtaggaaggctagcaaaaaaaaaaaaaaaaaaaaaaaaaaaaaaaaaaaaaaaaaaaaaaaaaaaaaaaaaaaaaaaaaaaaaaaaaaaaaaaa

SEQ ID NO: 3761 - RNA, 5419 nt, synthetic construct
  source 1..5419: mol_type = other RNA
aggaaataagagagaaaagaagagtaagaagaaatataagagccaccatggcccctaagaagaagcgtaaagtgagccgggtgaacggcagcggcagcggcggcggcatgaaccacgaccaggagttcgacccccctaaggtgtaccctcccgtccccgccgagaagagaaagcccatccgggtcctgagcctgttcgatggcatcgccaccggtctgctggtgctgaaggacctgggcatccaggtggataggtacattgcctccgaggtgtgcgaggactccatcaccgtgggaatggtgcgtcatcagggcaagatcatgtacgtgggcgacgtgcggagcgtgacacagaagcatatccaggagtggggccctttcgacctggtgatcggcggcagcccttgcaatgacctgagcatcgtgaacccagcccggaagggcctgtacgagggaaccggcagactgttcttcgagttttacagactgctgcacgacgcccggcctaaggaaggcgacgaccggcccttcttttggctgttcgagaatgtggtggccatgggagtcagcgacaagcgggatattagccggttcctggagagcaaccccgtgatgatcgatgccaaggaagtgagcgccgcccaccgggccagatacttctggggcaatctgcctggcatgaacagacccctggccagcaccgtgaacgacaagctggagctgcaggagtgcctggagcacggccggatcgccaagttcagcaaggtgagaaccatcaccacccgaagcaacagcatcaaacaaggcaaggaccagcactttcctgtgttcatgaacgagaaggaggacatcctgtggtgtaccgagatggagagagtgttcgggttcccagtccactacacagatgtcagcaacatgtctagactggccagacagagactgctgggaagaagctggtccgtccctgtgatcagacacctgttcgcccctctgaaggagtacttcgcctgcgtgagcagcggcaacagcaacgccaacagccggggccccagcttctctagcggcctggtgccactgtccctgagagggagccacatgggccccatggagatctacaaaaccgtgagcgcctggaagcggcagcctgtgcgcgtgctgagcctgtttcggaatatcgataaagtcctgaaaagcctgggattcctggagagcggctctggctccggcggtggcaccctgaagtacgtggaggatgtgacaaacgtggtcagacgggatgtggagaagtggggccccttcgatctggtgtacggcagcacccaacccctgggcagctcttgtgaccggtgccctggctggtacatgtttcagttccaccggatcctgcagtacgccctgccgagacaggagtcccagcggccattcttttggattttcatggacaacttgctgctgaccgaggatgaccaggaaactaccactcggttcctgcagaccgaagccgtgaccctgcaggacgtgagaggccgggactaccagaacgccatgcgggtgtggtccaacatccctggactgaaaagcaagcacgcacctctgacccctaaagaagaggagtacctgcaggcccaggtgcggagcagaagcaagctggacgcccctaaggtggatctgctggtgaagaattgcctcctgcccctgagagagtacttcaagtatttcagccagaatagtctgcccctgggcggcccaagcagcggcgcccctcctcccagcggcggcagcccagccggctccccaacctctaccgaggagggcacctctgagtccgccacccccgagagcggccctggcacctccaccgagcccagcgagggcagcgcacccggcagccctgccggcagccccacctccacagaggagggaaccagcaccgagcccagcgaaggcagcgccccaggcaccagcaccgagcctagtgagggcggctctggcggcggcagcgcccaggagattaaacggatcaacaagatcagaagaagacttgtgaaagacagcaacaccaagaaggccggcaagacaggccccatgaaaaccctgctggttagagtgatgacacccgatctgagagagcggctggaaaacctgagaaagaagcctgaaaatatcccccagcccatcagcaatacatctagagccaacctgaataagctgctgaccgattacaccgaaatgaagaaggcgatcctgcatgtgtactgggaagagttccagaaggaccctgtgggcctgatgagccgggtggcccagcctgccagcaagaagatcgatcagaacaagctgaaacctgagatggacgagaagggcaacctgaccaccgccggctttgcctgctctcagtgtggccagcccctgttcgtgtacaagctggagcaggtgtctgagaagggcaaggcttacaccaactacttcggacggtgcaatgtggccgagcacgaaaagctgatcctgctggcccagctgaagcccgagaaggatagcgacgaagccgtgacatatagcctgggaaagtttgggcagagggccctggatttctacagcattcatgtgaccaaggagtccacccaccccgtgaagcccctggcccagatcgccggaaacagatacgcctccggacctgtgggaaaggccctgagcgacgcatgtatgggcacaatcgcctccttcctgtctaagtaccaggacatcatcatcgaacaccagaaggtggtgaagggcaaccagaagagactggagagcctgcgggagctggccggcaaggaaaacctggaataccctagcgtgaccctgccacctcagcctcacaccaaggagggcgttgatgcctacaacgaagtgatcgcccgggtgcgaatgtgggtgaacctgaacctgtggcagaagctgaagctaagcagagatgatgccaagcctctgctgagactgaagggattcccttcctttcctctggtcgagagacaggccaacgaagtggactggtgggacatggtgtgtaacgtgaagaagctgatcaacgagaaaaaggaggatggcaaggtgttttggcagaatctggctggctacaagagacaggaagccctgagaccatacctgagcagcgaggaagatcggaagaagggaaagaaattcgctcggtaccagctgggcgacctgctgctgcacctggaaaagaagcacggcgaggactggggaaaggtgtacgacgaggcctgggagcggattgacaagaaagtggaaggcctgagcaagcacatcaagctggaagaggaacggagaagcgaggacgcccagagcaaggccgccctgaccgactggctgcgggctaaggccagcttcgtgatcgagggcctgaaggaggccgacaaggacgagttctgcagatgcgagctgaagctgcagaagtggtacggggacctgcggggaaagcccttcgccatcgaagccgagaacagcatcctggacatcagcggcttcagcaagcagtacaactgtgccttcatctggcagaaggacggcgtgaagaagctgaacctgtacctgatcatcaactacttcaagggcggcaagctgcggttcaagaagatcaaacctgaagccttcgaagccaacagattctacaccgtgatcaacaaaaagagcggcgagatcgtgcccatggaggtgaacttcaacttcgacgaccccaacctgatcatcctgcctctggcctttggcaagagacagggcagagaattcatctggaacgacctgctgtccctggaaaccggcagcctgaagctggccaacggaagagtgatcgagaagacactgtacaacagaagaacccggcaggatgagcctgccctgttcgtggccctgaccttcgagcggcgggaggtcctggactcctccaatatcaaaccaatgaacctgatcggcgtggcaagaggcgaaaacatccccgccgtgatcgccctgaccgaccccgagggctgcccactgagccggtttaaggatagcctgggaaacccaacccacatcctgagaatcggcgagagctataaggagaagcagcggaccatccaggccaagaaggaggtggagcagcggagagccggcggctacagccggaagtacgccagcaaagccaagaatctggcagacgatatggtgagaaacaccgctagagatctgctgtactacgccgtgacccaggatgccatgctgatcttcgccaacctgagccggggcttcggccggcagggcaagcggaccttcatggccgagagacagtacacacggatggaggactggctgaccgccaagctggcctacgagggcctgagcaagacctacctgtccaagacactggcccagtacacctccaagacatgcagcaactgtgggtttaccatcaccagcgccgactacgacagggtgctggagaagctgaagaagacagcaacaggctggatgaccacaattaacggcaaggagctgaaggtggagggccagattacctactacaacagatacaagagacagaacgtagtcaaggacctgtccgtcgagctggatagactgagcgaagaatctgtgaacaacgacatctcctcctggacaaagggcagaagcggagaagctctgagcctcctgaagaaaagattctcccatagacccgtgcaggagaagttcgtgtgcctgaactgcggcttcgagacacacgcagccgagcaagccgccctgaacatcgccagatcctggctgttcctgcggagccaggagtacaagaaataccagacaaacaagacaaccggcaacaccgataagagagccttcgtcgagacctggcagtccttttaccggaagaagcttaaggaggtgtggaaacctgccgtgcggtctggcggatctggcggaggctccacaagcggcatgagggtgaccttcgaggacatcgccgtgagcttcagccaggaggagtgggagtacctgggcgagggccagaaggagctgtacagggaggtgatgaaggagaactacgagaccctgatcagcctgggcaccgacagcagcgccctgacccccgagatcatcagcaggatcgagaggggcgaggagccctgcatcagggacaagcccggcagcgaggagagggagaccggcaagagcagcaccagccccaagaaaaagagaaaagtctaagctgccttctgcggggcttgccttctggccatgcccttcttctctcccttgcacctgtacctcttggtctttgaataaagcctgagtaggaaggctagcaaaaaaaaaaaaaaaaaaaaaaaaaaaaaaaaaaaaaaaaaaaaaaaaaaaaaaaaaaaaaaaaaaaaaaaaaaaaaaaa

SEQ ID NO: 3762 - RNA, 5419 nt, synthetic construct
  source 1..5419: mol_type = other RNA
aggaaataagagagaaaagaagagtaagaagaaatataagagccaccatggcccctaagaagaagcgtaaagtgagccgggtgaacggcagcggcagcggcggcggcatgaaccacgaccaggagttcgacccccctaaggtgtaccctcccgtccccgccgagaagagaaagcccatccgggtcctgagcctgttcgatggcatcgccaccggtctgctggtgctgaaggacctgggcatccaggtggataggtacattgcctccgaggtgtgcgaggactccatcaccgtgggaatggtgcgtcatcagggcaagatcatgtacgtgggcgacgtgcggagcgtgacacagaagcatatccaggagtggggccctttcgacctggtgatcggcggcagcccttgcaatgacctgagcatcgtgaacccagcccggaagggcctgtacgagggaaccggcagactgttcttcgagttttacagactgctgcacgacgcccggcctaaggaaggcgacgaccggcccttcttttggctgttcgagaatgtggtggccatgggagtcagcgacaagcgggatattagccggttcctggagagcaaccccgtgatgatcgatgccaaggaagtgagcgccgcccaccgggccagatacttctggggcaatctgcctggcatgaacagacccctggccagcaccgtgaacgacaagctggagctgcaggagtgcctggagcacggccggatcgccaagttcagcaaggtgagaaccatcaccacccgaagcaacagcatcaaacaaggcaaggaccagcactttcctgtgttcatgaacgagaaggaggacatcctgtggtgtaccgagatggagagagtgttcgggttcccagtccactacacagatgtcagcaacatgtctagactggccagacagagactgctgggaagaagctggtccgtccctgtgatcagacacctgttcgcccctctgaaggagtacttcgcctgcgtgagcagcggcaacagcaacgccaacagccggggccccagcttctctagcggcctggtgccactgtccctgagagggagccacatgggccccatggagatctacaaaaccgtgagcgcctggaagcggcagcctgtgcgcgtgctgagcctgtttcggaatatcgataaagtcctgaaaagcctgggattcctggagagcggctctggctccggcggtggcaccctgaagtacgtggaggatgtgacaaacgtggtcagacgggatgtggagaagtggggccccttcgatctggtgtacggcagcacccaacccctgggcagctcttgtgaccggtgccctggctggtacatgtttcagttccaccggatcctgcagtacgccctgccgagacaggagtcccagcggccattcttttggattttcatggacaacttgctgctgaccgaggatgaccaggaaactaccactcggttcctgcagaccgaagccgtgaccctgcaggacgtgagaggccgggactaccagaacgccatgcgggtgtggtccaacatccctggactgaaaagcaagcacgcacctctgacccctaaagaagaggagtacctgcaggcccaggtgcggagcagaagcaagctggacgcccctaaggtggatctgctggtgaagaattgcctcctgcccctgagagagtacttcaagtatttcagccagaatagtctgcccctgggcggcccaagcagcggcgcccctcctcccagcggcggcagcccagccggctccccaacctctaccgaggagggcacctctgagtccgccacccccgagagcggccctggcacctccaccgagcccagcgagggcagcgcacccggcagccctgccggcagccccacctccacagaggagggaaccagcaccgagcccagcgaaggcagcgccccaggcaccagcaccgagcctagtgagggcggctctggcggcggcagcgcccaggagattaaacggatcaacaagatcagaagaagacttgtgaaagacagcaacaccaagaaggccggcaagacaggccccatgaaaaccctgctggttagagtgatgacacccgatctgagagagcggctggaaaacctgagaaagaagcctgaaaatatcccccagcccatcagcaatacatctagagccaacctgaataagctgctgaccgattacaccgaaatgaagaaggcgatcctgcatgtgtactgggaagagttccagaaggaccctgtgggcctgatgagccgggtggcccagcctgccagcaagaagatcgatcagaacaagctgaaacctgagatggacgagaagggcaacctgaccaccgccggctttgcctgctctcagtgtggccagcccctgttcgtgtacaagctggagcaggtgtctgagaagggcaaggcttacaccaactacttcggacggtgcaatgtggccgagcacgaaaagctgatcctgctggcccagctgaagcccgagaaggatagcgacgaagccgtgacatatagcctgggaaagtttgggcagagggccctggatttctacagcattcatgtgaccaaggagtccacccaccccgtgaagcccctggcccagatcgccggaaacagatacgcctccggacctgtgggaaaggccctgagcgacgcatgtatgggcacaatcgcctccttcctgtctaagtaccaggacatcatcatcgaacaccagaaggtggtgaagggcaaccagaagagactggagagcctgcgggagctggccggcaaggaaaacctggaataccctagcgtgaccctgccacctcagcctcacaccaaggagggcgttgatgcctacaacgaagtgatcgcccgggtgcgaatgtgggtgaacctgaacctgtggcagaagctgaagctaagcagagatgatgccaagcctctgctgagactgaagggattcccttcctttcctctggtcgagagacaggccaacgaagtggactggtgggacatggtgtgtaacgtgaagaagctgatcaacgagaaaaaggaggatggcaaggtgttttggcagaatctggctggctacaagagacaggaagccctgagaccatacctgagcagcgaggaagatcggaagaagggaaagaaattcgctcggtaccagctgggcgacctgctgctgcacctggaaaagaagcacggcgaggactggggaaaggtgtacgacgaggcctgggagcggattgacaagaaagtggaaggcctgagcaagcacatcaagctggaagaggaacggagaagcgaggacgcccagagcaaggccgccctgaccgactggctgcgggctaaggccagcttcgtgatcgagggcctgaaggaggccgacaaggacgagttctgcagatgcgagctgaagctgcagaagtggtacggggacctgcggggaaagcccttcgccatcgaagccgagaacagcatcctggacatcagcggcttcagcaagcagtacaactgtgccttcatctggcagaaggacggcgtgaagaagctgaacctgtacctgatcatcaactacttcaagggcggcaagctgcggttcaagaagatcaaacctgaagccttcgaagccaacagattctacaccgtgatcaacaaaaagagcggcgagatcgtgcccatggaggtgaacttcaacttcgacgaccccaacctgatcatcctgcctctggcctttggcaagagacagggcagagaattcatctggaacgacctgctgtccctggaaaccggcagcctgaagctggccaacggaagagtgatcgagaagacactgtacaacagaagaacccggcaggatgagcctgccctgttcgtggccctgaccttcgagcggcgggaggtcctggactcctccaatatcaaaccaatgaacctgatcggcgtggcaagaggcgaaaacatccccgccgtgatcgccctgaccgaccccgagggctgcccactgagccggtttaaggatagcctgggaaacccaacccacatcctgagaatcggcgagagctataaggagaagcagcggaccatccaggccaagaaggaggtggagcagcggagagccggcggctacagccggaagtacgccagcaaagccaagaatctggcagacgatatggtgagaaacaccgctagagatctgctgtactacgccgtgacccaggatgccatgctgatcttcgccaacctgagccggggcttcggccggcagggcaagcggaccttcatggccgagagacagtacacacggatggaggactggctgaccgccaagctggcctacgagggcctgagcaagacctacctgtccaagacactggcccagtacacctccaagacatgcagcaactgtgggtttaccatcaccagcgccgactacgacagggtgctggagaagctgaagaagacagcaacaggctggatgaccacaattaacggcaaggagctgaaggtggagggccagattacctactacaacagatacaagagacagaacgtagtcaaggacctgtccgtcgagctggatagactgagcgaagaatctgtgaacaacgacatctcctcctggacaaagggcagaagcggagaagctctgagcctcctgaagaaaagattctcccatagacccgtgcaggagaagttcgtgtgcctgaactgcggcttcgagacacacgcagccgagcaagccgccctgaacatcgccagatcctggctgttcctgcggagccaggagtacaagaaataccagacaaacaagacaaccggcaacaccgataagagagccttcgtcgagacctggcagtccttttaccggaagaagcttaaggaggtgtggaaacctgccgtgcggtctggcggatctggcggaggctccacaagcagccccgtgctggtgagcttcgacgacgtgttcgtgagcttcaccagggaggagtggcaggtgctggacaacgcccagagggccctgtacggcgacgtgatgctggagacctacaggagcctggtgctgctgggccagtgcatcaccaagcccgaggtgatcttcaagctggagcagggcgtggagccctggaccggcggcgagccccacaaccagagcccccccgacgtgcaggaggtggacaccagccccaagaaaaagagaaaagtctaagctgccttctgcggggcttgccttctggccatgcccttcttctctcccttgcacctgtacctcttggtctttgaataaagcctgagtaggaaggctagcaaaaaaaaaaaaaaaaaaaaaaaaaaaaaaaaaaaaaaaaaaaaaaaaaaaaaaaaaaaaaaaaaaaaaaaaaaaaaaaa

SEQ ID NO: 3763 - RNA, 5419 nt, synthetic construct
  source 1..5419: mol_type = other RNA
aggaaataagagagaaaagaagagtaagaagaaatataagagccaccatggcccctaagaagaagcgtaaagtgagccgggtgaacggcagcggcagcggcggcggcatgaaccacgaccaggagttcgacccccctaaggtgtaccctcccgtccccgccgagaagagaaagcccatccgggtcctgagcctgttcgatggcatcgccaccggtctgctggtgctgaaggacctgggcatccaggtggataggtacattgcctccgaggtgtgcgaggactccatcaccgtgggaatggtgcgtcatcagggcaagatcatgtacgtgggcgacgtgcggagcgtgacacagaagcatatccaggagtggggccctttcgacctggtgatcggcggcagcccttgcaatgacctgagcatcgtgaacccagcccggaagggcctgtacgagggaaccggcagactgttcttcgagttttacagactgctgcacgacgcccggcctaaggaaggcgacgaccggcccttcttttggctgttcgagaatgtggtggccatgggagtcagcgacaagcgggatattagccggttcctggagagcaaccccgtgatgatcgatgccaaggaagtgagcgccgcccaccgggccagatacttctggggcaatctgcctggcatgaacagacccctggccagcaccgtgaacgacaagctggagctgcaggagtgcctggagcacggccggatcgccaagttcagcaaggtgagaaccatcaccacccgaagcaacagcatcaaacaaggcaaggaccagcactttcctgtgttcatgaacgagaaggaggacatcctgtggtgtaccgagatggagagagtgttcgggttcccagtccactacacagatgtcagcaacatgtctagactggccagacagagactgctgggaagaagctggtccgtccctgtgatcagacacctgttcgcccctctgaaggagtacttcgcctgcgtgagcagcggcaacagcaacgccaacagccggggccccagcttctctagcggcctggtgccactgtccctgagagggagccacatgggccccatggagatctacaaaaccgtgagcgcctggaagcggcagcctgtgcgcgtgctgagcctgtttcggaatatcgataaagtcctgaaaagcctgggattcctggagagcggctctggctccggcggtggcaccctgaagtacgtggaggatgtgacaaacgtggtcagacgggatgtggagaagtggggccccttcgatctggtgtacggcagcacccaacccctgggcagctcttgtgaccggtgccctggctggtacatgtttcagttccaccggatcctgcagtacgccctgccgagacaggagtcccagcggccattcttttggattttcatggacaacttgctgctgaccgaggatgaccaggaaactaccactcggttcctgcagaccgaagccgtgaccctgcaggacgtgagaggccgggactaccagaacgccatgcgggtgtggtccaacatccctggactgaaaagcaagcacgcacctctgacccctaaagaagaggagtacctgcaggcccaggtgcggagcagaagcaagctggacgcccctaaggtggatctgctggtgaagaattgcctcctgcccctgagagagtacttcaagtatttcagccagaatagtctgcccctgggcggcccaagcagcggcgcccctcctcccagcggcggcagcccagccggctccccaacctctaccgaggagggcacctctgagtccgccacccccgagagcggccctggcacctccaccgagcccagcgagggcagcgcacccggcagccctgccggcagccccacctccacagaggagggaaccagcaccgagcccagcgaaggcagcgccccaggcaccagcaccgagcctagtgagggcggctctggcggcggcagcgcccaggagattaaacggatcaacaagatcagaagaagacttgtgaaagacagcaacaccaagaaggccggcaagacaggccccatgaaaaccctgctggttagagtgatgacacccgatctgagagagcggctggaaaacctgagaaagaagcctgaaaatatcccccagcccatcagcaatacatctagagccaacctgaataagctgctgaccgattacaccgaaatgaagaaggcgatcctgcatgtgtactgggaagagttccagaaggaccctgtgggcctgatgagccgggtggcccagcctgccagcaagaagatcgatcagaacaagctgaaacctgagatggacgagaagggcaacctgaccaccgccggctttgcctgctctcagtgtggccagcccctgttcgtgtacaagctggagcaggtgtctgagaagggcaaggcttacaccaactacttcggacggtgcaatgtggccgagcacgaaaagctgatcctgctggcccagctgaagcccgagaaggatagcgacgaagccgtgacatatagcctgggaaagtttgggcagagggccctggatttctacagcattcatgtgaccaaggagtccacccaccccgtgaagcccctggcccagatcgccggaaacagatacgcctccggacctgtgggaaaggccctgagcgacgcatgtatgggcacaatcgcctccttcctgtctaagtaccaggacatcatcatcgaacaccagaaggtggtgaagggcaaccagaagagactggagagcctgcgggagctggccggcaaggaaaacctggaataccctagcgtgaccctgccacctcagcctcacaccaaggagggcgttgatgcctacaacgaagtgatcgcccgggtgcgaatgtgggtgaacctgaacctgtggcagaagctgaagctaagcagagatgatgccaagcctctgctgagactgaagggattcccttcctttcctctggtcgagagacaggccaacgaagtggactggtgggacatggtgtgtaacgtgaagaagctgatcaacgagaaaaaggaggatggcaaggtgttttggcagaatctggctggctacaagagacaggaagccctgagaccatacctgagcagcgaggaagatcggaagaagggaaagaaattcgctcggtaccagctgggcgacctgctgctgcacctggaaaagaagcacggcgaggactggggaaaggtgtacgacgaggcctgggagcggattgacaagaaagtggaaggcctgagcaagcacatcaagctggaagaggaacggagaagcgaggacgcccagagcaaggccgccctgaccgactggctgcgggctaaggccagcttcgtgatcgagggcctgaaggaggccgacaaggacgagttctgcagatgcgagctgaagctgcagaagtggtacggggacctgcggggaaagcccttcgccatcgaagccgagaacagcatcctggacatcagcggcttcagcaagcagtacaactgtgccttcatctggcagaaggacggcgtgaagaagctgaacctgtacctgatcatcaactacttcaagggcggcaagctgcggttcaagaagatcaaacctgaagccttcgaagccaacagattctacaccgtgatcaacaaaaagagcggcgagatcgtgcccatggaggtgaacttcaacttcgacgaccccaacctgatcatcctgcctctggcctttggcaagagacagggcagagaattcatctggaacgacctgctgtccctggaaaccggcagcctgaagctggccaacggaagagtgatcgagaagacactgtacaacagaagaacccggcaggatgagcctgccctgttcgtggccctgaccttcgagcggcgggaggtcctggactcctccaatatcaaaccaatgaacctgatcggcgtggcaagaggcgaaaacatccccgccgtgatcgccctgaccgaccccgagggctgcccactgagccggtttaaggatagcctgggaaacccaacccacatcctgagaatcggcgagagctataaggagaagcagcggaccatccaggccaagaaggaggtggagcagcggagagccggcggctacagccggaagtacgccagcaaagccaagaatctggcagacgatatggtgagaaacaccgctagagatctgctgtactacgccgtgacccaggatgccatgctgatcttcgccaacctgagccggggcttcggccggcagggcaagcggaccttcatggccgagagacagtacacacggatggaggactggctgaccgccaagctggcctacgagggcctgagcaagacctacctgtccaagacactggcccagtacacctccaagacatgcagcaactgtgggtttaccatcaccagcgccgactacgacagggtgctggagaagctgaagaagacagcaacaggctggatgaccacaattaacggcaaggagctgaaggtggagggccagattacctactacaacagatacaagagacagaacgtagtcaaggacctgtccgtcgagctggatagactgagcgaagaatctgtgaacaacgacatctcctcctggacaaagggcagaagcggagaagctctgagcctcctgaagaaaagattctcccatagacccgtgcaggagaagttcgtgtgcctgaactgcggcttcgagacacacgcagccgagcaagccgccctgaacatcgccagatcctggctgttcctgcggagccaggagtacaagaaataccagacaaacaagacaaccggcaacaccgataagagagccttcgtcgagacctggcagtccttttaccggaagaagcttaaggaggtgtggaaacctgccgtgcggtctggcggatctggcggaggctccacaagcttccaggagagcgtgaccttcaaggacgtggccgtggacttcacccaggaggagtggaagcagctggaccccgcccagagggacctgtacagggacgtgatgctggagaactacaggaacctggtgagcctgggcctgcccgtgttcaagcccgacgtgatcagccagctggagaggggcgaggccccctggatccccgaggtgcccaggagcatctgccagggcgaggtggtgaggaccaggaccagccccaagaaaaagagaaaagtctaagctgccttctgcggggcttgccttctggccatgcccttcttctctcccttgcacctgtacctcttggtctttgaataaagcctgagtaggaaggctagcaaaaaaaaaaaaaaaaaaaaaaaaaaaaaaaaaaaaaaaaaaaaaaaaaaaaaaaaaaaaaaaaaaaaaaaaaaaaaaaa

SEQ ID NO: 3764 - RNA, 5419 nt, synthetic construct
  source 1..5419: mol_type = other RNA
aggaaataagagagaaaagaagagtaagaagaaatataagagccaccatggcccctaagaagaagcgtaaagtgagccgggtgaacggcagcggcagcggcggcggcatgaaccacgaccaggagttcgacccccctaaggtgtaccctcccgtccccgccgagaagagaaagcccatccgggtcctgagcctgttcgatggcatcgccaccggtctgctggtgctgaaggacctgggcatccaggtggataggtacattgcctccgaggtgtgcgaggactccatcaccgtgggaatggtgcgtcatcagggcaagatcatgtacgtgggcgacgtgcggagcgtgacacagaagcatatccaggagtggggccctttcgacctggtgatcggcggcagcccttgcaatgacctgagcatcgtgaacccagcccggaagggcctgtacgagggaaccggcagactgttcttcgagttttacagactgctgcacgacgcccggcctaaggaaggcgacgaccggcccttcttttggctgttcgagaatgtggtggccatgggagtcagcgacaagcgggatattagccggttcctggagagcaaccccgtgatgatcgatgccaaggaagtgagcgccgcccaccgggccagatacttctggggcaatctgcctggcatgaacagacccctggccagcaccgtgaacgacaagctggagctgcaggagtgcctggagcacggccggatcgccaagttcagcaaggtgagaaccatcaccacccgaagcaacagcatcaaacaaggcaaggaccagcactttcctgtgttcatgaacgagaaggaggacatcctgtggtgtaccgagatggagagagtgttcgggttcccagtccactacacagatgtcagcaacatgtctagactggccagacagagactgctgggaagaagctggtccgtccctgtgatcagacacctgttcgcccctctgaaggagtacttcgcctgcgtgagcagcggcaacagcaacgccaacagccggggccccagcttctctagcggcctggtgccactgtccctgagagggagccacatgggccccatggagatctacaaaaccgtgagcgcctggaagcggcagcctgtgcgcgtgctgagcctgtttcggaatatcgataaagtcctgaaaagcctgggattcctggagagcggctctggctccggcggtggcaccctgaagtacgtggaggatgtgacaaacgtggtcagacgggatgtggagaagtggggccccttcgatctggtgtacggcagcacccaacccctgggcagctcttgtgaccggtgccctggctggtacatgtttcagttccaccggatcctgcagtacgccctgccgagacaggagtcccagcggccattcttttggattttcatggacaacttgctgctgaccgaggatgaccaggaaactaccactcggttcctgcagaccgaagccgtgaccctgcaggacgtgagaggccgggactaccagaacgccatgcgggtgtggtccaacatccctggactgaaaagcaagcacgcacctctgacccctaaagaagaggagtacctgcaggcccaggtgcggagcagaagcaagctggacgcccctaaggtggatctgctggtgaagaattgcctcctgcccctgagagagtacttcaagtatttcagccagaatagtctgcccctgggcggcccaagcagcggcgcccctcctcccagcggcggcagcccagccggctccccaacctctaccgaggagggcacctctgagtccgccacccccgagagcggccctggcacctccaccgagcccagcgagggcagcgcacccggcagccctgccggcagccccacctccacagaggagggaaccagcaccgagcccagcgaaggcagcgccccaggcaccagcaccgagcctagtgagggcggctctggcggcggcagcgcccaggagattaaacggatcaacaagatcagaagaagacttgtgaaagacagcaacaccaagaaggccggcaagacaggccccatgaaaaccctgctggttagagtgatgacacccgatctgagagagcggctggaaaacctgagaaagaagcctgaaaatatcccccagcccatcagcaatacatctagagccaacctgaataagctgctgaccgattacaccgaaatgaagaaggcgatcctgcatgtgtactgggaagagttccagaaggaccctgtgggcctgatgagccgggtggcccagcctgccagcaagaagatcgatcagaacaagctgaaacctgagatggacgagaagggcaacctgaccaccgccggctttgcctgctctcagtgtggccagcccctgttcgtgtacaagctggagcaggtgtctgagaagggcaaggcttacaccaactacttcggacggtgcaatgtggccgagcacgaaaagctgatcctgctggcccagctgaagcccgagaaggatagcgacgaagccgtgacatatagcctgggaaagtttgggcagagggccctggatttctacagcattcatgtgaccaaggagtccacccaccccgtgaagcccctggcccagatcgccggaaacagatacgcctccggacctgtgggaaaggccctgagcgacgcatgtatgggcacaatcgcctccttcctgtctaagtaccaggacatcatcatcgaacaccagaaggtggtgaagggcaaccagaagagactggagagcctgcgggagctggccggcaaggaaaacctggaataccctagcgtgaccctgccacctcagcctcacaccaaggagggcgttgatgcctacaacgaagtgatcgcccgggtgcgaatgtgggtgaacctgaacctgtggcagaagctgaagctaagcagagatgatgccaagcctctgctgagactgaagggattcccttcctttcctctggtcgagagacaggccaacgaagtggactggtgggacatggtgtgtaacgtgaagaagctgatcaacgagaaaaaggaggatggcaaggtgttttggcagaatctggctggctacaagagacaggaagccctgagaccatacctgagcagcgaggaagatcggaagaagggaaagaaattcgctcggtaccagctgggcgacctgctgctgcacctggaaaagaagcacggcgaggactggggaaaggtgtacgacgaggcctgggagcggattgacaagaaagtggaaggcctgagcaagcacatcaagctggaagaggaacggagaagcgaggacgcccagagcaaggccgccctgaccgactggctgcgggctaaggccagcttcgtgatcgagggcctgaaggaggccgacaaggacgagttctgcagatgcgagctgaagctgcagaagtggtacggggacctgcggggaaagcccttcgccatcgaagccgagaacagcatcctggacatcagcggcttcagcaagcagtacaactgtgccttcatctggcagaaggacggcgtgaagaagctgaacctgtacctgatcatcaactacttcaagggcggcaagctgcggttcaagaagatcaaacctgaagccttcgaagccaacagattctacaccgtgatcaacaaaaagagcggcgagatcgtgcccatggaggtgaacttcaacttcgacgaccccaacctgatcatcctgcctctggcctttggcaagagacagggcagagaattcatctggaacgacctgctgtccctggaaaccggcagcctgaagctggccaacggaagagtgatcgagaagacactgtacaacagaagaacccggcaggatgagcctgccctgttcgtggccctgaccttcgagcggcgggaggtcctggactcctccaatatcaaaccaatgaacctgatcggcgtggcaagaggcgaaaacatccccgccgtgatcgccctgaccgaccccgagggctgcccactgagccggtttaaggatagcctgggaaacccaacccacatcctgagaatcggcgagagctataaggagaagcagcggaccatccaggccaagaaggaggtggagcagcggagagccggcggctacagccggaagtacgccagcaaagccaagaatctggcagacgatatggtgagaaacaccgctagagatctgctgtactacgccgtgacccaggatgccatgctgatcttcgccaacctgagccggggcttcggccggcagggcaagcggaccttcatggccgagagacagtacacacggatggaggactggctgaccgccaagctggcctacgagggcctgagcaagacctacctgtccaagacactggcccagtacacctccaagacatgcagcaactgtgggtttaccatcaccagcgccgactacgacagggtgctggagaagctgaagaagacagcaacaggctggatgaccacaattaacggcaaggagctgaaggtggagggccagattacctactacaacagatacaagagacagaacgtagtcaaggacctgtccgtcgagctggatagactgagcgaagaatctgtgaacaacgacatctcctcctggacaaagggcagaagcggagaagctctgagcctcctgaagaaaagattctcccatagacccgtgcaggagaagttcgtgtgcctgaactgcggcttcgagacacacgcagccgagcaagccgccctgaacatcgccagatcctggctgttcctgcggagccaggagtacaagaaataccagacaaacaagacaaccggcaacaccgataagagagccttcgtcgagacctggcagtccttttaccggaagaagcttaaggaggtgtggaaacctgccgtgcggtctggcggatctggcggaggctccacaagcgcccaggtgcccgtgaccttcgaggacatcgccgtgtacttcagccaggaggagtgggaggacctggaggagcagcagagggagctgtacaaggacgtgatgaaggagaactacgagaccctgagcagcctgggcccccccgccgtgacccccgacatcatcagccacatcgagaggggcgaggagccctacatcaggttcgagagcggccccgaggagagggagatcggcaagagcagctgcaccagccccaagaaaaagagaaaagtctaagctgccttctgcggggcttgccttctggccatgcccttcttctctcccttgcacctgtacctcttggtctttgaataaagcctgagtaggaaggctagcaaaaaaaaaaaaaaaaaaaaaaaaaaaaaaaaaaaaaaaaaaaaaaaaaaaaaaaaaaaaaaaaaaaaaaaaaaaaaaaa

SEQ ID NO: 3765 - RNA, 5419 nt, synthetic construct
  source 1..5419: mol_type = other RNA
aggaaataagagagaaaagaagagtaagaagaaatataagagccaccatggcccctaagaagaagcgtaaagtgagccgggtgaacggcagcggcagcggcggcggcatgaaccacgaccaggagttcgacccccctaaggtgtaccctcccgtccccgccgagaagagaaagcccatccgggtcctgagcctgttcgatggcatcgccaccggtctgctggtgctgaaggacctgggcatccaggtggataggtacattgcctccgaggtgtgcgaggactccatcaccgtgggaatggtgcgtcatcagggcaagatcatgtacgtgggcgacgtgcggagcgtgacacagaagcatatccaggagtggggccctttcgacctggtgatcggcggcagcccttgcaatgacctgagcatcgtgaacccagcccggaagggcctgtacgagggaaccggcagactgttcttcgagttttacagactgctgcacgacgcccggcctaaggaaggcgacgaccggcccttcttttggctgttcgagaatgtggtggccatgggagtcagcgacaagcgggatattagccggttcctggagagcaaccccgtgatgatcgatgccaaggaagtgagcgccgcccaccgggccagatacttctggggcaatctgcctggcatgaacagacccctggccagcaccgtgaacgacaagctggagctgcaggagtgcctggagcacggccggatcgccaagttcagcaaggtgagaaccatcaccacccgaagcaacagcatcaaacaaggcaaggaccagcactttcctgtgttcatgaacgagaaggaggacatcctgtggtgtaccgagatggagagagtgttcgggttcccagtccactacacagatgtcagcaacatgtctagactggccagacagagactgctgggaagaagctggtccgtccctgtgatcagacacctgttcgcccctctgaaggagtacttcgcctgcgtgagcagcggcaacagcaacgccaacagccggggccccagcttctctagcggcctggtgccactgtccctgagagggagccacatgggccccatggagatctacaaaaccgtgagcgcctggaagcggcagcctgtgcgcgtgctgagcctgtttcggaatatcgataaagtcctgaaaagcctgggattcctggagagcggctctggctccggcggtggcaccctgaagtacgtggaggatgtgacaaacgtggtcagacgggatgtggagaagtggggccccttcgatctggtgtacggcagcacccaacccctgggcagctcttgtgaccggtgccctggctggtacatgtttcagttccaccggatcctgcagtacgccctgccgagacaggagtcccagcggccattcttttggattttcatggacaacttgctgctgaccgaggatgaccaggaaactaccactcggttcctgcagaccgaagccgtgaccctgcaggacgtgagaggccgggactaccagaacgccatgcgggtgtggtccaacatccctggactgaaaagcaagcacgcacctctgacccctaaagaagaggagtacctgcaggcccaggtgcggagcagaagcaagctggacgcccctaaggtggatctgctggtgaagaattgcctcctgcccctgagagagtacttcaagtatttcagccagaatagtctgcccctgggcggcccaagcagcggcgcccctcctcccagcggcggcagcccagccggctccccaacctctaccgaggagggcacctctgagtccgccacccccgagagcggccctggcacctccaccgagcccagcgagggcagcgcacccggcagccctgccggcagccccacctccacagaggagggaaccagcaccgagcccagcgaaggcagcgccccaggcaccagcaccgagcctagtgagggcggctctggcggcggcagcgcccaggagattaaacggatcaacaagatcagaagaagacttgtgaaagacagcaacaccaagaaggccggcaagacaggccccatgaaaaccctgctggttagagtgatgacacccgatctgagagagcggctggaaaacctgagaaagaagcctgaaaatatcccccagcccatcagcaatacatctagagccaacctgaataagctgctgaccgattacaccgaaatgaagaaggcgatcctgcatgtgtactgggaagagttccagaaggaccctgtgggcctgatgagccgggtggcccagcctgccagcaagaagatcgatcagaacaagctgaaacctgagatggacgagaagggcaacctgaccaccgccggctttgcctgctctcagtgtggccagcccctgttcgtgtacaagctggagcaggtgtctgagaagggcaaggcttacaccaactacttcggacggtgcaatgtggccgagcacgaaaagctgatcctgctggcccagctgaagcccgagaaggatagcgacgaagccgtgacatatagcctgggaaagtttgggcagagggccctggatttctacagcattcatgtgaccaaggagtccacccaccccgtgaagcccctggcccagatcgccggaaacagatacgcctccggacctgtgggaaaggccctgagcgacgcatgtatgggcacaatcgcctccttcctgtctaagtaccaggacatcatcatcgaacaccagaaggtggtgaagggcaaccagaagagactggagagcctgcgggagctggccggcaaggaaaacctggaataccctagcgtgaccctgccacctcagcctcacaccaaggagggcgttgatgcctacaacgaagtgatcgcccgggtgcgaatgtgggtgaacctgaacctgtggcagaagctgaagctaagcagagatgatgccaagcctctgctgagactgaagggattcccttcctttcctctggtcgagagacaggccaacgaagtggactggtgggacatggtgtgtaacgtgaagaagctgatcaacgagaaaaaggaggatggcaaggtgttttggcagaatctggctggctacaagagacaggaagccctgagaccatacctgagcagcgaggaagatcggaagaagggaaagaaattcgctcggtaccagctgggcgacctgctgctgcacctggaaaagaagcacggcgaggactggggaaaggtgtacgacgaggcctgggagcggattgacaagaaagtggaaggcctgagcaagcacatcaagctggaagaggaacggagaagcgaggacgcccagagcaaggccgccctgaccgactggctgcgggctaaggccagcttcgtgatcgagggcctgaaggaggccgacaaggacgagttctgcagatgcgagctgaagctgcagaagtggtacggggacctgcggggaaagcccttcgccatcgaagccgagaacagcatcctggacatcagcggcttcagcaagcagtacaactgtgccttcatctggcagaaggacggcgtgaagaagctgaacctgtacctgatcatcaactacttcaagggcggcaagctgcggttcaagaagatcaaacctgaagccttcgaagccaacagattctacaccgtgatcaacaaaaagagcggcgagatcgtgcccatggaggtgaacttcaacttcgacgaccccaacctgatcatcctgcctctggcctttggcaagagacagggcagagaattcatctggaacgacctgctgtccctggaaaccggcagcctgaagctggccaacggaagagtgatcgagaagacactgtacaacagaagaacccggcaggatgagcctgccctgttcgtggccctgaccttcgagcggcgggaggtcctggactcctccaatatcaaaccaatgaacctgatcggcgtggcaagaggcgaaaacatccccgccgtgatcgccctgaccgaccccgagggctgcccactgagccggtttaaggatagcctgggaaacccaacccacatcctgagaatcggcgagagctataaggagaagcagcggaccatccaggccaagaaggaggtggagcagcggagagccggcggctacagccggaagtacgccagcaaagccaagaatctggcagacgatatggtgagaaacaccgctagagatctgctgtactacgccgtgacccaggatgccatgctgatcttcgccaacctgagccggggcttcggccggcagggcaagcggaccttcatggccgagagacagtacacacggatggaggactggctgaccgccaagctggcctacgagggcctgagcaagacctacctgtccaagacactggcccagtacacctccaagacatgcagcaactgtgggtttaccatcaccagcgccgactacgacagggtgctggagaagctgaagaagacagcaacaggctggatgaccacaattaacggcaaggagctgaaggtggagggccagattacctactacaacagatacaagagacagaacgtagtcaaggacctgtccgtcgagctggatagactgagcgaagaatctgtgaacaacgacatctcctcctggacaaagggcagaagcggagaagctctgagcctcctgaagaaaagattctcccatagacccgtgcaggagaagttcgtgtgcctgaactgcggcttcgagacacacgcagccgagcaagccgccctgaacatcgccagatcctggctgttcctgcggagccaggagtacaagaaataccagacaaacaagacaaccggcaacaccgataagagagccttcgtcgagacctggcagtccttttaccggaagaagcttaaggaggtgtggaaacctgccgtgcggtctggcggatctggcggaggctccacaagcagctacgagggcagcgtgagcttcagggacgtggccatcgacttcagcagggaggagtggaggcacctggacctgagccagaggaacctgtacagggacgtgatgctggagacctacagccacctgctgagcgtgggctaccaggtgcccgaggccgaggtggtgatgctggagcagggcaacgagccctgggccctgcagggcgagaggccccaccagagctgccccggcgagaagctgtggaccagccccaagaaaaagagaaaagtctaagctgccttctgcggggcttgccttctggccatgcccttcttctctcccttgcacctgtacctcttggtctttgaataaagcctgagtaggaaggctagcaaaaaaaaaaaaaaaaaaaaaaaaaaaaaaaaaaaaaaaaaaaaaaaaaaaaaaaaaaaaaaaaaaaaaaaaaaaaaaaa

SEQ ID NO: 3766 - RNA, 5419 nt, synthetic construct
  source 1..5419: mol_type = other RNA
aggaaataagagagaaaagaagagtaagaagaaatataagagccaccatggcccctaagaagaagcgtaaagtgagccgggtgaacggcagcggcagcggcggcggcatgaaccacgaccaggagttcgacccccctaaggtgtaccctcccgtccccgccgagaagagaaagcccatccgggtcctgagcctgttcgatggcatcgccaccggtctgctggtgctgaaggacctgggcatccaggtggataggtacattgcctccgaggtgtgcgaggactccatcaccgtgggaatggtgcgtcatcagggcaagatcatgtacgtgggcgacgtgcggagcgtgacacagaagcatatccaggagtggggccctttcgacctggtgatcggcggcagcccttgcaatgacctgagcatcgtgaacccagcccggaagggcctgtacgagggaaccggcagactgttcttcgagttttacagactgctgcacgacgcccggcctaaggaaggcgacgaccggcccttcttttggctgttcgagaatgtggtggccatgggagtcagcgacaagcgggatattagccggttcctggagagcaaccccgtgatgatcgatgccaaggaagtgagcgccgcccaccgggccagatacttctggggcaatctgcctggcatgaacagacccctggccagcaccgtgaacgacaagctggagctgcaggagtgcctggagcacggccggatcgccaagttcagcaaggtgagaaccatcaccacccgaagcaacagcatcaaacaaggcaaggaccagcactttcctgtgttcatgaacgagaaggaggacatcctgtggtgtaccgagatggagagagtgttcgggttcccagtccactacacagatgtcagcaacatgtctagactggccagacagagactgctgggaagaagctggtccgtccctgtgatcagacacctgttcgcccctctgaaggagtacttcgcctgcgtgagcagcggcaacagcaacgccaacagccggggccccagcttctctagcggcctggtgccactgtccctgagagggagccacatgggccccatggagatctacaaaaccgtgagcgcctggaagcggcagcctgtgcgcgtgctgagcctgtttcggaatatcgataaagtcctgaaaagcctgggattcctggagagcggctctggctccggcggtggcaccctgaagtacgtggaggatgtgacaaacgtggtcagacgggatgtggagaagtggggccccttcgatctggtgtacggcagcacccaacccctgggcagctcttgtgaccggtgccctggctggtacatgtttcagttccaccggatcctgcagtacgccctgccgagacaggagtcccagcggccattcttttggattttcatggacaacttgctgctgaccgaggatgaccaggaaactaccactcggttcctgcagaccgaagccgtgaccctgcaggacgtgagaggccgggactaccagaacgccatgcgggtgtggtccaacatccctggactgaaaagcaagcacgcacctctgacccctaaagaagaggagtacctgcaggcccaggtgcggagcagaagcaagctggacgcccctaaggtggatctgctggtgaagaattgcctcctgcccctgagagagtacttcaagtatttcagccagaatagtctgcccctgggcggcccaagcagcggcgcccctcctcccagcggcggcagcccagccggctccccaacctctaccgaggagggcacctctgagtccgccacccccgagagcggccctggcacctccaccgagcccagcgagggcagcgcacccggcagccctgccggcagccccacctccacagaggagggaaccagcaccgagcccagcgaaggcagcgccccaggcaccagcaccgagcctagtgagggcggctctggcggcggcagcgcccaggagattaaacggatcaacaagatcagaagaagacttgtgaaagacagcaacaccaagaaggccggcaagacaggccccatgaaaaccctgctggttagagtgatgacacccgatctgagagagcggctggaaaacctgagaaagaagcctgaaaatatcccccagcccatcagcaatacatctagagccaacctgaataagctgctgaccgattacaccgaaatgaagaaggcgatcctgcatgtgtactgggaagagttccagaaggaccctgtgggcctgatgagccgggtggcccagcctgccagcaagaagatcgatcagaacaagctgaaacctgagatggacgagaagggcaacctgaccaccgccggctttgcctgctctcagtgtggccagcccctgttcgtgtacaagctggagcaggtgtctgagaagggcaaggcttacaccaactacttcggacggtgcaatgtggccgagcacgaaaagctgatcctgctggcccagctgaagcccgagaaggatagcgacgaagccgtgacatatagcctgggaaagtttgggcagagggccctggatttctacagcattcatgtgaccaaggagtccacccaccccgtgaagcccctggcccagatcgccggaaacagatacgcctccggacctgtgggaaaggccctgagcgacgcatgtatgggcacaatcgcctccttcctgtctaagtaccaggacatcatcatcgaacaccagaaggtggtgaagggcaaccagaagagactggagagcctgcgggagctggccggcaaggaaaacctggaataccctagcgtgaccctgccacctcagcctcacaccaaggagggcgttgatgcctacaacgaagtgatcgcccgggtgcgaatgtgggtgaacctgaacctgtggcagaagctgaagctaagcagagatgatgccaagcctctgctgagactgaagggattcccttcctttcctctggtcgagagacaggccaacgaagtggactggtgggacatggtgtgtaacgtgaagaagctgatcaacgagaaaaaggaggatggcaaggtgttttggcagaatctggctggctacaagagacaggaagccctgagaccatacctgagcagcgaggaagatcggaagaagggaaagaaattcgctcggtaccagctgggcgacctgctgctgcacctggaaaagaagcacggcgaggactggggaaaggtgtacgacgaggcctgggagcggattgacaagaaagtggaaggcctgagcaagcacatcaagctggaagaggaacggagaagcgaggacgcccagagcaaggccgccctgaccgactggctgcgggctaaggccagcttcgtgatcgagggcctgaaggaggccgacaaggacgagttctgcagatgcgagctgaagctgcagaagtggtacggggacctgcggggaaagcccttcgccatcgaagccgagaacagcatcctggacatcagcggcttcagcaagcagtacaactgtgccttcatctggcagaaggacggcgtgaagaagctgaacctgtacctgatcatcaactacttcaagggcggcaagctgcggttcaagaagatcaaacctgaagccttcgaagccaacagattctacaccgtgatcaacaaaaagagcggcgagatcgtgcccatggaggtgaacttcaacttcgacgaccccaacctgatcatcctgcctctggcctttggcaagagacagggcagagaattcatctggaacgacctgctgtccctggaaaccggcagcctgaagctggccaacggaagagtgatcgagaagacactgtacaacagaagaacccggcaggatgagcctgccctgttcgtggccctgaccttcgagcggcgggaggtcctggactcctccaatatcaaaccaatgaacctgatcggcgtggcaagaggcgaaaacatccccgccgtgatcgccctgaccgaccccgagggctgcccactgagccggtttaaggatagcctgggaaacccaacccacatcctgagaatcggcgagagctataaggagaagcagcggaccatccaggccaagaaggaggtggagcagcggagagccggcggctacagccggaagtacgccagcaaagccaagaatctggcagacgatatggtgagaaacaccgctagagatctgctgtactacgccgtgacccaggatgccatgctgatcttcgccaacctgagccggggcttcggccggcagggcaagcggaccttcatggccgagagacagtacacacggatggaggactggctgaccgccaagctggcctacgagggcctgagcaagacctacctgtccaagacactggcccagtacacctccaagacatgcagcaactgtgggtttaccatcaccagcgccgactacgacagggtgctggagaagctgaagaagacagcaacaggctggatgaccacaattaacggcaaggagctgaaggtggagggccagattacctactacaacagatacaagagacagaacgtagtcaaggacctgtccgtcgagctggatagactgagcgaagaatctgtgaacaacgacatctcctcctggacaaagggcagaagcggagaagctctgagcctcctgaagaaaagattctcccatagacccgtgcaggagaagttcgtgtgcctgaactgcggcttcgagacacacgcagccgagcaagccgccctgaacatcgccagatcctggctgttcctgcggagccaggagtacaagaaataccagacaaacaagacaaccggcaacaccgataagagagccttcgtcgagacctggcagtccttttaccggaagaagcttaaggaggtgtggaaacctgccgtgcggtctggcggatctggcggaggctccacaagcatggcccaggagagcgtgatgttcagcgacgtgagcatcgacttcagccaggaggagtgggagtgcctgaacgacgaccagagggacctgtacagggacgtgatgctggagaactacagcaacctggtgagcatggccggccacagcatcagcaagcccaacgtgatcagctacctggagcagggcaaggagccctggctggtggacagggagctgaccaggggccagtggcccgccctggagaccagccccaagaaaaagagaaaagtctaagctgccttctgcggggcttgccttctggccatgcccttcttctctcccttgcacctgtacctcttggtctttgaataaagcctgagtaggaaggctagcaaaaaaaaaaaaaaaaaaaaaaaaaaaaaaaaaaaaaaaaaaaaaaaaaaaaaaaaaaaaaaaaaaaaaaaaaaaaaaaa

SEQ ID NO: 3767 - RNA, 5419 nt, synthetic construct
  source 1..5419: mol_type = other RNA
aggaaataagagagaaaagaagagtaagaagaaatataagagccaccatggcccctaagaagaagcgtaaagtgagccgggtgaacggcagcggcagcggcggcggcatgaaccacgaccaggagttcgacccccctaaggtgtaccctcccgtccccgccgagaagagaaagcccatccgggtcctgagcctgttcgatggcatcgccaccggtctgctggtgctgaaggacctgggcatccaggtggataggtacattgcctccgaggtgtgcgaggactccatcaccgtgggaatggtgcgtcatcagggcaagatcatgtacgtgggcgacgtgcggagcgtgacacagaagcatatccaggagtggggccctttcgacctggtgatcggcggcagcccttgcaatgacctgagcatcgtgaacccagcccggaagggcctgtacgagggaaccggcagactgttcttcgagttttacagactgctgcacgacgcccggcctaaggaaggcgacgaccggcccttcttttggctgttcgagaatgtggtggccatgggagtcagcgacaagcgggatattagccggttcctggagagcaaccccgtgatgatcgatgccaaggaagtgagcgccgcccaccgggccagatacttctggggcaatctgcctggcatgaacagacccctggccagcaccgtgaacgacaagctggagctgcaggagtgcctggagcacggccggatcgccaagttcagcaaggtgagaaccatcaccacccgaagcaacagcatcaaacaaggcaaggaccagcactttcctgtgttcatgaacgagaaggaggacatcctgtggtgtaccgagatggagagagtgttcgggttcccagtccactacacagatgtcagcaacatgtctagactggccagacagagactgctgggaagaagctggtccgtccctgtgatcagacacctgttcgcccctctgaaggagtacttcgcctgcgtgagcagcggcaacagcaacgccaacagccggggccccagcttctctagcggcctggtgccactgtccctgagagggagccacatgggccccatggagatctacaaaaccgtgagcgcctggaagcggcagcctgtgcgcgtgctgagcctgtttcggaatatcgataaagtcctgaaaagcctgggattcctggagagcggctctggctccggcggtggcaccctgaagtacgtggaggatgtgacaaacgtggtcagacgggatgtggagaagtggggccccttcgatctggtgtacggcagcacccaacccctgggcagctcttgtgaccggtgccctggctggtacatgtttcagttccaccggatcctgcagtacgccctgccgagacaggagtcccagcggccattcttttggattttcatggacaacttgctgctgaccgaggatgaccaggaaactaccactcggttcctgcagaccgaagccgtgaccctgcaggacgtgagaggccgggactaccagaacgccatgcgggtgtggtccaacatccctggactgaaaagcaagcacgcacctctgacccctaaagaagaggagtacctgcaggcccaggtgcggagcagaagcaagctggacgcccctaaggtggatctgctggtgaagaattgcctcctgcccctgagagagtacttcaagtatttcagccagaatagtctgcccctgggcggcccaagcagcggcgcccctcctcccagcggcggcagcccagccggctccccaacctctaccgaggagggcacctctgagtccgccacccccgagagcggccctggcacctccaccgagcccagcgagggcagcgcacccggcagccctgccggcagccccacctccacagaggagggaaccagcaccgagcccagcgaaggcagcgccccaggcaccagcaccgagcctagtgagggcggctctggcggcggcagcgcccaggagattaaacggatcaacaagatcagaagaagacttgtgaaagacagcaacaccaagaaggccggcaagacaggccccatgaaaaccctgctggttagagtgatgacacccgatctgagagagcggctggaaaacctgagaaagaagcctgaaaatatcccccagcccatcagcaatacatctagagccaacctgaataagctgctgaccgattacaccgaaatgaagaaggcgatcctgcatgtgtactgggaagagttccagaaggaccctgtgggcctgatgagccgggtggcccagcctgccagcaagaagatcgatcagaacaagctgaaacctgagatggacgagaagggcaacctgaccaccgccggctttgcctgctctcagtgtggccagcccctgttcgtgtacaagctggagcaggtgtctgagaagggcaaggcttacaccaactacttcggacggtgcaatgtggccgagcacgaaaagctgatcctgctggcccagctgaagcccgagaaggatagcgacgaagccgtgacatatagcctgggaaagtttgggcagagggccctggatttctacagcattcatgtgaccaaggagtccacccaccccgtgaagcccctggcccagatcgccggaaacagatacgcctccggacctgtgggaaaggccctgagcgacgcatgtatgggcacaatcgcctccttcctgtctaagtaccaggacatcatcatcgaacaccagaaggtggtgaagggcaaccagaagagactggagagcctgcgggagctggccggcaaggaaaacctggaataccctagcgtgaccctgccacctcagcctcacaccaaggagggcgttgatgcctacaacgaagtgatcgcccgggtgcgaatgtgggtgaacctgaacctgtggcagaagctgaagctaagcagagatgatgccaagcctctgctgagactgaagggattcccttcctttcctctggtcgagagacaggccaacgaagtggactggtgggacatggtgtgtaacgtgaagaagctgatcaacgagaaaaaggaggatggcaaggtgttttggcagaatctggctggctacaagagacaggaagccctgagaccatacctgagcagcgaggaagatcggaagaagggaaagaaattcgctcggtaccagctgggcgacctgctgctgcacctggaaaagaagcacggcgaggactggggaaaggtgtacgacgaggcctgggagcggattgacaagaaagtggaaggcctgagcaagcacatcaagctggaagaggaacggagaagcgaggacgcccagagcaaggccgccctgaccgactggctgcgggctaaggccagcttcgtgatcgagggcctgaaggaggccgacaaggacgagttctgcagatgcgagctgaagctgcagaagtggtacggggacctgcggggaaagcccttcgccatcgaagccgagaacagcatcctggacatcagcggcttcagcaagcagtacaactgtgccttcatctggcagaaggacggcgtgaagaagctgaacctgtacctgatcatcaactacttcaagggcggcaagctgcggttcaagaagatcaaacctgaagccttcgaagccaacagattctacaccgtgatcaacaaaaagagcggcgagatcgtgcccatggaggtgaacttcaacttcgacgaccccaacctgatcatcctgcctctggcctttggcaagagacagggcagagaattcatctggaacgacctgctgtccctggaaaccggcagcctgaagctggccaacggaagagtgatcgagaagacactgtacaacagaagaacccggcaggatgagcctgccctgttcgtggccctgaccttcgagcggcgggaggtcctggactcctccaatatcaaaccaatgaacctgatcggcgtggcaagaggcgaaaacatccccgccgtgatcgccctgaccgaccccgagggctgcccactgagccggtttaaggatagcctgggaaacccaacccacatcctgagaatcggcgagagctataaggagaagcagcggaccatccaggccaagaaggaggtggagcagcggagagccggcggctacagccggaagtacgccagcaaagccaagaatctggcagacgatatggtgagaaacaccgctagagatctgctgtactacgccgtgacccaggatgccatgctgatcttcgccaacctgagccggggcttcggccggcagggcaagcggaccttcatggccgagagacagtacacacggatggaggactggctgaccgccaagctggcctacgagggcctgagcaagacctacctgtccaagacactggcccagtacacctccaagacatgcagcaactgtgggtttaccatcaccagcgccgactacgacagggtgctggagaagctgaagaagacagcaacaggctggatgaccacaattaacggcaaggagctgaaggtggagggccagattacctactacaacagatacaagagacagaacgtagtcaaggacctgtccgtcgagctggatagactgagcgaagaatctgtgaacaacgacatctcctcctggacaaagggcagaagcggagaagctctgagcctcctgaagaaaagattctcccatagacccgtgcaggagaagttcgtgtgcctgaactgcggcttcgagacacacgcagccgagcaagccgccctgaacatcgccagatcctggctgttcctgcggagccaggagtacaagaaataccagacaaacaagacaaccggcaacaccgataagagagccttcgtcgagacctggcagtccttttaccggaagaagcttaaggaggtgtggaaacctgccgtgcggtctggcggatctggcggaggctccacaagcccccaggagagcgtggccttcgaggacgtggccgtgtacttcaccgccaaggagtgggacatcatggtgcccgccgagagggccctgtacagggacgtgatgctggagaactacgaggccgtggccttcgtggtgccccccaccagcaagcccgccctggtgagccacctggagcagggcaaggagagctgcttcaccaggccccagggcgtgctgtgcaggaacgactggagggccggcctgaccagccccaagaaaaagagaaaagtctaagctgccttctgcggggcttgccttctggccatgcccttcttctctcccttgcacctgtacctcttggtctttgaataaagcctgagtaggaaggctagcaaaaaaaaaaaaaaaaaaaaaaaaaaaaaaaaaaaaaaaaaaaaaaaaaaaaaaaaaaaaaaaaaaaaaaaaaaaaaaaa

SEQ ID NO: 3768 - RNA, 5419 nt, synthetic construct
  source 1..5419: mol_type = other RNA
aggaaataagagagaaaagaagagtaagaagaaatataagagccaccatggcccctaagaagaagcgtaaagtgagccgggtgaacggcagcggcagcggcggcggcatgaaccacgaccaggagttcgacccccctaaggtgtaccctcccgtccccgccgagaagagaaagcccatccgggtcctgagcctgttcgatggcatcgccaccggtctgctggtgctgaaggacctgggcatccaggtggataggtacattgcctccgaggtgtgcgaggactccatcaccgtgggaatggtgcgtcatcagggcaagatcatgtacgtgggcgacgtgcggagcgtgacacagaagcatatccaggagtggggccctttcgacctggtgatcggcggcagcccttgcaatgacctgagcatcgtgaacccagcccggaagggcctgtacgagggaaccggcagactgttcttcgagttttacagactgctgcacgacgcccggcctaaggaaggcgacgaccggcccttcttttggctgttcgagaatgtggtggccatgggagtcagcgacaagcgggatattagccggttcctggagagcaaccccgtgatgatcgatgccaaggaagtgagcgccgcccaccgggccagatacttctggggcaatctgcctggcatgaacagacccctggccagcaccgtgaacgacaagctggagctgcaggagtgcctggagcacggccggatcgccaagttcagcaaggtgagaaccatcaccacccgaagcaacagcatcaaacaaggcaaggaccagcactttcctgtgttcatgaacgagaaggaggacatcctgtggtgtaccgagatggagagagtgttcgggttcccagtccactacacagatgtcagcaacatgtctagactggccagacagagactgctgggaagaagctggtccgtccctgtgatcagacacctgttcgcccctctgaaggagtacttcgcctgcgtgagcagcggcaacagcaacgccaacagccggggccccagcttctctagcggcctggtgccactgtccctgagagggagccacatgggccccatggagatctacaaaaccgtgagcgcctggaagcggcagcctgtgcgcgtgctgagcctgtttcggaatatcgataaagtcctgaaaagcctgggattcctggagagcggctctggctccggcggtggcaccctgaagtacgtggaggatgtgacaaacgtggtcagacgggatgtggagaagtggggccccttcgatctggtgtacggcagcacccaacccctgggcagctcttgtgaccggtgccctggctggtacatgtttcagttccaccggatcctgcagtacgccctgccgagacaggagtcccagcggccattcttttggattttcatggacaacttgctgctgaccgaggatgaccaggaaactaccactcggttcctgcagaccgaagccgtgaccctgcaggacgtgagaggccgggactaccagaacgccatgcgggtgtggtccaacatccctggactgaaaagcaagcacgcacctctgacccctaaagaagaggagtacctgcaggcccaggtgcggagcagaagcaagctggacgcccctaaggtggatctgctggtgaagaattgcctcctgcccctgagagagtacttcaagtatttcagccagaatagtctgcccctgggcggcccaagcagcggcgcccctcctcccagcggcggcagcccagccggctccccaacctctaccgaggagggcacctctgagtccgccacccccgagagcggccctggcacctccaccgagcccagcgagggcagcgcacccggcagccctgccggcagccccacctccacagaggagggaaccagcaccgagcccagcgaaggcagcgccccaggcaccagcaccgagcctagtgagggcggctctggcggcggcagcgcccaggagattaaacggatcaacaagatcagaagaagacttgtgaaagacagcaacaccaagaaggccggcaagacaggccccatgaaaaccctgctggttagagtgatgacacccgatctgagagagcggctggaaaacctgagaaagaagcctgaaaatatcccccagcccatcagcaatacatctagagccaacctgaataagctgctgaccgattacaccgaaatgaagaaggcgatcctgcatgtgtactgggaagagttccagaaggaccctgtgggcctgatgagccgggtggcccagcctgccagcaagaagatcgatcagaacaagctgaaacctgagatggacgagaagggcaacctgaccaccgccggctttgcctgctctcagtgtggccagcccctgttcgtgtacaagctggagcaggtgtctgagaagggcaaggcttacaccaactacttcggacggtgcaatgtggccgagcacgaaaagctgatcctgctggcccagctgaagcccgagaaggatagcgacgaagccgtgacatatagcctgggaaagtttgggcagagggccctggatttctacagcattcatgtgaccaaggagtccacccaccccgtgaagcccctggcccagatcgccggaaacagatacgcctccggacctgtgggaaaggccctgagcgacgcatgtatgggcacaatcgcctccttcctgtctaagtaccaggacatcatcatcgaacaccagaaggtggtgaagggcaaccagaagagactggagagcctgcgggagctggccggcaaggaaaacctggaataccctagcgtgaccctgccacctcagcctcacaccaaggagggcgttgatgcctacaacgaagtgatcgcccgggtgcgaatgtgggtgaacctgaacctgtggcagaagctgaagctaagcagagatgatgccaagcctctgctgagactgaagggattcccttcctttcctctggtcgagagacaggccaacgaagtggactggtgggacatggtgtgtaacgtgaagaagctgatcaacgagaaaaaggaggatggcaaggtgttttggcagaatctggctggctacaagagacaggaagccctgagaccatacctgagcagcgaggaagatcggaagaagggaaagaaattcgctcggtaccagctgggcgacctgctgctgcacctggaaaagaagcacggcgaggactggggaaaggtgtacgacgaggcctgggagcggattgacaagaaagtggaaggcctgagcaagcacatcaagctggaagaggaacggagaagcgaggacgcccagagcaaggccgccctgaccgactggctgcgggctaaggccagcttcgtgatcgagggcctgaaggaggccgacaaggacgagttctgcagatgcgagctgaagctgcagaagtggtacggggacctgcggggaaagcccttcgccatcgaagccgagaacagcatcctggacatcagcggcttcagcaagcagtacaactgtgccttcatctggcagaaggacggcgtgaagaagctgaacctgtacctgatcatcaactacttcaagggcggcaagctgcggttcaagaagatcaaacctgaagccttcgaagccaacagattctacaccgtgatcaacaaaaagagcggcgagatcgtgcccatggaggtgaacttcaacttcgacgaccccaacctgatcatcctgcctctggcctttggcaagagacagggcagagaattcatctggaacgacctgctgtccctggaaaccggcagcctgaagctggccaacggaagagtgatcgagaagacactgtacaacagaagaacccggcaggatgagcctgccctgttcgtggccctgaccttcgagcggcgggaggtcctggactcctccaatatcaaaccaatgaacctgatcggcgtggcaagaggcgaaaacatccccgccgtgatcgccctgaccgaccccgagggctgcccactgagccggtttaaggatagcctgggaaacccaacccacatcctgagaatcggcgagagctataaggagaagcagcggaccatccaggccaagaaggaggtggagcagcggagagccggcggctacagccggaagtacgccagcaaagccaagaatctggcagacgatatggtgagaaacaccgctagagatctgctgtactacgccgtgacccaggatgccatgctgatcttcgccaacctgagccggggcttcggccggcagggcaagcggaccttcatggccgagagacagtacacacggatggaggactggctgaccgccaagctggcctacgagggcctgagcaagacctacctgtccaagacactggcccagtacacctccaagacatgcagcaactgtgggtttaccatcaccagcgccgactacgacagggtgctggagaagctgaagaagacagcaacaggctggatgaccacaattaacggcaaggagctgaaggtggagggccagattacctactacaacagatacaagagacagaacgtagtcaaggacctgtccgtcgagctggatagactgagcgaagaatctgtgaacaacgacatctcctcctggacaaagggcagaagcggagaagctctgagcctcctgaagaaaagattctcccatagacccgtgcaggagaagttcgtgtgcctgaactgcggcttcgagacacacgcagccgagcaagccgccctgaacatcgccagatcctggctgttcctgcggagccaggagtacaagaaataccagacaaacaagacaaccggcaacaccgataagagagccttcgtcgagacctggcagtccttttaccggaagaagcttaaggaggtgtggaaacctgccgtgcggtctggcggatctggcggaggctccacaagcgaggagctggtgggccagaaccacggcatggagggcgaggcctgcaccggcggcgacgtgaccttcagcgacgtggccatcgacttcagccacgaggagtgggcctgcctggacaccgcccagagggacctgtacaaggacgtgatggtgcagaactacgagaacctggtgagcgtgggcctgagcgtgaccaagccctacgtgatcatgctgctggaggacggcaaggagccctggatgatgaccagccccaagaaaaagagaaaagtctaagctgccttctgcggggcttgccttctggccatgcccttcttctctcccttgcacctgtacctcttggtctttgaataaagcctgagtaggaaggctagcaaaaaaaaaaaaaaaaaaaaaaaaaaaaaaaaaaaaaaaaaaaaaaaaaaaaaaaaaaaaaaaaaaaaaaaaaaaaaaaa

SEQ ID NO: 3769 - RNA, 5419 nt, synthetic construct
  source 1..5419: mol_type = other RNA
aggaaataagagagaaaagaagagtaagaagaaatataagagccaccatggcccctaagaagaagcgtaaagtgagccgggtgaacggcagcggcagcggcggcggcatgaaccacgaccaggagttcgacccccctaaggtgtaccctcccgtccccgccgagaagagaaagcccatccgggtcctgagcctgttcgatggcatcgccaccggtctgctggtgctgaaggacctgggcatccaggtggataggtacattgcctccgaggtgtgcgaggactccatcaccgtgggaatggtgcgtcatcagggcaagatcatgtacgtgggcgacgtgcggagcgtgacacagaagcatatccaggagtggggccctttcgacctggtgatcggcggcagcccttgcaatgacctgagcatcgtgaacccagcccggaagggcctgtacgagggaaccggcagactgttcttcgagttttacagactgctgcacgacgcccggcctaaggaaggcgacgaccggcccttcttttggctgttcgagaatgtggtggccatgggagtcagcgacaagcgggatattagccggttcctggagagcaaccccgtgatgatcgatgccaaggaagtgagcgccgcccaccgggccagatacttctggggcaatctgcctggcatgaacagacccctggccagcaccgtgaacgacaagctggagctgcaggagtgcctggagcacggccggatcgccaagttcagcaaggtgagaaccatcaccacccgaagcaacagcatcaaacaaggcaaggaccagcactttcctgtgttcatgaacgagaaggaggacatcctgtggtgtaccgagatggagagagtgttcgggttcccagtccactacacagatgtcagcaacatgtctagactggccagacagagactgctgggaagaagctggtccgtccctgtgatcagacacctgttcgcccctctgaaggagtacttcgcctgcgtgagcagcggcaacagcaacgccaacagccggggccccagcttctctagcggcctggtgccactgtccctgagagggagccacatgggccccatggagatctacaaaaccgtgagcgcctggaagcggcagcctgtgcgcgtgctgagcctgtttcggaatatcgataaagtcctgaaaagcctgggattcctggagagcggctctggctccggcggtggcaccctgaagtacgtggaggatgtgacaaacgtggtcagacgggatgtggagaagtggggccccttcgatctggtgtacggcagcacccaacccctgggcagctcttgtgaccggtgccctggctggtacatgtttcagttccaccggatcctgcagtacgccctgccgagacaggagtcccagcggccattcttttggattttcatggacaacttgctgctgaccgaggatgaccaggaaactaccactcggttcctgcagaccgaagccgtgaccctgcaggacgtgagaggccgggactaccagaacgccatgcgggtgtggtccaacatccctggactgaaaagcaagcacgcacctctgacccctaaagaagaggagtacctgcaggcccaggtgcggagcagaagcaagctggacgcccctaaggtggatctgctggtgaagaattgcctcctgcccctgagagagtacttcaagtatttcagccagaatagtctgcccctgggcggcccaagcagcggcgcccctcctcccagcggcggcagcccagccggctccccaacctctaccgaggagggcacctctgagtccgccacccccgagagcggccctggcacctccaccgagcccagcgagggcagcgcacccggcagccctgccggcagccccacctccacagaggagggaaccagcaccgagcccagcgaaggcagcgccccaggcaccagcaccgagcctagtgagggcggctctggcggcggcagcgcccaggagattaaacggatcaacaagatcagaagaagacttgtgaaagacagcaacaccaagaaggccggcaagacaggccccatgaaaaccctgctggttagagtgatgacacccgatctgagagagcggctggaaaacctgagaaagaagcctgaaaatatcccccagcccatcagcaatacatctagagccaacctgaataagctgctgaccgattacaccgaaatgaagaaggcgatcctgcatgtgtactgggaagagttccagaaggaccctgtgggcctgatgagccgggtggcccagcctgccagcaagaagatcgatcagaacaagctgaaacctgagatggacgagaagggcaacctgaccaccgccggctttgcctgctctcagtgtggccagcccctgttcgtgtacaagctggagcaggtgtctgagaagggcaaggcttacaccaactacttcggacggtgcaatgtggccgagcacgaaaagctgatcctgctggcccagctgaagcccgagaaggatagcgacgaagccgtgacatatagcctgggaaagtttgggcagagggccctggatttctacagcattcatgtgaccaaggagtccacccaccccgtgaagcccctggcccagatcgccggaaacagatacgcctccggacctgtgggaaaggccctgagcgacgcatgtatgggcacaatcgcctccttcctgtctaagtaccaggacatcatcatcgaacaccagaaggtggtgaagggcaaccagaagagactggagagcctgcgggagctggccggcaaggaaaacctggaataccctagcgtgaccctgccacctcagcctcacaccaaggagggcgttgatgcctacaacgaagtgatcgcccgggtgcgaatgtgggtgaacctgaacctgtggcagaagctgaagctaagcagagatgatgccaagcctctgctgagactgaagggattcccttcctttcctctggtcgagagacaggccaacgaagtggactggtgggacatggtgtgtaacgtgaagaagctgatcaacgagaaaaaggaggatggcaaggtgttttggcagaatctggctggctacaagagacaggaagccctgagaccatacctgagcagcgaggaagatcggaagaagggaaagaaattcgctcggtaccagctgggcgacctgctgctgcacctggaaaagaagcacggcgaggactggggaaaggtgtacgacgaggcctgggagcggattgacaagaaagtggaaggcctgagcaagcacatcaagctggaagaggaacggagaagcgaggacgcccagagcaaggccgccctgaccgactggctgcgggctaaggccagcttcgtgatcgagggcctgaaggaggccgacaaggacgagttctgcagatgcgagctgaagctgcagaagtggtacggggacctgcggggaaagcccttcgccatcgaagccgagaacagcatcctggacatcagcggcttcagcaagcagtacaactgtgccttcatctggcagaaggacggcgtgaagaagctgaacctgtacctgatcatcaactacttcaagggcggcaagctgcggttcaagaagatcaaacctgaagccttcgaagccaacagattctacaccgtgatcaacaaaaagagcggcgagatcgtgcccatggaggtgaacttcaacttcgacgaccccaacctgatcatcctgcctctggcctttggcaagagacagggcagagaattcatctggaacgacctgctgtccctggaaaccggcagcctgaagctggccaacggaagagtgatcgagaagacactgtacaacagaagaacccggcaggatgagcctgccctgttcgtggccctgaccttcgagcggcgggaggtcctggactcctccaatatcaaaccaatgaacctgatcggcgtggcaagaggcgaaaacatccccgccgtgatcgccctgaccgaccccgagggctgcccactgagccggtttaaggatagcctgggaaacccaacccacatcctgagaatcggcgagagctataaggagaagcagcggaccatccaggccaagaaggaggtggagcagcggagagccggcggctacagccggaagtacgccagcaaagccaagaatctggcagacgatatggtgagaaacaccgctagagatctgctgtactacgccgtgacccaggatgccatgctgatcttcgccaacctgagccggggcttcggccggcagggcaagcggaccttcatggccgagagacagtacacacggatggaggactggctgaccgccaagctggcctacgagggcctgagcaagacctacctgtccaagacactggcccagtacacctccaagacatgcagcaactgtgggtttaccatcaccagcgccgactacgacagggtgctggagaagctgaagaagacagcaacaggctggatgaccacaattaacggcaaggagctgaaggtggagggccagattacctactacaacagatacaagagacagaacgtagtcaaggacctgtccgtcgagctggatagactgagcgaagaatctgtgaacaacgacatctcctcctggacaaagggcagaagcggagaagctctgagcctcctgaagaaaagattctcccatagacccgtgcaggagaagttcgtgtgcctgaactgcggcttcgagacacacgcagccgagcaagccgccctgaacatcgccagatcctggctgttcctgcggagccaggagtacaagaaataccagacaaacaagacaaccggcaacaccgataagagagccttcgtcgagacctggcagtccttttaccggaagaagcttaaggaggtgtggaaacctgccgtgcggtctggcggatctggcggaggctccacaagcgcctgcgagagcatcaccttcggcgacgtggccatcgacttcagccaccaggagtgggagtacctgaacctggtgcagaagaccctgtaccaggaggtgatgatggagaactacgacaacctggtgagcctgggccacttcatcagcaagcccgacctgatcaccctgctggagcagggcaaggagccctggatgatcgtgggcgaggagaccaggggcgagtgcaccgacctggacagcaggaccagccccaagaaaaagagaaaagtctaagctgccttctgcggggcttgccttctggccatgcccttcttctctcccttgcacctgtacctcttggtctttgaataaagcctgagtaggaaggctagcaaaaaaaaaaaaaaaaaaaaaaaaaaaaaaaaaaaaaaaaaaaaaaaaaaaaaaaaaaaaaaaaaaaaaaaaaaaaaaaa

SEQ ID NO: 3770 - RNA, 5419 nt, synthetic construct
  source 1..5419: mol_type = other RNA
aggaaataagagagaaaagaagagtaagaagaaatataagagccaccatggcccctaagaagaagcgtaaagtgagccgggtgaacggcagcggcagcggcggcggcatgaaccacgaccaggagttcgacccccctaaggtgtaccctcccgtccccgccgagaagagaaagcccatccgggtcctgagcctgttcgatggcatcgccaccggtctgctggtgctgaaggacctgggcatccaggtggataggtacattgcctccgaggtgtgcgaggactccatcaccgtgggaatggtgcgtcatcagggcaagatcatgtacgtgggcgacgtgcggagcgtgacacagaagcatatccaggagtggggccctttcgacctggtgatcggcggcagcccttgcaatgacctgagcatcgtgaacccagcccggaagggcctgtacgagggaaccggcagactgttcttcgagttttacagactgctgcacgacgcccggcctaaggaaggcgacgaccggcccttcttttggctgttcgagaatgtggtggccatgggagtcagcgacaagcgggatattagccggttcctggagagcaaccccgtgatgatcgatgccaaggaagtgagcgccgcccaccgggccagatacttctggggcaatctgcctggcatgaacagacccctggccagcaccgtgaacgacaagctggagctgcaggagtgcctggagcacggccggatcgccaagttcagcaaggtgagaaccatcaccacccgaagcaacagcatcaaacaaggcaaggaccagcactttcctgtgttcatgaacgagaaggaggacatcctgtggtgtaccgagatggagagagtgttcgggttcccagtccactacacagatgtcagcaacatgtctagactggccagacagagactgctgggaagaagctggtccgtccctgtgatcagacacctgttcgcccctctgaaggagtacttcgcctgcgtgagcagcggcaacagcaacgccaacagccggggccccagcttctctagcggcctggtgccactgtccctgagagggagccacatgggccccatggagatctacaaaaccgtgagcgcctggaagcggcagcctgtgcgcgtgctgagcctgtttcggaatatcgataaagtcctgaaaagcctgggattcctggagagcggctctggctccggcggtggcaccctgaagtacgtggaggatgtgacaaacgtggtcagacgggatgtggagaagtggggccccttcgatctggtgtacggcagcacccaacccctgggcagctcttgtgaccggtgccctggctggtacatgtttcagttccaccggatcctgcagtacgccctgccgagacaggagtcccagcggccattcttttggattttcatggacaacttgctgctgaccgaggatgaccaggaaactaccactcggttcctgcagaccgaagccgtgaccctgcaggacgtgagaggccgggactaccagaacgccatgcgggtgtggtccaacatccctggactgaaaagcaagcacgcacctctgacccctaaagaagaggagtacctgcaggcccaggtgcggagcagaagcaagctggacgcccctaaggtggatctgctggtgaagaattgcctcctgcccctgagagagtacttcaagtatttcagccagaatagtctgcccctgggcggcccaagcagcggcgcccctcctcccagcggcggcagcccagccggctccccaacctctaccgaggagggcacctctgagtccgccacccccgagagcggccctggcacctccaccgagcccagcgagggcagcgcacccggcagccctgccggcagccccacctccacagaggagggaaccagcaccgagcccagcgaaggcagcgccccaggcaccagcaccgagcctagtgagggcggctctggcggcggcagcgcccaggagattaaacggatcaacaagatcagaagaagacttgtgaaagacagcaacaccaagaaggccggcaagacaggccccatgaaaaccctgctggttagagtgatgacacccgatctgagagagcggctggaaaacctgagaaagaagcctgaaaatatcccccagcccatcagcaatacatctagagccaacctgaataagctgctgaccgattacaccgaaatgaagaaggcgatcctgcatgtgtactgggaagagttccagaaggaccctgtgggcctgatgagccgggtggcccagcctgccagcaagaagatcgatcagaacaagctgaaacctgagatggacgagaagggcaacctgaccaccgccggctttgcctgctctcagtgtggccagcccctgttcgtgtacaagctggagcaggtgtctgagaagggcaaggcttacaccaactacttcggacggtgcaatgtggccgagcacgaaaagctgatcctgctggcccagctgaagcccgagaaggatagcgacgaagccgtgacatatagcctgggaaagtttgggcagagggccctggatttctacagcattcatgtgaccaaggagtccacccaccccgtgaagcccctggcccagatcgccggaaacagatacgcctccggacctgtgggaaaggccctgagcgacgcatgtatgggcacaatcgcctccttcctgtctaagtaccaggacatcatcatcgaacaccagaaggtggtgaagggcaaccagaagagactggagagcctgcgggagctggccggcaaggaaaacctggaataccctagcgtgaccctgccacctcagcctcacaccaaggagggcgttgatgcctacaacgaagtgatcgcccgggtgcgaatgtgggtgaacctgaacctgtggcagaagctgaagctaagcagagatgatgccaagcctctgctgagactgaagggattcccttcctttcctctggtcgagagacaggccaacgaagtggactggtgggacatggtgtgtaacgtgaagaagctgatcaacgagaaaaaggaggatggcaaggtgttttggcagaatctggctggctacaagagacaggaagccctgagaccatacctgagcagcgaggaagatcggaagaagggaaagaaattcgctcggtaccagctgggcgacctgctgctgcacctggaaaagaagcacggcgaggactggggaaaggtgtacgacgaggcctgggagcggattgacaagaaagtggaaggcctgagcaagcacatcaagctggaagaggaacggagaagcgaggacgcccagagcaaggccgccctgaccgactggctgcgggctaaggccagcttcgtgatcgagggcctgaaggaggccgacaaggacgagttctgcagatgcgagctgaagctgcagaagtggtacggggacctgcggggaaagcccttcgccatcgaagccgagaacagcatcctggacatcagcggcttcagcaagcagtacaactgtgccttcatctggcagaaggacggcgtgaagaagctgaacctgtacctgatcatcaactacttcaagggcggcaagctgcggttcaagaagatcaaacctgaagccttcgaagccaacagattctacaccgtgatcaacaaaaagagcggcgagatcgtgcccatggaggtgaacttcaacttcgacgaccccaacctgatcatcctgcctctggcctttggcaagagacagggcagagaattcatctggaacgacctgctgtccctggaaaccggcagcctgaagctggccaacggaagagtgatcgagaagacactgtacaacagaagaacccggcaggatgagcctgccctgttcgtggccctgaccttcgagcggcgggaggtcctggactcctccaatatcaaaccaatgaacctgatcggcgtggcaagaggcgaaaacatccccgccgtgatcgccctgaccgaccccgagggctgcccactgagccggtttaaggatagcctgggaaacccaacccacatcctgagaatcggcgagagctataaggagaagcagcggaccatccaggccaagaaggaggtggagcagcggagagccggcggctacagccggaagtacgccagcaaagccaagaatctggcagacgatatggtgagaaacaccgctagagatctgctgtactacgccgtgacccaggatgccatgctgatcttcgccaacctgagccggggcttcggccggcagggcaagcggaccttcatggccgagagacagtacacacggatggaggactggctgaccgccaagctggcctacgagggcctgagcaagacctacctgtccaagacactggcccagtacacctccaagacatgcagcaactgtgggtttaccatcaccagcgccgactacgacagggtgctggagaagctgaagaagacagcaacaggctggatgaccacaattaacggcaaggagctgaaggtggagggccagattacctactacaacagatacaagagacagaacgtagtcaaggacctgtccgtcgagctggatagactgagcgaagaatctgtgaacaacgacatctcctcctggacaaagggcagaagcggagaagctctgagcctcctgaagaaaagattctcccatagacccgtgcaggagaagttcgtgtgcctgaactgcggcttcgagacacacgcagccgagcaagccgccctgaacatcgccagatcctggctgttcctgcggagccaggagtacaagaaataccagacaaacaagacaaccggcaacaccgataagagagccttcgtcgagacctggcagtccttttaccggaagaagcttaaggaggtgtggaaacctgccgtgcggtctggcggatctggcggaggctccacaagcagccaggtgagcctgaccttcagggacgtggccgtggacttcagccaggaggagtggggcctgctggagcccgcccagaaggacatgtacagggacgtgatgctggagaactacgagaacttcctgagcctgggcctgcccatcagcaagcccaacatgatcagccagctgaagaggagggaggcccccagctggatcgccgagggcaaggtgagcctgagcacctacctgggcaccctgaggaccagccccaagaaaaagagaaaagtctaagctgccttctgcggggcttgccttctggccatgcccttcttctctcccttgcacctgtacctcttggtctttgaataaagcctgagtaggaaggctagcaaaaaaaaaaaaaaaaaaaaaaaaaaaaaaaaaaaaaaaaaaaaaaaaaaaaaaaaaaaaaaaaaaaaaaaaaaaaaaaa

SEQ ID NO: 3771 - RNA, 5419 nt, synthetic construct
  source 1..5419: mol_type = other RNA
aggaaataagagagaaaagaagagtaagaagaaatataagagccaccatggcccctaagaagaagcgtaaagtgagccgggtgaacggcagcggcagcggcggcggcatgaaccacgaccaggagttcgacccccctaaggtgtaccctcccgtccccgccgagaagagaaagcccatccgggtcctgagcctgttcgatggcatcgccaccggtctgctggtgctgaaggacctgggcatccaggtggataggtacattgcctccgaggtgtgcgaggactccatcaccgtgggaatggtgcgtcatcagggcaagatcatgtacgtgggcgacgtgcggagcgtgacacagaagcatatccaggagtggggccctttcgacctggtgatcggcggcagcccttgcaatgacctgagcatcgtgaacccagcccggaagggcctgtacgagggaaccggcagactgttcttcgagttttacagactgctgcacgacgcccggcctaaggaaggcgacgaccggcccttcttttggctgttcgagaatgtggtggccatgggagtcagcgacaagcgggatattagccggttcctggagagcaaccccgtgatgatcgatgccaaggaagtgagcgccgcccaccgggccagatacttctggggcaatctgcctggcatgaacagacccctggccagcaccgtgaacgacaagctggagctgcaggagtgcctggagcacggccggatcgccaagttcagcaaggtgagaaccatcaccacccgaagcaacagcatcaaacaaggcaaggaccagcactttcctgtgttcatgaacgagaaggaggacatcctgtggtgtaccgagatggagagagtgttcgggttcccagtccactacacagatgtcagcaacatgtctagactggccagacagagactgctgggaagaagctggtccgtccctgtgatcagacacctgttcgcccctctgaaggagtacttcgcctgcgtgagcagcggcaacagcaacgccaacagccggggccccagcttctctagcggcctggtgccactgtccctgagagggagccacatgggccccatggagatctacaaaaccgtgagcgcctggaagcggcagcctgtgcgcgtgctgagcctgtttcggaatatcgataaagtcctgaaaagcctgggattcctggagagcggctctggctccggcggtggcaccctgaagtacgtggaggatgtgacaaacgtggtcagacgggatgtggagaagtggggccccttcgatctggtgtacggcagcacccaacccctgggcagctcttgtgaccggtgccctggctggtacatgtttcagttccaccggatcctgcagtacgccctgccgagacaggagtcccagcggccattcttttggattttcatggacaacttgctgctgaccgaggatgaccaggaaactaccactcggttcctgcagaccgaagccgtgaccctgcaggacgtgagaggccgggactaccagaacgccatgcgggtgtggtccaacatccctggactgaaaagcaagcacgcacctctgacccctaaagaagaggagtacctgcaggcccaggtgcggagcagaagcaagctggacgcccctaaggtggatctgctggtgaagaattgcctcctgcccctgagagagtacttcaagtatttcagccagaatagtctgcccctgggcggcccaagcagcggcgcccctcctcccagcggcggcagcccagccggctccccaacctctaccgaggagggcacctctgagtccgccacccccgagagcggccctggcacctccaccgagcccagcgagggcagcgcacccggcagccctgccggcagccccacctccacagaggagggaaccagcaccgagcccagcgaaggcagcgccccaggcaccagcaccgagcctagtgagggcggctctggcggcggcagcgcccaggagattaaacggatcaacaagatcagaagaagacttgtgaaagacagcaacaccaagaaggccggcaagacaggccccatgaaaaccctgctggttagagtgatgacacccgatctgagagagcggctggaaaacctgagaaagaagcctgaaaatatcccccagcccatcagcaatacatctagagccaacctgaataagctgctgaccgattacaccgaaatgaagaaggcgatcctgcatgtgtactgggaagagttccagaaggaccctgtgggcctgatgagccgggtggcccagcctgccagcaagaagatcgatcagaacaagctgaaacctgagatggacgagaagggcaacctgaccaccgccggctttgcctgctctcagtgtggccagcccctgttcgtgtacaagctggagcaggtgtctgagaagggcaaggcttacaccaactacttcggacggtgcaatgtggccgagcacgaaaagctgatcctgctggcccagctgaagcccgagaaggatagcgacgaagccgtgacatatagcctgggaaagtttgggcagagggccctggatttctacagcattcatgtgaccaaggagtccacccaccccgtgaagcccctggcccagatcgccggaaacagatacgcctccggacctgtgggaaaggccctgagcgacgcatgtatgggcacaatcgcctccttcctgtctaagtaccaggacatcatcatcgaacaccagaaggtggtgaagggcaaccagaagagactggagagcctgcgggagctggccggcaaggaaaacctggaataccctagcgtgaccctgccacctcagcctcacaccaaggagggcgttgatgcctacaacgaagtgatcgcccgggtgcgaatgtgggtgaacctgaacctgtggcagaagctgaagctaagcagagatgatgccaagcctctgctgagactgaagggattcccttcctttcctctggtcgagagacaggccaacgaagtggactggtgggacatggtgtgtaacgtgaagaagctgatcaacgagaaaaaggaggatggcaaggtgttttggcagaatctggctggctacaagagacaggaagccctgagaccatacctgagcagcgaggaagatcggaagaagggaaagaaattcgctcggtaccagctgggcgacctgctgctgcacctggaaaagaagcacggcgaggactggggaaaggtgtacgacgaggcctgggagcggattgacaagaaagtggaaggcctgagcaagcacatcaagctggaagaggaacggagaagcgaggacgcccagagcaaggccgccctgaccgactggctgcgggctaaggccagcttcgtgatcgagggcctgaaggaggccgacaaggacgagttctgcagatgcgagctgaagctgcagaagtggtacggggacctgcggggaaagcccttcgccatcgaagccgagaacagcatcctggacatcagcggcttcagcaagcagtacaactgtgccttcatctggcagaaggacggcgtgaagaagctgaacctgtacctgatcatcaactacttcaagggcggcaagctgcggttcaagaagatcaaacctgaagccttcgaagccaacagattctacaccgtgatcaacaaaaagagcggcgagatcgtgcccatggaggtgaacttcaacttcgacgaccccaacctgatcatcctgcctctggcctttggcaagagacagggcagagaattcatctggaacgacctgctgtccctggaaaccggcagcctgaagctggccaacggaagagtgatcgagaagacactgtacaacagaagaacccggcaggatgagcctgccctgttcgtggccctgaccttcgagcggcgggaggtcctggactcctccaatatcaaaccaatgaacctgatcggcgtggcaagaggcgaaaacatccccgccgtgatcgccctgaccgaccccgagggctgcccactgagccggtttaaggatagcctgggaaacccaacccacatcctgagaatcggcgagagctataaggagaagcagcggaccatccaggccaagaaggaggtggagcagcggagagccggcggctacagccggaagtacgccagcaaagccaagaatctggcagacgatatggtgagaaacaccgctagagatctgctgtactacgccgtgacccaggatgccatgctgatcttcgccaacctgagccggggcttcggccggcagggcaagcggaccttcatggccgagagacagtacacacggatggaggactggctgaccgccaagctggcctacgagggcctgagcaagacctacctgtccaagacactggcccagtacacctccaagacatgcagcaactgtgggtttaccatcaccagcgccgactacgacagggtgctggagaagctgaagaagacagcaacaggctggatgaccacaattaacggcaaggagctgaaggtggagggccagattacctactacaacagatacaagagacagaacgtagtcaaggacctgtccgtcgagctggatagactgagcgaagaatctgtgaacaacgacatctcctcctggacaaagggcagaagcggagaagctctgagcctcctgaagaaaagattctcccatagacccgtgcaggagaagttcgtgtgcctgaactgcggcttcgagacacacgcagccgagcaagccgccctgaacatcgccagatcctggctgttcctgcggagccaggagtacaagaaataccagacaaacaagacaaccggcaacaccgataagagagccttcgtcgagacctggcagtccttttaccggaagaagcttaaggaggtgtggaaacctgccgtgcggtctggcggatctggcggaggctccacaagctacaaggagagcgtgatgttcagggacgtggccgtggacttcagccaggaggagtgggagtgcctggaccccgcccagagggacctgtacagggacgtgatgctggagaactacagcaacctgctgagcatgggcctgtacatccccaagccccaggtgatcagcctgctggagcagggcaaggagccctggatggtgggcagggagctgaccaggggcctgtgcagcgacctggagagcatgaccagccccaagaaaaagagaaaagtctaagctgccttctgcggggcttgccttctggccatgcccttcttctctcccttgcacctgtacctcttggtctttgaataaagcctgagtaggaaggctagcaaaaaaaaaaaaaaaaaaaaaaaaaaaaaaaaaaaaaaaaaaaaaaaaaaaaaaaaaaaaaaaaaaaaaaaaaaaaaaaa

SEQ ID NO: 3772 - RNA, 5419 nt, synthetic construct
  source 1..5419: mol_type = other RNA
aggaaataagagagaaaagaagagtaagaagaaatataagagccaccatggcccctaagaagaagcgtaaagtgagccgggtgaacggcagcggcagcggcggcggcatgaaccacgaccaggagttcgacccccctaaggtgtaccctcccgtccccgccgagaagagaaagcccatccgggtcctgagcctgttcgatggcatcgccaccggtctgctggtgctgaaggacctgggcatccaggtggataggtacattgcctccgaggtgtgcgaggactccatcaccgtgggaatggtgcgtcatcagggcaagatcatgtacgtgggcgacgtgcggagcgtgacacagaagcatatccaggagtggggccctttcgacctggtgatcggcggcagcccttgcaatgacctgagcatcgtgaacccagcccggaagggcctgtacgagggaaccggcagactgttcttcgagttttacagactgctgcacgacgcccggcctaaggaaggcgacgaccggcccttcttttggctgttcgagaatgtggtggccatgggagtcagcgacaagcgggatattagccggttcctggagagcaaccccgtgatgatcgatgccaaggaagtgagcgccgcccaccgggccagatacttctggggcaatctgcctggcatgaacagacccctggccagcaccgtgaacgacaagctggagctgcaggagtgcctggagcacggccggatcgccaagttcagcaaggtgagaaccatcaccacccgaagcaacagcatcaaacaaggcaaggaccagcactttcctgtgttcatgaacgagaaggaggacatcctgtggtgtaccgagatggagagagtgttcgggttcccagtccactacacagatgtcagcaacatgtctagactggccagacagagactgctgggaagaagctggtccgtccctgtgatcagacacctgttcgcccctctgaaggagtacttcgcctgcgtgagcagcggcaacagcaacgccaacagccggggccccagcttctctagcggcctggtgccactgtccctgagagggagccacatgggccccatggagatctacaaaaccgtgagcgcctggaagcggcagcctgtgcgcgtgctgagcctgtttcggaatatcgataaagtcctgaaaagcctgggattcctggagagcggctctggctccggcggtggcaccctgaagtacgtggaggatgtgacaaacgtggtcagacgggatgtggagaagtggggccccttcgatctggtgtacggcagcacccaacccctgggcagctcttgtgaccggtgccctggctggtacatgtttcagttccaccggatcctgcagtacgccctgccgagacaggagtcccagcggccattcttttggattttcatggacaacttgctgctgaccgaggatgaccaggaaactaccactcggttcctgcagaccgaagccgtgaccctgcaggacgtgagaggccgggactaccagaacgccatgcgggtgtggtccaacatccctggactgaaaagcaagcacgcacctctgacccctaaagaagaggagtacctgcaggcccaggtgcggagcagaagcaagctggacgcccctaaggtggatctgctggtgaagaattgcctcctgcccctgagagagtacttcaagtatttcagccagaatagtctgcccctgggcggcccaagcagcggcgcccctcctcccagcggcggcagcccagccggctccccaacctctaccgaggagggcacctctgagtccgccacccccgagagcggccctggcacctccaccgagcccagcgagggcagcgcacccggcagccctgccggcagccccacctccacagaggagggaaccagcaccgagcccagcgaaggcagcgccccaggcaccagcaccgagcctagtgagggcggctctggcggcggcagcgcccaggagattaaacggatcaacaagatcagaagaagacttgtgaaagacagcaacaccaagaaggccggcaagacaggccccatgaaaaccctgctggttagagtgatgacacccgatctgagagagcggctggaaaacctgagaaagaagcctgaaaatatcccccagcccatcagcaatacatctagagccaacctgaataagctgctgaccgattacaccgaaatgaagaaggcgatcctgcatgtgtactgggaagagttccagaaggaccctgtgggcctgatgagccgggtggcccagcctgccagcaagaagatcgatcagaacaagctgaaacctgagatggacgagaagggcaacctgaccaccgccggctttgcctgctctcagtgtggccagcccctgttcgtgtacaagctggagcaggtgtctgagaagggcaaggcttacaccaactacttcggacggtgcaatgtggccgagcacgaaaagctgatcctgctggcccagctgaagcccgagaaggatagcgacgaagccgtgacatatagcctgggaaagtttgggcagagggccctggatttctacagcattcatgtgaccaaggagtccacccaccccgtgaagcccctggcccagatcgccggaaacagatacgcctccggacctgtgggaaaggccctgagcgacgcatgtatgggcacaatcgcctccttcctgtctaagtaccaggacatcatcatcgaacaccagaaggtggtgaagggcaaccagaagagactggagagcctgcgggagctggccggcaaggaaaacctggaataccctagcgtgaccctgccacctcagcctcacaccaaggagggcgttgatgcctacaacgaagtgatcgcccgggtgcgaatgtgggtgaacctgaacctgtggcagaagctgaagctaagcagagatgatgccaagcctctgctgagactgaagggattcccttcctttcctctggtcgagagacaggccaacgaagtggactggtgggacatggtgtgtaacgtgaagaagctgatcaacgagaaaaaggaggatggcaaggtgttttggcagaatctggctggctacaagagacaggaagccctgagaccatacctgagcagcgaggaagatcggaagaagggaaagaaattcgctcggtaccagctgggcgacctgctgctgcacctggaaaagaagcacggcgaggactggggaaaggtgtacgacgaggcctgggagcggattgacaagaaagtggaaggcctgagcaagcacatcaagctggaagaggaacggagaagcgaggacgcccagagcaaggccgccctgaccgactggctgcgggctaaggccagcttcgtgatcgagggcctgaaggaggccgacaaggacgagttctgcagatgcgagctgaagctgcagaagtggtacggggacctgcggggaaagcccttcgccatcgaagccgagaacagcatcctggacatcagcggcttcagcaagcagtacaactgtgccttcatctggcagaaggacggcgtgaagaagctgaacctgtacctgatcatcaactacttcaagggcggcaagctgcggttcaagaagatcaaacctgaagccttcgaagccaacagattctacaccgtgatcaacaaaaagagcggcgagatcgtgcccatggaggtgaacttcaacttcgacgaccccaacctgatcatcctgcctctggcctttggcaagagacagggcagagaattcatctggaacgacctgctgtccctggaaaccggcagcctgaagctggccaacggaagagtgatcgagaagacactgtacaacagaagaacccggcaggatgagcctgccctgttcgtggccctgaccttcgagcggcgggaggtcctggactcctccaatatcaaaccaatgaacctgatcggcgtggcaagaggcgaaaacatccccgccgtgatcgccctgaccgaccccgagggctgcccactgagccggtttaaggatagcctgggaaacccaacccacatcctgagaatcggcgagagctataaggagaagcagcggaccatccaggccaagaaggaggtggagcagcggagagccggcggctacagccggaagtacgccagcaaagccaagaatctggcagacgatatggtgagaaacaccgctagagatctgctgtactacgccgtgacccaggatgccatgctgatcttcgccaacctgagccggggcttcggccggcagggcaagcggaccttcatggccgagagacagtacacacggatggaggactggctgaccgccaagctggcctacgagggcctgagcaagacctacctgtccaagacactggcccagtacacctccaagacatgcagcaactgtgggtttaccatcaccagcgccgactacgacagggtgctggagaagctgaagaagacagcaacaggctggatgaccacaattaacggcaaggagctgaaggtggagggccagattacctactacaacagatacaagagacagaacgtagtcaaggacctgtccgtcgagctggatagactgagcgaagaatctgtgaacaacgacatctcctcctggacaaagggcagaagcggagaagctctgagcctcctgaagaaaagattctcccatagacccgtgcaggagaagttcgtgtgcctgaactgcggcttcgagacacacgcagccgagcaagccgccctgaacatcgccagatcctggctgttcctgcggagccaggagtacaagaaataccagacaaacaagacaaccggcaacaccgataagagagccttcgtcgagacctggcagtccttttaccggaagaagcttaaggaggtgtggaaacctgccgtgcggtctggcggatctggcggaggctccacaagcgcccagatgcaggtgaccttcgaggacatcgccgtgttcttctgccacgaggagtggaagtacctggacgacggccagaaggagctgtacaaggaggtgatgaaggagaactacgagaccctgatcagcctgggcttcctgtgcgagaagcccagcctgatcagcaagatcgagagggaggaggacccctgcgtgagggaccagcaggacttcagggagaggaggaggaggctgaagagcttcaccagccccaagaaaaagagaaaagtctaagctgccttctgcggggcttgccttctggccatgcccttcttctctcccttgcacctgtacctcttggtctttgaataaagcctgagtaggaaggctagcaaaaaaaaaaaaaaaaaaaaaaaaaaaaaaaaaaaaaaaaaaaaaaaaaaaaaaaaaaaaaaaaaaaaaaaaaaaaaaaa

SEQ ID NO: 3773 - RNA, 5419 nt, synthetic construct
  source 1..5419: mol_type = other RNA
aggaaataagagagaaaagaagagtaagaagaaatataagagccaccatggcccctaagaagaagcgtaaagtgagccgggtgaacggcagcggcagcggcggcggcatgaaccacgaccaggagttcgacccccctaaggtgtaccctcccgtccccgccgagaagagaaagcccatccgggtcctgagcctgttcgatggcatcgccaccggtctgctggtgctgaaggacctgggcatccaggtggataggtacattgcctccgaggtgtgcgaggactccatcaccgtgggaatggtgcgtcatcagggcaagatcatgtacgtgggcgacgtgcggagcgtgacacagaagcatatccaggagtggggccctttcgacctggtgatcggcggcagcccttgcaatgacctgagcatcgtgaacccagcccggaagggcctgtacgagggaaccggcagactgttcttcgagttttacagactgctgcacgacgcccggcctaaggaaggcgacgaccggcccttcttttggctgttcgagaatgtggtggccatgggagtcagcgacaagcgggatattagccggttcctggagagcaaccccgtgatgatcgatgccaaggaagtgagcgccgcccaccgggccagatacttctggggcaatctgcctggcatgaacagacccctggccagcaccgtgaacgacaagctggagctgcaggagtgcctggagcacggccggatcgccaagttcagcaaggtgagaaccatcaccacccgaagcaacagcatcaaacaaggcaaggaccagcactttcctgtgttcatgaacgagaaggaggacatcctgtggtgtaccgagatggagagagtgttcgggttcccagtccactacacagatgtcagcaacatgtctagactggccagacagagactgctgggaagaagctggtccgtccctgtgatcagacacctgttcgcccctctgaaggagtacttcgcctgcgtgagcagcggcaacagcaacgccaacagccggggccccagcttctctagcggcctggtgccactgtccctgagagggagccacatgggccccatggagatctacaaaaccgtgagcgcctggaagcggcagcctgtgcgcgtgctgagcctgtttcggaatatcgataaagtcctgaaaagcctgggattcctggagagcggctctggctccggcggtggcaccctgaagtacgtggaggatgtgacaaacgtggtcagacgggatgtggagaagtggggccccttcgatctggtgtacggcagcacccaacccctgggcagctcttgtgaccggtgccctggctggtacatgtttcagttccaccggatcctgcagtacgccctgccgagacaggagtcccagcggccattcttttggattttcatggacaacttgctgctgaccgaggatgaccaggaaactaccactcggttcctgcagaccgaagccgtgaccctgcaggacgtgagaggccgggactaccagaacgccatgcgggtgtggtccaacatccctggactgaaaagcaagcacgcacctctgacccctaaagaagaggagtacctgcaggcccaggtgcggagcagaagcaagctggacgcccctaaggtggatctgctggtgaagaattgcctcctgcccctgagagagtacttcaagtatttcagccagaatagtctgcccctgggcggcccaagcagcggcgcccctcctcccagcggcggcagcccagccggctccccaacctctaccgaggagggcacctctgagtccgccacccccgagagcggccctggcacctccaccgagcccagcgagggcagcgcacccggcagccctgccggcagccccacctccacagaggagggaaccagcaccgagcccagcgaaggcagcgccccaggcaccagcaccgagcctagtgagggcggctctggcggcggcagcgcccaggagattaaacggatcaacaagatcagaagaagacttgtgaaagacagcaacaccaagaaggccggcaagacaggccccatgaaaaccctgctggttagagtgatgacacccgatctgagagagcggctggaaaacctgagaaagaagcctgaaaatatcccccagcccatcagcaatacatctagagccaacctgaataagctgctgaccgattacaccgaaatgaagaaggcgatcctgcatgtgtactgggaagagttccagaaggaccctgtgggcctgatgagccgggtggcccagcctgccagcaagaagatcgatcagaacaagctgaaacctgagatggacgagaagggcaacctgaccaccgccggctttgcctgctctcagtgtggccagcccctgttcgtgtacaagctggagcaggtgtctgagaagggcaaggcttacaccaactacttcggacggtgcaatgtggccgagcacgaaaagctgatcctgctggcccagctgaagcccgagaaggatagcgacgaagccgtgacatatagcctgggaaagtttgggcagagggccctggatttctacagcattcatgtgaccaaggagtccacccaccccgtgaagcccctggcccagatcgccggaaacagatacgcctccggacctgtgggaaaggccctgagcgacgcatgtatgggcacaatcgcctccttcctgtctaagtaccaggacatcatcatcgaacaccagaaggtggtgaagggcaaccagaagagactggagagcctgcgggagctggccggcaaggaaaacctggaataccctagcgtgaccctgccacctcagcctcacaccaaggagggcgttgatgcctacaacgaagtgatcgcccgggtgcgaatgtgggtgaacctgaacctgtggcagaagctgaagctaagcagagatgatgccaagcctctgctgagactgaagggattcccttcctttcctctggtcgagagacaggccaacgaagtggactggtgggacatggtgtgtaacgtgaagaagctgatcaacgagaaaaaggaggatggcaaggtgttttggcagaatctggctggctacaagagacaggaagccctgagaccatacctgagcagcgaggaagatcggaagaagggaaagaaattcgctcggtaccagctgggcgacctgctgctgcacctggaaaagaagcacggcgaggactggggaaaggtgtacgacgaggcctgggagcggattgacaagaaagtggaaggcctgagcaagcacatcaagctggaagaggaacggagaagcgaggacgcccagagcaaggccgccctgaccgactggctgcgggctaaggccagcttcgtgatcgagggcctgaaggaggccgacaaggacgagttctgcagatgcgagctgaagctgcagaagtggtacggggacctgcggggaaagcccttcgccatcgaagccgagaacagcatcctggacatcagcggcttcagcaagcagtacaactgtgccttcatctggcagaaggacggcgtgaagaagctgaacctgtacctgatcatcaactacttcaagggcggcaagctgcggttcaagaagatcaaacctgaagccttcgaagccaacagattctacaccgtgatcaacaaaaagagcggcgagatcgtgcccatggaggtgaacttcaacttcgacgaccccaacctgatcatcctgcctctggcctttggcaagagacagggcagagaattcatctggaacgacctgctgtccctggaaaccggcagcctgaagctggccaacggaagagtgatcgagaagacactgtacaacagaagaacccggcaggatgagcctgccctgttcgtggccctgaccttcgagcggcgggaggtcctggactcctccaatatcaaaccaatgaacctgatcggcgtggcaagaggcgaaaacatccccgccgtgatcgccctgaccgaccccgagggctgcccactgagccggtttaaggatagcctgggaaacccaacccacatcctgagaatcggcgagagctataaggagaagcagcggaccatccaggccaagaaggaggtggagcagcggagagccggcggctacagccggaagtacgccagcaaagccaagaatctggcagacgatatggtgagaaacaccgctagagatctgctgtactacgccgtgacccaggatgccatgctgatcttcgccaacctgagccggggcttcggccggcagggcaagcggaccttcatggccgagagacagtacacacggatggaggactggctgaccgccaagctggcctacgagggcctgagcaagacctacctgtccaagacactggcccagtacacctccaagacatgcagcaactgtgggtttaccatcaccagcgccgactacgacagggtgctggagaagctgaagaagacagcaacaggctggatgaccacaattaacggcaaggagctgaaggtggagggccagattacctactacaacagatacaagagacagaacgtagtcaaggacctgtccgtcgagctggatagactgagcgaagaatctgtgaacaacgacatctcctcctggacaaagggcagaagcggagaagctctgagcctcctgaagaaaagattctcccatagacccgtgcaggagaagttcgtgtgcctgaactgcggcttcgagacacacgcagccgagcaagccgccctgaacatcgccagatcctggctgttcctgcggagccaggagtacaagaaataccagacaaacaagacaaccggcaacaccgataagagagccttcgtcgagacctggcagtccttttaccggaagaagcttaaggaggtgtggaaacctgccgtgcggtctggcggatctggcggaggctccacaagcaaggagaacgccgtgacctacgacgacatccacatcgacttcaccagggaggagtggaccctgctggaccccagccagaagaacctgtacaaggacgtgatgctggagacctacaggcacctgaccaccatcggctacagctgggaggaccacaacatcgagaagtactgcgagagcagcaggaggcacaagagcaccgtgcagaggcacaagaggaccaacaccaacgagaacccctacgagaccagccccaagaaaaagagaaaagtctaagctgccttctgcggggcttgccttctggccatgcccttcttctctcccttgcacctgtacctcttggtctttgaataaagcctgagtaggaaggctagcaaaaaaaaaaaaaaaaaaaaaaaaaaaaaaaaaaaaaaaaaaaaaaaaaaaaaaaaaaaaaaaaaaaaaaaaaaaaaaaa

SEQ ID NO: 3774 - RNA, 5419 nt, synthetic construct
  source 1..5419: mol_type = other RNA
aggaaataagagagaaaagaagagtaagaagaaatataagagccaccatggcccctaagaagaagcgtaaagtgagccgggtgaacggcagcggcagcggcggcggcatgaaccacgaccaggagttcgacccccctaaggtgtaccctcccgtccccgccgagaagagaaagcccatccgggtcctgagcctgttcgatggcatcgccaccggtctgctggtgctgaaggacctgggcatccaggtggataggtacattgcctccgaggtgtgcgaggactccatcaccgtgggaatggtgcgtcatcagggcaagatcatgtacgtgggcgacgtgcggagcgtgacacagaagcatatccaggagtggggccctttcgacctggtgatcggcggcagcccttgcaatgacctgagcatcgtgaacccagcccggaagggcctgtacgagggaaccggcagactgttcttcgagttttacagactgctgcacgacgcccggcctaaggaaggcgacgaccggcccttcttttggctgttcgagaatgtggtggccatgggagtcagcgacaagcgggatattagccggttcctggagagcaaccccgtgatgatcgatgccaaggaagtgagcgccgcccaccgggccagatacttctggggcaatctgcctggcatgaacagacccctggccagcaccgtgaacgacaagctggagctgcaggagtgcctggagcacggccggatcgccaagttcagcaaggtgagaaccatcaccacccgaagcaacagcatcaaacaaggcaaggaccagcactttcctgtgttcatgaacgagaaggaggacatcctgtggtgtaccgagatggagagagtgttcgggttcccagtccactacacagatgtcagcaacatgtctagactggccagacagagactgctgggaagaagctggtccgtccctgtgatcagacacctgttcgcccctctgaaggagtacttcgcctgcgtgagcagcggcaacagcaacgccaacagccggggccccagcttctctagcggcctggtgccactgtccctgagagggagccacatgggccccatggagatctacaaaaccgtgagcgcctggaagcggcagcctgtgcgcgtgctgagcctgtttcggaatatcgataaagtcctgaaaagcctgggattcctggagagcggctctggctccggcggtggcaccctgaagtacgtggaggatgtgacaaacgtggtcagacgggatgtggagaagtggggccccttcgatctggtgtacggcagcacccaacccctgggcagctcttgtgaccggtgccctggctggtacatgtttcagttccaccggatcctgcagtacgccctgccgagacaggagtcccagcggccattcttttggattttcatggacaacttgctgctgaccgaggatgaccaggaaactaccactcggttcctgcagaccgaagccgtgaccctgcaggacgtgagaggccgggactaccagaacgccatgcgggtgtggtccaacatccctggactgaaaagcaagcacgcacctctgacccctaaagaagaggagtacctgcaggcccaggtgcggagcagaagcaagctggacgcccctaaggtggatctgctggtgaagaattgcctcctgcccctgagagagtacttcaagtatttcagccagaatagtctgcccctgggcggcccaagcagcggcgcccctcctcccagcggcggcagcccagccggctccccaacctctaccgaggagggcacctctgagtccgccacccccgagagcggccctggcacctccaccgagcccagcgagggcagcgcacccggcagccctgccggcagccccacctccacagaggagggaaccagcaccgagcccagcgaaggcagcgccccaggcaccagcaccgagcctagtgagggcggctctggcggcggcagcgcccaggagattaaacggatcaacaagatcagaagaagacttgtgaaagacagcaacaccaagaaggccggcaagacaggccccatgaaaaccctgctggttagagtgatgacacccgatctgagagagcggctggaaaacctgagaaagaagcctgaaaatatcccccagcccatcagcaatacatctagagccaacctgaataagctgctgaccgattacaccgaaatgaagaaggcgatcctgcatgtgtactgggaagagttccagaaggaccctgtgggcctgatgagccgggtggcccagcctgccagcaagaagatcgatcagaacaagctgaaacctgagatggacgagaagggcaacctgaccaccgccggctttgcctgctctcagtgtggccagcccctgttcgtgtacaagctggagcaggtgtctgagaagggcaaggcttacaccaactacttcggacggtgcaatgtggccgagcacgaaaagctgatcctgctggcccagctgaagcccgagaaggatagcgacgaagccgtgacatatagcctgggaaagtttgggcagagggccctggatttctacagcattcatgtgaccaaggagtccacccaccccgtgaagcccctggcccagatcgccggaaacagatacgcctccggacctgtgggaaaggccctgagcgacgcatgtatgggcacaatcgcctccttcctgtctaagtaccaggacatcatcatcgaacaccagaaggtggtgaagggcaaccagaagagactggagagcctgcgggagctggccggcaaggaaaacctggaataccctagcgtgaccctgccacctcagcctcacaccaaggagggcgttgatgcctacaacgaagtgatcgcccgggtgcgaatgtgggtgaacctgaacctgtggcagaagctgaagctaagcagagatgatgccaagcctctgctgagactgaagggattcccttcctttcctctggtcgagagacaggccaacgaagtggactggtgggacatggtgtgtaacgtgaagaagctgatcaacgagaaaaaggaggatggcaaggtgttttggcagaatctggctggctacaagagacaggaagccctgagaccatacctgagcagcgaggaagatcggaagaagggaaagaaattcgctcggtaccagctgggcgacctgctgctgcacctggaaaagaagcacggcgaggactggggaaaggtgtacgacgaggcctgggagcggattgacaagaaagtggaaggcctgagcaagcacatcaagctggaagaggaacggagaagcgaggacgcccagagcaaggccgccctgaccgactggctgcgggctaaggccagcttcgtgatcgagggcctgaaggaggccgacaaggacgagttctgcagatgcgagctgaagctgcagaagtggtacggggacctgcggggaaagcccttcgccatcgaagccgagaacagcatcctggacatcagcggcttcagcaagcagtacaactgtgccttcatctggcagaaggacggcgtgaagaagctgaacctgtacctgatcatcaactacttcaagggcggcaagctgcggttcaagaagatcaaacctgaagccttcgaagccaacagattctacaccgtgatcaacaaaaagagcggcgagatcgtgcccatggaggtgaacttcaacttcgacgaccccaacctgatcatcctgcctctggcctttggcaagagacagggcagagaattcatctggaacgacctgctgtccctggaaaccggcagcctgaagctggccaacggaagagtgatcgagaagacactgtacaacagaagaacccggcaggatgagcctgccctgttcgtggccctgaccttcgagcggcgggaggtcctggactcctccaatatcaaaccaatgaacctgatcggcgtggcaagaggcgaaaacatccccgccgtgatcgccctgaccgaccccgagggctgcccactgagccggtttaaggatagcctgggaaacccaacccacatcctgagaatcggcgagagctataaggagaagcagcggaccatccaggccaagaaggaggtggagcagcggagagccggcggctacagccggaagtacgccagcaaagccaagaatctggcagacgatatggtgagaaacaccgctagagatctgctgtactacgccgtgacccaggatgccatgctgatcttcgccaacctgagccggggcttcggccggcagggcaagcggaccttcatggccgagagacagtacacacggatggaggactggctgaccgccaagctggcctacgagggcctgagcaagacctacctgtccaagacactggcccagtacacctccaagacatgcagcaactgtgggtttaccatcaccagcgccgactacgacagggtgctggagaagctgaagaagacagcaacaggctggatgaccacaattaacggcaaggagctgaaggtggagggccagattacctactacaacagatacaagagacagaacgtagtcaaggacctgtccgtcgagctggatagactgagcgaagaatctgtgaacaacgacatctcctcctggacaaagggcagaagcggagaagctctgagcctcctgaagaaaagattctcccatagacccgtgcaggagaagttcgtgtgcctgaactgcggcttcgagacacacgcagccgagcaagccgccctgaacatcgccagatcctggctgttcctgcggagccaggagtacaagaaataccagacaaacaagacaaccggcaacaccgataagagagccttcgtcgagacctggcagtccttttaccggaagaagcttaaggaggtgtggaaacctgccgtgcggtctggcggatctggcggaggctccacaagcccccaggtgagcctgaccttcgaggacgtggccgtgctgttcaccagggacgagtggaggaagctggcccccagccagaggaacctgtacagggacgtgatgctggagaactacaggaacctggtgagcctgggcctgcccttcaccaagcccaaggtgatcagcctgctgcagcagggcgaggacccctggaaggtggagaaggacagcagcggcggctgcagccccggctgcaagagcaacaccagccccaagaaaaagagaaaagtctaagctgccttctgcggggcttgccttctggccatgcccttcttctctcccttgcacctgtacctcttggtctttgaataaagcctgagtaggaaggctagcaaaaaaaaaaaaaaaaaaaaaaaaaaaaaaaaaaaaaaaaaaaaaaaaaaaaaaaaaaaaaaaaaaaaaaaaaaaaaaaa

SEQ ID NO: 3775 - RNA, 5419 nt, synthetic construct
  source 1..5419: mol_type = other RNA
aggaaataagagagaaaagaagagtaagaagaaatataagagccaccatggcccctaagaagaagcgtaaagtgagccgggtgaacggcagcggcagcggcggcggcatgaaccacgaccaggagttcgacccccctaaggtgtaccctcccgtccccgccgagaagagaaagcccatccgggtcctgagcctgttcgatggcatcgccaccggtctgctggtgctgaaggacctgggcatccaggtggataggtacattgcctccgaggtgtgcgaggactccatcaccgtgggaatggtgcgtcatcagggcaagatcatgtacgtgggcgacgtgcggagcgtgacacagaagcatatccaggagtggggccctttcgacctggtgatcggcggcagcccttgcaatgacctgagcatcgtgaacccagcccggaagggcctgtacgagggaaccggcagactgttcttcgagttttacagactgctgcacgacgcccggcctaaggaaggcgacgaccggcccttcttttggctgttcgagaatgtggtggccatgggagtcagcgacaagcgggatattagccggttcctggagagcaaccccgtgatgatcgatgccaaggaagtgagcgccgcccaccgggccagatacttctggggcaatctgcctggcatgaacagacccctggccagcaccgtgaacgacaagctggagctgcaggagtgcctggagcacggccggatcgccaagttcagcaaggtgagaaccatcaccacccgaagcaacagcatcaaacaaggcaaggaccagcactttcctgtgttcatgaacgagaaggaggacatcctgtggtgtaccgagatggagagagtgttcgggttcccagtccactacacagatgtcagcaacatgtctagactggccagacagagactgctgggaagaagctggtccgtccctgtgatcagacacctgttcgcccctctgaaggagtacttcgcctgcgtgagcagcggcaacagcaacgccaacagccggggccccagcttctctagcggcctggtgccactgtccctgagagggagccacatgggccccatggagatctacaaaaccgtgagcgcctggaagcggcagcctgtgcgcgtgctgagcctgtttcggaatatcgataaagtcctgaaaagcctgggattcctggagagcggctctggctccggcggtggcaccctgaagtacgtggaggatgtgacaaacgtggtcagacgggatgtggagaagtggggccccttcgatctggtgtacggcagcacccaacccctgggcagctcttgtgaccggtgccctggctggtacatgtttcagttccaccggatcctgcagtacgccctgccgagacaggagtcccagcggccattcttttggattttcatggacaacttgctgctgaccgaggatgaccaggaaactaccactcggttcctgcagaccgaagccgtgaccctgcaggacgtgagaggccgggactaccagaacgccatgcgggtgtggtccaacatccctggactgaaaagcaagcacgcacctctgacccctaaagaagaggagtacctgcaggcccaggtgcggagcagaagcaagctggacgcccctaaggtggatctgctggtgaagaattgcctcctgcccctgagagagtacttcaagtatttcagccagaatagtctgcccctgggcggcccaagcagcggcgcccctcctcccagcggcggcagcccagccggctccccaacctctaccgaggagggcacctctgagtccgccacccccgagagcggccctggcacctccaccgagcccagcgagggcagcgcacccggcagccctgccggcagccccacctccacagaggagggaaccagcaccgagcccagcgaaggcagcgccccaggcaccagcaccgagcctagtgagggcggctctggcggcggcagcgcccaggagattaaacggatcaacaagatcagaagaagacttgtgaaagacagcaacaccaagaaggccggcaagacaggccccatgaaaaccctgctggttagagtgatgacacccgatctgagagagcggctggaaaacctgagaaagaagcctgaaaatatcccccagcccatcagcaatacatctagagccaacctgaataagctgctgaccgattacaccgaaatgaagaaggcgatcctgcatgtgtactgggaagagttccagaaggaccctgtgggcctgatgagccgggtggcccagcctgccagcaagaagatcgatcagaacaagctgaaacctgagatggacgagaagggcaacctgaccaccgccggctttgcctgctctcagtgtggccagcccctgttcgtgtacaagctggagcaggtgtctgagaagggcaaggcttacaccaactacttcggacggtgcaatgtggccgagcacgaaaagctgatcctgctggcccagctgaagcccgagaaggatagcgacgaagccgtgacatatagcctgggaaagtttgggcagagggccctggatttctacagcattcatgtgaccaaggagtccacccaccccgtgaagcccctggcccagatcgccggaaacagatacgcctccggacctgtgggaaaggccctgagcgacgcatgtatgggcacaatcgcctccttcctgtctaagtaccaggacatcatcatcgaacaccagaaggtggtgaagggcaaccagaagagactggagagcctgcgggagctggccggcaaggaaaacctggaataccctagcgtgaccctgccacctcagcctcacaccaaggagggcgttgatgcctacaacgaagtgatcgcccgggtgcgaatgtgggtgaacctgaacctgtggcagaagctgaagctaagcagagatgatgccaagcctctgctgagactgaagggattcccttcctttcctctggtcgagagacaggccaacgaagtggactggtgggacatggtgtgtaacgtgaagaagctgatcaacgagaaaaaggaggatggcaaggtgttttggcagaatctggctggctacaagagacaggaagccctgagaccatacctgagcagcgaggaagatcggaagaagggaaagaaattcgctcggtaccagctgggcgacctgctgctgcacctggaaaagaagcacggcgaggactggggaaaggtgtacgacgaggcctgggagcggattgacaagaaagtggaaggcctgagcaagcacatcaagctggaagaggaacggagaagcgaggacgcccagagcaaggccgccctgaccgactggctgcgggctaaggccagcttcgtgatcgagggcctgaaggaggccgacaaggacgagttctgcagatgcgagctgaagctgcagaagtggtacggggacctgcggggaaagcccttcgccatcgaagccgagaacagcatcctggacatcagcggcttcagcaagcagtacaactgtgccttcatctggcagaaggacggcgtgaagaagctgaacctgtacctgatcatcaactacttcaagggcggcaagctgcggttcaagaagatcaaacctgaagccttcgaagccaacagattctacaccgtgatcaacaaaaagagcggcgagatcgtgcccatggaggtgaacttcaacttcgacgaccccaacctgatcatcctgcctctggcctttggcaagagacagggcagagaattcatctggaacgacctgctgtccctggaaaccggcagcctgaagctggccaacggaagagtgatcgagaagacactgtacaacagaagaacccggcaggatgagcctgccctgttcgtggccctgaccttcgagcggcgggaggtcctggactcctccaatatcaaaccaatgaacctgatcggcgtggcaagaggcgaaaacatccccgccgtgatcgccctgaccgaccccgagggctgcccactgagccggtttaaggatagcctgggaaacccaacccacatcctgagaatcggcgagagctataaggagaagcagcggaccatccaggccaagaaggaggtggagcagcggagagccggcggctacagccggaagtacgccagcaaagccaagaatctggcagacgatatggtgagaaacaccgctagagatctgctgtactacgccgtgacccaggatgccatgctgatcttcgccaacctgagccggggcttcggccggcagggcaagcggaccttcatggccgagagacagtacacacggatggaggactggctgaccgccaagctggcctacgagggcctgagcaagacctacctgtccaagacactggcccagtacacctccaagacatgcagcaactgtgggtttaccatcaccagcgccgactacgacagggtgctggagaagctgaagaagacagcaacaggctggatgaccacaattaacggcaaggagctgaaggtggagggccagattacctactacaacagatacaagagacagaacgtagtcaaggacctgtccgtcgagctggatagactgagcgaagaatctgtgaacaacgacatctcctcctggacaaagggcagaagcggagaagctctgagcctcctgaagaaaagattctcccatagacccgtgcaggagaagttcgtgtgcctgaactgcggcttcgagacacacgcagccgagcaagccgccctgaacatcgccagatcctggctgttcctgcggagccaggagtacaagaaataccagacaaacaagacaaccggcaacaccgataagagagccttcgtcgagacctggcagtccttttaccggaagaagcttaaggaggtgtggaaacctgccgtgcggtctggcggatctggcggaggctccacaagcgcccacagcatggtgatgttcagggacgtgaccgtggacttcagccaggaggagtgggagtgcctgagcagctacgagagggacctgtacagggacgtgatgctggagaactacagccacctggtgagcctggccggctgcagcatcagcaagcccgacgtgatcaccctgctggagcagggcaaggagccctggatgatcgtgagggccgagaagaggaggtggagcagggacctggagagcaccagccccaagaaaaagagaaaagtctaagctgccttctgcggggcttgccttctggccatgcccttcttctctcccttgcacctgtacctcttggtctttgaataaagcctgagtaggaaggctagcaaaaaaaaaaaaaaaaaaaaaaaaaaaaaaaaaaaaaaaaaaaaaaaaaaaaaaaaaaaaaaaaaaaaaaaaaaaaaaaa

SEQ ID NO: 3776 - RNA, 5419 nt, synthetic construct
  source 1..5419: mol_type = other RNA
aggaaataagagagaaaagaagagtaagaagaaatataagagccaccatggcccctaagaagaagcgtaaagtgagccgggtgaacggcagcggcagcggcggcggcatgaaccacgaccaggagttcgacccccctaaggtgtaccctcccgtccccgccgagaagagaaagcccatccgggtcctgagcctgttcgatggcatcgccaccggtctgctggtgctgaaggacctgggcatccaggtggataggtacattgcctccgaggtgtgcgaggactccatcaccgtgggaatggtgcgtcatcagggcaagatcatgtacgtgggcgacgtgcggagcgtgacacagaagcatatccaggagtggggccctttcgacctggtgatcggcggcagcccttgcaatgacctgagcatcgtgaacccagcccggaagggcctgtacgagggaaccggcagactgttcttcgagttttacagactgctgcacgacgcccggcctaaggaaggcgacgaccggcccttcttttggctgttcgagaatgtggtggccatgggagtcagcgacaagcgggatattagccggttcctggagagcaaccccgtgatgatcgatgccaaggaagtgagcgccgcccaccgggccagatacttctggggcaatctgcctggcatgaacagacccctggccagcaccgtgaacgacaagctggagctgcaggagtgcctggagcacggccggatcgccaagttcagcaaggtgagaaccatcaccacccgaagcaacagcatcaaacaaggcaaggaccagcactttcctgtgttcatgaacgagaaggaggacatcctgtggtgtaccgagatggagagagtgttcgggttcccagtccactacacagatgtcagcaacatgtctagactggccagacagagactgctgggaagaagctggtccgtccctgtgatcagacacctgttcgcccctctgaaggagtacttcgcctgcgtgagcagcggcaacagcaacgccaacagccggggccccagcttctctagcggcctggtgccactgtccctgagagggagccacatgggccccatggagatctacaaaaccgtgagcgcctggaagcggcagcctgtgcgcgtgctgagcctgtttcggaatatcgataaagtcctgaaaagcctgggattcctggagagcggctctggctccggcggtggcaccctgaagtacgtggaggatgtgacaaacgtggtcagacgggatgtggagaagtggggccccttcgatctggtgtacggcagcacccaacccctgggcagctcttgtgaccggtgccctggctggtacatgtttcagttccaccggatcctgcagtacgccctgccgagacaggagtcccagcggccattcttttggattttcatggacaacttgctgctgaccgaggatgaccaggaaactaccactcggttcctgcagaccgaagccgtgaccctgcaggacgtgagaggccgggactaccagaacgccatgcgggtgtggtccaacatccctggactgaaaagcaagcacgcacctctgacccctaaagaagaggagtacctgcaggcccaggtgcggagcagaagcaagctggacgcccctaaggtggatctgctggtgaagaattgcctcctgcccctgagagagtacttcaagtatttcagccagaatagtctgcccctgggcggcccaagcagcggcgcccctcctcccagcggcggcagcccagccggctccccaacctctaccgaggagggcacctctgagtccgccacccccgagagcggccctggcacctccaccgagcccagcgagggcagcgcacccggcagccctgccggcagccccacctccacagaggagggaaccagcaccgagcccagcgaaggcagcgccccaggcaccagcaccgagcctagtgagggcggctctggcggcggcagcgcccaggagattaaacggatcaacaagatcagaagaagacttgtgaaagacagcaacaccaagaaggccggcaagacaggccccatgaaaaccctgctggttagagtgatgacacccgatctgagagagcggctggaaaacctgagaaagaagcctgaaaatatcccccagcccatcagcaatacatctagagccaacctgaataagctgctgaccgattacaccgaaatgaagaaggcgatcctgcatgtgtactgggaagagttccagaaggaccctgtgggcctgatgagccgggtggcccagcctgccagcaagaagatcgatcagaacaagctgaaacctgagatggacgagaagggcaacctgaccaccgccggctttgcctgctctcagtgtggccagcccctgttcgtgtacaagctggagcaggtgtctgagaagggcaaggcttacaccaactacttcggacggtgcaatgtggccgagcacgaaaagctgatcctgctggcccagctgaagcccgagaaggatagcgacgaagccgtgacatatagcctgggaaagtttgggcagagggccctggatttctacagcattcatgtgaccaaggagtccacccaccccgtgaagcccctggcccagatcgccggaaacagatacgcctccggacctgtgggaaaggccctgagcgacgcatgtatgggcacaatcgcctccttcctgtctaagtaccaggacatcatcatcgaacaccagaaggtggtgaagggcaaccagaagagactggagagcctgcgggagctggccggcaaggaaaacctggaataccctagcgtgaccctgccacctcagcctcacaccaaggagggcgttgatgcctacaacgaagtgatcgcccgggtgcgaatgtgggtgaacctgaacctgtggcagaagctgaagctaagcagagatgatgccaagcctctgctgagactgaagggattcccttcctttcctctggtcgagagacaggccaacgaagtggactggtgggacatggtgtgtaacgtgaagaagctgatcaacgagaaaaaggaggatggcaaggtgttttggcagaatctggctggctacaagagacaggaagccctgagaccatacctgagcagcgaggaagatcggaagaagggaaagaaattcgctcggtaccagctgggcgacctgctgctgcacctggaaaagaagcacggcgaggactggggaaaggtgtacgacgaggcctgggagcggattgacaagaaagtggaaggcctgagcaagcacatcaagctggaagaggaacggagaagcgaggacgcccagagcaaggccgccctgaccgactggctgcgggctaaggccagcttcgtgatcgagggcctgaaggaggccgacaaggacgagttctgcagatgcgagctgaagctgcagaagtggtacggggacctgcggggaaagcccttcgccatcgaagccgagaacagcatcctggacatcagcggcttcagcaagcagtacaactgtgccttcatctggcagaaggacggcgtgaagaagctgaacctgtacctgatcatcaactacttcaagggcggcaagctgcggttcaagaagatcaaacctgaagccttcgaagccaacagattctacaccgtgatcaacaaaaagagcggcgagatcgtgcccatggaggtgaacttcaacttcgacgaccccaacctgatcatcctgcctctggcctttggcaagagacagggcagagaattcatctggaacgacctgctgtccctggaaaccggcagcctgaagctggccaacggaagagtgatcgagaagacactgtacaacagaagaacccggcaggatgagcctgccctgttcgtggccctgaccttcgagcggcgggaggtcctggactcctccaatatcaaaccaatgaacctgatcggcgtggcaagaggcgaaaacatccccgccgtgatcgccctgaccgaccccgagggctgcccactgagccggtttaaggatagcctgggaaacccaacccacatcctgagaatcggcgagagctataaggagaagcagcggaccatccaggccaagaaggaggtggagcagcggagagccggcggctacagccggaagtacgccagcaaagccaagaatctggcagacgatatggtgagaaacaccgctagagatctgctgtactacgccgtgacccaggatgccatgctgatcttcgccaacctgagccggggcttcggccggcagggcaagcggaccttcatggccgagagacagtacacacggatggaggactggctgaccgccaagctggcctacgagggcctgagcaagacctacctgtccaagacactggcccagtacacctccaagacatgcagcaactgtgggtttaccatcaccagcgccgactacgacagggtgctggagaagctgaagaagacagcaacaggctggatgaccacaattaacggcaaggagctgaaggtggagggccagattacctactacaacagatacaagagacagaacgtagtcaaggacctgtccgtcgagctggatagactgagcgaagaatctgtgaacaacgacatctcctcctggacaaagggcagaagcggagaagctctgagcctcctgaagaaaagattctcccatagacccgtgcaggagaagttcgtgtgcctgaactgcggcttcgagacacacgcagccgagcaagccgccctgaacatcgccagatcctggctgttcctgcggagccaggagtacaagaaataccagacaaacaagacaaccggcaacaccgataagagagccttcgtcgagacctggcagtccttttaccggaagaagcttaaggaggtgtggaaacctgccgtgcggtctggcggatctggcggaggctccacaagccaggtgcccgtgaccttcgaggacatcgccgtgagcttcagccaggaggagtggaagtacctggacgagggccagaagaacctgtactgggaggtgatgaaggagaactacgagaccctgatcagcctggccgacagcgaggtggagcaggaggacaagagggccaagaacagggaggagtgccccatgctgtggggcctgatccccaggcagagcaggaagaacagcgagaaggtgagctggaccagccccaagaaaaagagaaaagtctaagctgccttctgcggggcttgccttctggccatgcccttcttctctcccttgcacctgtacctcttggtctttgaataaagcctgagtaggaaggctagcaaaaaaaaaaaaaaaaaaaaaaaaaaaaaaaaaaaaaaaaaaaaaaaaaaaaaaaaaaaaaaaaaaaaaaaaaaaaaaaa

SEQ ID NO: 3777 - RNA, 5419 nt, synthetic construct
  source 1..5419: mol_type = other RNA
aggaaataagagagaaaagaagagtaagaagaaatataagagccaccatggcccctaagaagaagcgtaaagtgagccgggtgaacggcagcggcagcggcggcggcatgaaccacgaccaggagttcgacccccctaaggtgtaccctcccgtccccgccgagaagagaaagcccatccgggtcctgagcctgttcgatggcatcgccaccggtctgctggtgctgaaggacctgggcatccaggtggataggtacattgcctccgaggtgtgcgaggactccatcaccgtgggaatggtgcgtcatcagggcaagatcatgtacgtgggcgacgtgcggagcgtgacacagaagcatatccaggagtggggccctttcgacctggtgatcggcggcagcccttgcaatgacctgagcatcgtgaacccagcccggaagggcctgtacgagggaaccggcagactgttcttcgagttttacagactgctgcacgacgcccggcctaaggaaggcgacgaccggcccttcttttggctgttcgagaatgtggtggccatgggagtcagcgacaagcgggatattagccggttcctggagagcaaccccgtgatgatcgatgccaaggaagtgagcgccgcccaccgggccagatacttctggggcaatctgcctggcatgaacagacccctggccagcaccgtgaacgacaagctggagctgcaggagtgcctggagcacggccggatcgccaagttcagcaaggtgagaaccatcaccacccgaagcaacagcatcaaacaaggcaaggaccagcactttcctgtgttcatgaacgagaaggaggacatcctgtggtgtaccgagatggagagagtgttcgggttcccagtccactacacagatgtcagcaacatgtctagactggccagacagagactgctgggaagaagctggtccgtccctgtgatcagacacctgttcgcccctctgaaggagtacttcgcctgcgtgagcagcggcaacagcaacgccaacagccggggccccagcttctctagcggcctggtgccactgtccctgagagggagccacatgggccccatggagatctacaaaaccgtgagcgcctggaagcggcagcctgtgcgcgtgctgagcctgtttcggaatatcgataaagtcctgaaaagcctgggattcctggagagcggctctggctccggcggtggcaccctgaagtacgtggaggatgtgacaaacgtggtcagacgggatgtggagaagtggggccccttcgatctggtgtacggcagcacccaacccctgggcagctcttgtgaccggtgccctggctggtacatgtttcagttccaccggatcctgcagtacgccctgccgagacaggagtcccagcggccattcttttggattttcatggacaacttgctgctgaccgaggatgaccaggaaactaccactcggttcctgcagaccgaagccgtgaccctgcaggacgtgagaggccgggactaccagaacgccatgcgggtgtggtccaacatccctggactgaaaagcaagcacgcacctctgacccctaaagaagaggagtacctgcaggcccaggtgcggagcagaagcaagctggacgcccctaaggtggatctgctggtgaagaattgcctcctgcccctgagagagtacttcaagtatttcagccagaatagtctgcccctgggcggcccaagcagcggcgcccctcctcccagcggcggcagcccagccggctccccaacctctaccgaggagggcacctctgagtccgccacccccgagagcggccctggcacctccaccgagcccagcgagggcagcgcacccggcagccctgccggcagccccacctccacagaggagggaaccagcaccgagcccagcgaaggcagcgccccaggcaccagcaccgagcctagtgagggcggctctggcggcggcagcgcccaggagattaaacggatcaacaagatcagaagaagacttgtgaaagacagcaacaccaagaaggccggcaagacaggccccatgaaaaccctgctggttagagtgatgacacccgatctgagagagcggctggaaaacctgagaaagaagcctgaaaatatcccccagcccatcagcaatacatctagagccaacctgaataagctgctgaccgattacaccgaaatgaagaaggcgatcctgcatgtgtactgggaagagttccagaaggaccctgtgggcctgatgagccgggtggcccagcctgccagcaagaagatcgatcagaacaagctgaaacctgagatggacgagaagggcaacctgaccaccgccggctttgcctgctctcagtgtggccagcccctgttcgtgtacaagctggagcaggtgtctgagaagggcaaggcttacaccaactacttcggacggtgcaatgtggccgagcacgaaaagctgatcctgctggcccagctgaagcccgagaaggatagcgacgaagccgtgacatatagcctgggaaagtttgggcagagggccctggatttctacagcattcatgtgaccaaggagtccacccaccccgtgaagcccctggcccagatcgccggaaacagatacgcctccggacctgtgggaaaggccctgagcgacgcatgtatgggcacaatcgcctccttcctgtctaagtaccaggacatcatcatcgaacaccagaaggtggtgaagggcaaccagaagagactggagagcctgcgggagctggccggcaaggaaaacctggaataccctagcgtgaccctgccacctcagcctcacaccaaggagggcgttgatgcctacaacgaagtgatcgcccgggtgcgaatgtgggtgaacctgaacctgtggcagaagctgaagctaagcagagatgatgccaagcctctgctgagactgaagggattcccttcctttcctctggtcgagagacaggccaacgaagtggactggtgggacatggtgtgtaacgtgaagaagctgatcaacgagaaaaaggaggatggcaaggtgttttggcagaatctggctggctacaagagacaggaagccctgagaccatacctgagcagcgaggaagatcggaagaagggaaagaaattcgctcggtaccagctgggcgacctgctgctgcacctggaaaagaagcacggcgaggactggggaaaggtgtacgacgaggcctgggagcggattgacaagaaagtggaaggcctgagcaagcacatcaagctggaagaggaacggagaagcgaggacgcccagagcaaggccgccctgaccgactggctgcgggctaaggccagcttcgtgatcgagggcctgaaggaggccgacaaggacgagttctgcagatgcgagctgaagctgcagaagtggtacggggacctgcggggaaagcccttcgccatcgaagccgagaacagcatcctggacatcagcggcttcagcaagcagtacaactgtgccttcatctggcagaaggacggcgtgaagaagctgaacctgtacctgatcatcaactacttcaagggcggcaagctgcggttcaagaagatcaaacctgaagccttcgaagccaacagattctacaccgtgatcaacaaaaagagcggcgagatcgtgcccatggaggtgaacttcaacttcgacgaccccaacctgatcatcctgcctctggcctttggcaagagacagggcagagaattcatctggaacgacctgctgtccctggaaaccggcagcctgaagctggccaacggaagagtgatcgagaagacactgtacaacagaagaacccggcaggatgagcctgccctgttcgtggccctgaccttcgagcggcgggaggtcctggactcctccaatatcaaaccaatgaacctgatcggcgtggcaagaggcgaaaacatccccgccgtgatcgccctgaccgaccccgagggctgcccactgagccggtttaaggatagcctgggaaacccaacccacatcctgagaatcggcgagagctataaggagaagcagcggaccatccaggccaagaaggaggtggagcagcggagagccggcggctacagccggaagtacgccagcaaagccaagaatctggcagacgatatggtgagaaacaccgctagagatctgctgtactacgccgtgacccaggatgccatgctgatcttcgccaacctgagccggggcttcggccggcagggcaagcggaccttcatggccgagagacagtacacacggatggaggactggctgaccgccaagctggcctacgagggcctgagcaagacctacctgtccaagacactggcccagtacacctccaagacatgcagcaactgtgggtttaccatcaccagcgccgactacgacagggtgctggagaagctgaagaagacagcaacaggctggatgaccacaattaacggcaaggagctgaaggtggagggccagattacctactacaacagatacaagagacagaacgtagtcaaggacctgtccgtcgagctggatagactgagcgaagaatctgtgaacaacgacatctcctcctggacaaagggcagaagcggagaagctctgagcctcctgaagaaaagattctcccatagacccgtgcaggagaagttcgtgtgcctgaactgcggcttcgagacacacgcagccgagcaagccgccctgaacatcgccagatcctggctgttcctgcggagccaggagtacaagaaataccagacaaacaagacaaccggcaacaccgataagagagccttcgtcgagacctggcagtccttttaccggaagaagcttaaggaggtgtggaaacctgccgtgcggtctggcggatctggcggaggctccacaagcatggaggagctgctgagcttccccgacgtggccatcgacttcagcgccgaggagtgcgagtgcctggacctggcccagtggaacctgtacaaggaggtgatgctggagaactacagcaacctggtgttcctgggcctgagcttcagcaagccctacctggtgaccttcctggagcagagcagcgagccctggagcgtgaagaggaagagcgccgccgccagccaccccggcagcaagccccacaccagccccaagaaaaagagaaaagtctaagctgccttctgcggggcttgccttctggccatgcccttcttctctcccttgcacctgtacctcttggtctttgaataaagcctgagtaggaaggctagcaaaaaaaaaaaaaaaaaaaaaaaaaaaaaaaaaaaaaaaaaaaaaaaaaaaaaaaaaaaaaaaaaaaaaaaaaaaaaaaa

SEQ ID NO: 3778 - RNA, 5419 nt, synthetic construct
  source 1..5419: mol_type = other RNA
aggaaataagagagaaaagaagagtaagaagaaatataagagccaccatggcccctaagaagaagcgtaaagtgagccgggtgaacggcagcggcagcggcggcggcatgaaccacgaccaggagttcgacccccctaaggtgtaccctcccgtccccgccgagaagagaaagcccatccgggtcctgagcctgttcgatggcatcgccaccggtctgctggtgctgaaggacctgggcatccaggtggataggtacattgcctccgaggtgtgcgaggactccatcaccgtgggaatggtgcgtcatcagggcaagatcatgtacgtgggcgacgtgcggagcgtgacacagaagcatatccaggagtggggccctttcgacctggtgatcggcggcagcccttgcaatgacctgagcatcgtgaacccagcccggaagggcctgtacgagggaaccggcagactgttcttcgagttttacagactgctgcacgacgcccggcctaaggaaggcgacgaccggcccttcttttggctgttcgagaatgtggtggccatgggagtcagcgacaagcgggatattagccggttcctggagagcaaccccgtgatgatcgatgccaaggaagtgagcgccgcccaccgggccagatacttctggggcaatctgcctggcatgaacagacccctggccagcaccgtgaacgacaagctggagctgcaggagtgcctggagcacggccggatcgccaagttcagcaaggtgagaaccatcaccacccgaagcaacagcatcaaacaaggcaaggaccagcactttcctgtgttcatgaacgagaaggaggacatcctgtggtgtaccgagatggagagagtgttcgggttcccagtccactacacagatgtcagcaacatgtctagactggccagacagagactgctgggaagaagctggtccgtccctgtgatcagacacctgttcgcccctctgaaggagtacttcgcctgcgtgagcagcggcaacagcaacgccaacagccggggccccagcttctctagcggcctggtgccactgtccctgagagggagccacatgggccccatggagatctacaaaaccgtgagcgcctggaagcggcagcctgtgcgcgtgctgagcctgtttcggaatatcgataaagtcctgaaaagcctgggattcctggagagcggctctggctccggcggtggcaccctgaagtacgtggaggatgtgacaaacgtggtcagacgggatgtggagaagtggggccccttcgatctggtgtacggcagcacccaacccctgggcagctcttgtgaccggtgccctggctggtacatgtttcagttccaccggatcctgcagtacgccctgccgagacaggagtcccagcggccattcttttggattttcatggacaacttgctgctgaccgaggatgaccaggaaactaccactcggttcctgcagaccgaagccgtgaccctgcaggacgtgagaggccgggactaccagaacgccatgcgggtgtggtccaacatccctggactgaaaagcaagcacgcacctctgacccctaaagaagaggagtacctgcaggcccaggtgcggagcagaagcaagctggacgcccctaaggtggatctgctggtgaagaattgcctcctgcccctgagagagtacttcaagtatttcagccagaatagtctgcccctgggcggcccaagcagcggcgcccctcctcccagcggcggcagcccagccggctccccaacctctaccgaggagggcacctctgagtccgccacccccgagagcggccctggcacctccaccgagcccagcgagggcagcgcacccggcagccctgccggcagccccacctccacagaggagggaaccagcaccgagcccagcgaaggcagcgccccaggcaccagcaccgagcctagtgagggcggctctggcggcggcagcgcccaggagattaaacggatcaacaagatcagaagaagacttgtgaaagacagcaacaccaagaaggccggcaagacaggccccatgaaaaccctgctggttagagtgatgacacccgatctgagagagcggctggaaaacctgagaaagaagcctgaaaatatcccccagcccatcagcaatacatctagagccaacctgaataagctgctgaccgattacaccgaaatgaagaaggcgatcctgcatgtgtactgggaagagttccagaaggaccctgtgggcctgatgagccgggtggcccagcctgccagcaagaagatcgatcagaacaagctgaaacctgagatggacgagaagggcaacctgaccaccgccggctttgcctgctctcagtgtggccagcccctgttcgtgtacaagctggagcaggtgtctgagaagggcaaggcttacaccaactacttcggacggtgcaatgtggccgagcacgaaaagctgatcctgctggcccagctgaagcccgagaaggatagcgacgaagccgtgacatatagcctgggaaagtttgggcagagggccctggatttctacagcattcatgtgaccaaggagtccacccaccccgtgaagcccctggcccagatcgccggaaacagatacgcctccggacctgtgggaaaggccctgagcgacgcatgtatgggcacaatcgcctccttcctgtctaagtaccaggacatcatcatcgaacaccagaaggtggtgaagggcaaccagaagagactggagagcctgcgggagctggccggcaaggaaaacctggaataccctagcgtgaccctgccacctcagcctcacaccaaggagggcgttgatgcctacaacgaagtgatcgcccgggtgcgaatgtgggtgaacctgaacctgtggcagaagctgaagctaagcagagatgatgccaagcctctgctgagactgaagggattcccttcctttcctctggtcgagagacaggccaacgaagtggactggtgggacatggtgtgtaacgtgaagaagctgatcaacgagaaaaaggaggatggcaaggtgttttggcagaatctggctggctacaagagacaggaagccctgagaccatacctgagcagcgaggaagatcggaagaagggaaagaaattcgctcggtaccagctgggcgacctgctgctgcacctggaaaagaagcacggcgaggactggggaaaggtgtacgacgaggcctgggagcggattgacaagaaagtggaaggcctgagcaagcacatcaagctggaagaggaacggagaagcgaggacgcccagagcaaggccgccctgaccgactggctgcgggctaaggccagcttcgtgatcgagggcctgaaggaggccgacaaggacgagttctgcagatgcgagctgaagctgcagaagtggtacggggacctgcggggaaagcccttcgccatcgaagccgagaacagcatcctggacatcagcggcttcagcaagcagtacaactgtgccttcatctggcagaaggacggcgtgaagaagctgaacctgtacctgatcatcaactacttcaagggcggcaagctgcggttcaagaagatcaaacctgaagccttcgaagccaacagattctacaccgtgatcaacaaaaagagcggcgagatcgtgcccatggaggtgaacttcaacttcgacgaccccaacctgatcatcctgcctctggcctttggcaagagacagggcagagaattcatctggaacgacctgctgtccctggaaaccggcagcctgaagctggccaacggaagagtgatcgagaagacactgtacaacagaagaacccggcaggatgagcctgccctgttcgtggccctgaccttcgagcggcgggaggtcctggactcctccaatatcaaaccaatgaacctgatcggcgtggcaagaggcgaaaacatccccgccgtgatcgccctgaccgaccccgagggctgcccactgagccggtttaaggatagcctgggaaacccaacccacatcctgagaatcggcgagagctataaggagaagcagcggaccatccaggccaagaaggaggtggagcagcggagagccggcggctacagccggaagtacgccagcaaagccaagaatctggcagacgatatggtgagaaacaccgctagagatctgctgtactacgccgtgacccaggatgccatgctgatcttcgccaacctgagccggggcttcggccggcagggcaagcggaccttcatggccgagagacagtacacacggatggaggactggctgaccgccaagctggcctacgagggcctgagcaagacctacctgtccaagacactggcccagtacacctccaagacatgcagcaactgtgggtttaccatcaccagcgccgactacgacagggtgctggagaagctgaagaagacagcaacaggctggatgaccacaattaacggcaaggagctgaaggtggagggccagattacctactacaacagatacaagagacagaacgtagtcaaggacctgtccgtcgagctggatagactgagcgaagaatctgtgaacaacgacatctcctcctggacaaagggcagaagcggagaagctctgagcctcctgaagaaaagattctcccatagacccgtgcaggagaagttcgtgtgcctgaactgcggcttcgagacacacgcagccgagcaagccgccctgaacatcgccagatcctggctgttcctgcggagccaggagtacaagaaataccagacaaacaagacaaccggcaacaccgataagagagccttcgtcgagacctggcagtccttttaccggaagaagcttaaggaggtgtggaaacctgccgtgcggtctggcggatctggcggaggctccacaagcctgcccgacagcctgaccttcaccgacgtggccatcgacttcagccaggacgagtgggagtggctgagcctggcccagaggagcctgtacaggaaggtgatgctggagaactacatgaacctggtgagcgtgggcctgtgcatcagcaagcccgacgtgatcagcctgctggagcaggagaaggagccctggatggtgaccgagcagatcaccaggggcctgtgcgccgacctggagtacatgaccagccccaagaaaaagagaaaagtctaagctgccttctgcggggcttgccttctggccatgcccttcttctctcccttgcacctgtacctcttggtctttgaataaagcctgagtaggaaggctagcaaaaaaaaaaaaaaaaaaaaaaaaaaaaaaaaaaaaaaaaaaaaaaaaaaaaaaaaaaaaaaaaaaaaaaaaaaaaaaaa

SEQ ID NO: 3779 - RNA, 5419 nt, synthetic construct
  source 1..5419: mol_type = other RNA
aggaaataagagagaaaagaagagtaagaagaaatataagagccaccatggcccctaagaagaagcgtaaagtgagccgggtgaacggcagcggcagcggcggcggcatgaaccacgaccaggagttcgacccccctaaggtgtaccctcccgtccccgccgagaagagaaagcccatccgggtcctgagcctgttcgatggcatcgccaccggtctgctggtgctgaaggacctgggcatccaggtggataggtacattgcctccgaggtgtgcgaggactccatcaccgtgggaatggtgcgtcatcagggcaagatcatgtacgtgggcgacgtgcggagcgtgacacagaagcatatccaggagtggggccctttcgacctggtgatcggcggcagcccttgcaatgacctgagcatcgtgaacccagcccggaagggcctgtacgagggaaccggcagactgttcttcgagttttacagactgctgcacgacgcccggcctaaggaaggcgacgaccggcccttcttttggctgttcgagaatgtggtggccatgggagtcagcgacaagcgggatattagccggttcctggagagcaaccccgtgatgatcgatgccaaggaagtgagcgccgcccaccgggccagatacttctggggcaatctgcctggcatgaacagacccctggccagcaccgtgaacgacaagctggagctgcaggagtgcctggagcacggccggatcgccaagttcagcaaggtgagaaccatcaccacccgaagcaacagcatcaaacaaggcaaggaccagcactttcctgtgttcatgaacgagaaggaggacatcctgtggtgtaccgagatggagagagtgttcgggttcccagtccactacacagatgtcagcaacatgtctagactggccagacagagactgctgggaagaagctggtccgtccctgtgatcagacacctgttcgcccctctgaaggagtacttcgcctgcgtgagcagcggcaacagcaacgccaacagccggggccccagcttctctagcggcctggtgccactgtccctgagagggagccacatgggccccatggagatctacaaaaccgtgagcgcctggaagcggcagcctgtgcgcgtgctgagcctgtttcggaatatcgataaagtcctgaaaagcctgggattcctggagagcggctctggctccggcggtggcaccctgaagtacgtggaggatgtgacaaacgtggtcagacgggatgtggagaagtggggccccttcgatctggtgtacggcagcacccaacccctgggcagctcttgtgaccggtgccctggctggtacatgtttcagttccaccggatcctgcagtacgccctgccgagacaggagtcccagcggccattcttttggattttcatggacaacttgctgctgaccgaggatgaccaggaaactaccactcggttcctgcagaccgaagccgtgaccctgcaggacgtgagaggccgggactaccagaacgccatgcgggtgtggtccaacatccctggactgaaaagcaagcacgcacctctgacccctaaagaagaggagtacctgcaggcccaggtgcggagcagaagcaagctggacgcccctaaggtggatctgctggtgaagaattgcctcctgcccctgagagagtacttcaagtatttcagccagaatagtctgcccctgggcggcccaagcagcggcgcccctcctcccagcggcggcagcccagccggctccccaacctctaccgaggagggcacctctgagtccgccacccccgagagcggccctggcacctccaccgagcccagcgagggcagcgcacccggcagccctgccggcagccccacctccacagaggagggaaccagcaccgagcccagcgaaggcagcgccccaggcaccagcaccgagcctagtgagggcggctctggcggcggcagcgcccaggagattaaacggatcaacaagatcagaagaagacttgtgaaagacagcaacaccaagaaggccggcaagacaggccccatgaaaaccctgctggttagagtgatgacacccgatctgagagagcggctggaaaacctgagaaagaagcctgaaaatatcccccagcccatcagcaatacatctagagccaacctgaataagctgctgaccgattacaccgaaatgaagaaggcgatcctgcatgtgtactgggaagagttccagaaggaccctgtgggcctgatgagccgggtggcccagcctgccagcaagaagatcgatcagaacaagctgaaacctgagatggacgagaagggcaacctgaccaccgccggctttgcctgctctcagtgtggccagcccctgttcgtgtacaagctggagcaggtgtctgagaagggcaaggcttacaccaactacttcggacggtgcaatgtggccgagcacgaaaagctgatcctgctggcccagctgaagcccgagaaggatagcgacgaagccgtgacatatagcctgggaaagtttgggcagagggccctggatttctacagcattcatgtgaccaaggagtccacccaccccgtgaagcccctggcccagatcgccggaaacagatacgcctccggacctgtgggaaaggccctgagcgacgcatgtatgggcacaatcgcctccttcctgtctaagtaccaggacatcatcatcgaacaccagaaggtggtgaagggcaaccagaagagactggagagcctgcgggagctggccggcaaggaaaacctggaataccctagcgtgaccctgccacctcagcctcacaccaaggagggcgttgatgcctacaacgaagtgatcgcccgggtgcgaatgtgggtgaacctgaacctgtggcagaagctgaagctaagcagagatgatgccaagcctctgctgagactgaagggattcccttcctttcctctggtcgagagacaggccaacgaagtggactggtgggacatggtgtgtaacgtgaagaagctgatcaacgagaaaaaggaggatggcaaggtgttttggcagaatctggctggctacaagagacaggaagccctgagaccatacctgagcagcgaggaagatcggaagaagggaaagaaattcgctcggtaccagctgggcgacctgctgctgcacctggaaaagaagcacggcgaggactggggaaaggtgtacgacgaggcctgggagcggattgacaagaaagtggaaggcctgagcaagcacatcaagctggaagaggaacggagaagcgaggacgcccagagcaaggccgccctgaccgactggctgcgggctaaggccagcttcgtgatcgagggcctgaaggaggccgacaaggacgagttctgcagatgcgagctgaagctgcagaagtggtacggggacctgcggggaaagcccttcgccatcgaagccgagaacagcatcctggacatcagcggcttcagcaagcagtacaactgtgccttcatctggcagaaggacggcgtgaagaagctgaacctgtacctgatcatcaactacttcaagggcggcaagctgcggttcaagaagatcaaacctgaagccttcgaagccaacagattctacaccgtgatcaacaaaaagagcggcgagatcgtgcccatggaggtgaacttcaacttcgacgaccccaacctgatcatcctgcctctggcctttggcaagagacagggcagagaattcatctggaacgacctgctgtccctggaaaccggcagcctgaagctggccaacggaagagtgatcgagaagacactgtacaacagaagaacccggcaggatgagcctgccctgttcgtggccctgaccttcgagcggcgggaggtcctggactcctccaatatcaaaccaatgaacctgatcggcgtggcaagaggcgaaaacatccccgccgtgatcgccctgaccgaccccgagggctgcccactgagccggtttaaggatagcctgggaaacccaacccacatcctgagaatcggcgagagctataaggagaagcagcggaccatccaggccaagaaggaggtggagcagcggagagccggcggctacagccggaagtacgccagcaaagccaagaatctggcagacgatatggtgagaaacaccgctagagatctgctgtactacgccgtgacccaggatgccatgctgatcttcgccaacctgagccggggcttcggccggcagggcaagcggaccttcatggccgagagacagtacacacggatggaggactggctgaccgccaagctggcctacgagggcctgagcaagacctacctgtccaagacactggcccagtacacctccaagacatgcagcaactgtgggtttaccatcaccagcgccgactacgacagggtgctggagaagctgaagaagacagcaacaggctggatgaccacaattaacggcaaggagctgaaggtggagggccagattacctactacaacagatacaagagacagaacgtagtcaaggacctgtccgtcgagctggatagactgagcgaagaatctgtgaacaacgacatctcctcctggacaaagggcagaagcggagaagctctgagcctcctgaagaaaagattctcccatagacccgtgcaggagaagttcgtgtgcctgaactgcggcttcgagacacacgcagccgagcaagccgccctgaacatcgccagatcctggctgttcctgcggagccaggagtacaagaaataccagacaaacaagacaaccggcaacaccgataagagagccttcgtcgagacctggcagtccttttaccggaagaagcttaaggaggtgtggaaacctgccgtgcggtctggcggatctggcggaggctccacaagcgaggagacccagggcgagctgaccagcagctgcggcagcaagaccatggccaacgtgagcctggccttcagggacgtgagcatcgacctgagccaggaggagtgggagtgcctggaccccgtgcagagggacctgtacaaggacgtgatgctggagaactacagcaacctggtgagcctgggctacaccatccccaagcccgacgtgatcaccctgctggagcaggagaaggagccctggatcaccagccccaagaaaaagagaaaagtctaagctgccttctgcggggcttgccttctggccatgcccttcttctctcccttgcacctgtacctcttggtctttgaataaagcctgagtaggaaggctagcaaaaaaaaaaaaaaaaaaaaaaaaaaaaaaaaaaaaaaaaaaaaaaaaaaaaaaaaaaaaaaaaaaaaaaaaaaaaaaaa

SEQ ID NO: 3780 - RNA, 5419 nt, synthetic construct
  source 1..5419: mol_type = other RNA
aggaaataagagagaaaagaagagtaagaagaaatataagagccaccatggcccctaagaagaagcgtaaagtgagccgggtgaacggcagcggcagcggcggcggcatgaaccacgaccaggagttcgacccccctaaggtgtaccctcccgtccccgccgagaagagaaagcccatccgggtcctgagcctgttcgatggcatcgccaccggtctgctggtgctgaaggacctgggcatccaggtggataggtacattgcctccgaggtgtgcgaggactccatcaccgtgggaatggtgcgtcatcagggcaagatcatgtacgtgggcgacgtgcggagcgtgacacagaagcatatccaggagtggggccctttcgacctggtgatcggcggcagcccttgcaatgacctgagcatcgtgaacccagcccggaagggcctgtacgagggaaccggcagactgttcttcgagttttacagactgctgcacgacgcccggcctaaggaaggcgacgaccggcccttcttttggctgttcgagaatgtggtggccatgggagtcagcgacaagcgggatattagccggttcctggagagcaaccccgtgatgatcgatgccaaggaagtgagcgccgcccaccgggccagatacttctggggcaatctgcctggcatgaacagacccctggccagcaccgtgaacgacaagctggagctgcaggagtgcctggagcacggccggatcgccaagttcagcaaggtgagaaccatcaccacccgaagcaacagcatcaaacaaggcaaggaccagcactttcctgtgttcatgaacgagaaggaggacatcctgtggtgtaccgagatggagagagtgttcgggttcccagtccactacacagatgtcagcaacatgtctagactggccagacagagactgctgggaagaagctggtccgtccctgtgatcagacacctgttcgcccctctgaaggagtacttcgcctgcgtgagcagcggcaacagcaacgccaacagccggggccccagcttctctagcggcctggtgccactgtccctgagagggagccacatgggccccatggagatctacaaaaccgtgagcgcctggaagcggcagcctgtgcgcgtgctgagcctgtttcggaatatcgataaagtcctgaaaagcctgggattcctggagagcggctctggctccggcggtggcaccctgaagtacgtggaggatgtgacaaacgtggtcagacgggatgtggagaagtggggccccttcgatctggtgtacggcagcacccaacccctgggcagctcttgtgaccggtgccctggctggtacatgtttcagttccaccggatcctgcagtacgccctgccgagacaggagtcccagcggccattcttttggattttcatggacaacttgctgctgaccgaggatgaccaggaaactaccactcggttcctgcagaccgaagccgtgaccctgcaggacgtgagaggccgggactaccagaacgccatgcgggtgtggtccaacatccctggactgaaaagcaagcacgcacctctgacccctaaagaagaggagtacctgcaggcccaggtgcggagcagaagcaagctggacgcccctaaggtggatctgctggtgaagaattgcctcctgcccctgagagagtacttcaagtatttcagccagaatagtctgcccctgggcggcccaagcagcggcgcccctcctcccagcggcggcagcccagccggctccccaacctctaccgaggagggcacctctgagtccgccacccccgagagcggccctggcacctccaccgagcccagcgagggcagcgcacccggcagccctgccggcagccccacctccacagaggagggaaccagcaccgagcccagcgaaggcagcgccccaggcaccagcaccgagcctagtgagggcggctctggcggcggcagcgcccaggagattaaacggatcaacaagatcagaagaagacttgtgaaagacagcaacaccaagaaggccggcaagacaggccccatgaaaaccctgctggttagagtgatgacacccgatctgagagagcggctggaaaacctgagaaagaagcctgaaaatatcccccagcccatcagcaatacatctagagccaacctgaataagctgctgaccgattacaccgaaatgaagaaggcgatcctgcatgtgtactgggaagagttccagaaggaccctgtgggcctgatgagccgggtggcccagcctgccagcaagaagatcgatcagaacaagctgaaacctgagatggacgagaagggcaacctgaccaccgccggctttgcctgctctcagtgtggccagcccctgttcgtgtacaagctggagcaggtgtctgagaagggcaaggcttacaccaactacttcggacggtgcaatgtggccgagcacgaaaagctgatcctgctggcccagctgaagcccgagaaggatagcgacgaagccgtgacatatagcctgggaaagtttgggcagagggccctggatttctacagcattcatgtgaccaaggagtccacccaccccgtgaagcccctggcccagatcgccggaaacagatacgcctccggacctgtgggaaaggccctgagcgacgcatgtatgggcacaatcgcctccttcctgtctaagtaccaggacatcatcatcgaacaccagaaggtggtgaagggcaaccagaagagactggagagcctgcgggagctggccggcaaggaaaacctggaataccctagcgtgaccctgccacctcagcctcacaccaaggagggcgttgatgcctacaacgaagtgatcgcccgggtgcgaatgtgggtgaacctgaacctgtggcagaagctgaagctaagcagagatgatgccaagcctctgctgagactgaagggattcccttcctttcctctggtcgagagacaggccaacgaagtggactggtgggacatggtgtgtaacgtgaagaagctgatcaacgagaaaaaggaggatggcaaggtgttttggcagaatctggctggctacaagagacaggaagccctgagaccatacctgagcagcgaggaagatcggaagaagggaaagaaattcgctcggtaccagctgggcgacctgctgctgcacctggaaaagaagcacggcgaggactggggaaaggtgtacgacgaggcctgggagcggattgacaagaaagtggaaggcctgagcaagcacatcaagctggaagaggaacggagaagcgaggacgcccagagcaaggccgccctgaccgactggctgcgggctaaggccagcttcgtgatcgagggcctgaaggaggccgacaaggacgagttctgcagatgcgagctgaagctgcagaagtggtacggggacctgcggggaaagcccttcgccatcgaagccgagaacagcatcctggacatcagcggcttcagcaagcagtacaactgtgccttcatctggcagaaggacggcgtgaagaagctgaacctgtacctgatcatcaactacttcaagggcggcaagctgcggttcaagaagatcaaacctgaagccttcgaagccaacagattctacaccgtgatcaacaaaaagagcggcgagatcgtgcccatggaggtgaacttcaacttcgacgaccccaacctgatcatcctgcctctggcctttggcaagagacagggcagagaattcatctggaacgacctgctgtccctggaaaccggcagcctgaagctggccaacggaagagtgatcgagaagacactgtacaacagaagaacccggcaggatgagcctgccctgttcgtggccctgaccttcgagcggcgggaggtcctggactcctccaatatcaaaccaatgaacctgatcggcgtggcaagaggcgaaaacatccccgccgtgatcgccctgaccgaccccgagggctgcccactgagccggtttaaggatagcctgggaaacccaacccacatcctgagaatcggcgagagctataaggagaagcagcggaccatccaggccaagaaggaggtggagcagcggagagccggcggctacagccggaagtacgccagcaaagccaagaatctggcagacgatatggtgagaaacaccgctagagatctgctgtactacgccgtgacccaggatgccatgctgatcttcgccaacctgagccggggcttcggccggcagggcaagcggaccttcatggccgagagacagtacacacggatggaggactggctgaccgccaagctggcctacgagggcctgagcaagacctacctgtccaagacactggcccagtacacctccaagacatgcagcaactgtgggtttaccatcaccagcgccgactacgacagggtgctggagaagctgaagaagacagcaacaggctggatgaccacaattaacggcaaggagctgaaggtggagggccagattacctactacaacagatacaagagacagaacgtagtcaaggacctgtccgtcgagctggatagactgagcgaagaatctgtgaacaacgacatctcctcctggacaaagggcagaagcggagaagctctgagcctcctgaagaaaagattctcccatagacccgtgcaggagaagttcgtgtgcctgaactgcggcttcgagacacacgcagccgagcaagccgccctgaacatcgccagatcctggctgttcctgcggagccaggagtacaagaaataccagacaaacaagacaaccggcaacaccgataagagagccttcgtcgagacctggcagtccttttaccggaagaagcttaaggaggtgtggaaacctgccgtgcggtctggcggatctggcggaggctccacaagctgctggggcctgctgagcttcaaggacatcagcatggagttcacctgggaggagtggcagctgctggacagcgcccagaagtacctgtacagggacgtgatcctggagaactacagccacctggtgagcctgggctaccacggcaccaagcccgacctgatcttcaagctggagcagggcgaggagccctggatgatcaacgccagggtgagcaggcagagctaccccgagggctggaaggagaccagccccaagaaaaagagaaaagtctaagctgccttctgcggggcttgccttctggccatgcccttcttctctcccttgcacctgtacctcttggtctttgaataaagcctgagtaggaaggctagcaaaaaaaaaaaaaaaaaaaaaaaaaaaaaaaaaaaaaaaaaaaaaaaaaaaaaaaaaaaaaaaaaaaaaaaaaaaaaaaa

SEQ ID NO: 3781 - RNA, 5419 nt, synthetic construct
  source 1..5419: mol_type = other RNA
aggaaataagagagaaaagaagagtaagaagaaatataagagccaccatggcccctaagaagaagcgtaaagtgagccgggtgaacggcagcggcagcggcggcggcatgaaccacgaccaggagttcgacccccctaaggtgtaccctcccgtccccgccgagaagagaaagcccatccgggtcctgagcctgttcgatggcatcgccaccggtctgctggtgctgaaggacctgggcatccaggtggataggtacattgcctccgaggtgtgcgaggactccatcaccgtgggaatggtgcgtcatcagggcaagatcatgtacgtgggcgacgtgcggagcgtgacacagaagcatatccaggagtggggccctttcgacctggtgatcggcggcagcccttgcaatgacctgagcatcgtgaacccagcccggaagggcctgtacgagggaaccggcagactgttcttcgagttttacagactgctgcacgacgcccggcctaaggaaggcgacgaccggcccttcttttggctgttcgagaatgtggtggccatgggagtcagcgacaagcgggatattagccggttcctggagagcaaccccgtgatgatcgatgccaaggaagtgagcgccgcccaccgggccagatacttctggggcaatctgcctggcatgaacagacccctggccagcaccgtgaacgacaagctggagctgcaggagtgcctggagcacggccggatcgccaagttcagcaaggtgagaaccatcaccacccgaagcaacagcatcaaacaaggcaaggaccagcactttcctgtgttcatgaacgagaaggaggacatcctgtggtgtaccgagatggagagagtgttcgggttcccagtccactacacagatgtcagcaacatgtctagactggccagacagagactgctgggaagaagctggtccgtccctgtgatcagacacctgttcgcccctctgaaggagtacttcgcctgcgtgagcagcggcaacagcaacgccaacagccggggccccagcttctctagcggcctggtgccactgtccctgagagggagccacatgggccccatggagatctacaaaaccgtgagcgcctggaagcggcagcctgtgcgcgtgctgagcctgtttcggaatatcgataaagtcctgaaaagcctgggattcctggagagcggctctggctccggcggtggcaccctgaagtacgtggaggatgtgacaaacgtggtcagacgggatgtggagaagtggggccccttcgatctggtgtacggcagcacccaacccctgggcagctcttgtgaccggtgccctggctggtacatgtttcagttccaccggatcctgcagtacgccctgccgagacaggagtcccagcggccattcttttggattttcatggacaacttgctgctgaccgaggatgaccaggaaactaccactcggttcctgcagaccgaagccgtgaccctgcaggacgtgagaggccgggactaccagaacgccatgcgggtgtggtccaacatccctggactgaaaagcaagcacgcacctctgacccctaaagaagaggagtacctgcaggcccaggtgcggagcagaagcaagctggacgcccctaaggtggatctgctggtgaagaattgcctcctgcccctgagagagtacttcaagtatttcagccagaatagtctgcccctgggcggcccaagcagcggcgcccctcctcccagcggcggcagcccagccggctccccaacctctaccgaggagggcacctctgagtccgccacccccgagagcggccctggcacctccaccgagcccagcgagggcagcgcacccggcagccctgccggcagccccacctccacagaggagggaaccagcaccgagcccagcgaaggcagcgccccaggcaccagcaccgagcctagtgagggcggctctggcggcggcagcgcccaggagattaaacggatcaacaagatcagaagaagacttgtgaaagacagcaacaccaagaaggccggcaagacaggccccatgaaaaccctgctggttagagtgatgacacccgatctgagagagcggctggaaaacctgagaaagaagcctgaaaatatcccccagcccatcagcaatacatctagagccaacctgaataagctgctgaccgattacaccgaaatgaagaaggcgatcctgcatgtgtactgggaagagttccagaaggaccctgtgggcctgatgagccgggtggcccagcctgccagcaagaagatcgatcagaacaagctgaaacctgagatggacgagaagggcaacctgaccaccgccggctttgcctgctctcagtgtggccagcccctgttcgtgtacaagctggagcaggtgtctgagaagggcaaggcttacaccaactacttcggacggtgcaatgtggccgagcacgaaaagctgatcctgctggcccagctgaagcccgagaaggatagcgacgaagccgtgacatatagcctgggaaagtttgggcagagggccctggatttctacagcattcatgtgaccaaggagtccacccaccccgtgaagcccctggcccagatcgccggaaacagatacgcctccggacctgtgggaaaggccctgagcgacgcatgtatgggcacaatcgcctccttcctgtctaagtaccaggacatcatcatcgaacaccagaaggtggtgaagggcaaccagaagagactggagagcctgcgggagctggccggcaaggaaaacctggaataccctagcgtgaccctgccacctcagcctcacaccaaggagggcgttgatgcctacaacgaagtgatcgcccgggtgcgaatgtgggtgaacctgaacctgtggcagaagctgaagctaagcagagatgatgccaagcctctgctgagactgaagggattcccttcctttcctctggtcgagagacaggccaacgaagtggactggtgggacatggtgtgtaacgtgaagaagctgatcaacgagaaaaaggaggatggcaaggtgttttggcagaatctggctggctacaagagacaggaagccctgagaccatacctgagcagcgaggaagatcggaagaagggaaagaaattcgctcggtaccagctgggcgacctgctgctgcacctggaaaagaagcacggcgaggactggggaaaggtgtacgacgaggcctgggagcggattgacaagaaagtggaaggcctgagcaagcacatcaagctggaagaggaacggagaagcgaggacgcccagagcaaggccgccctgaccgactggctgcgggctaaggccagcttcgtgatcgagggcctgaaggaggccgacaaggacgagttctgcagatgcgagctgaagctgcagaagtggtacggggacctgcggggaaagcccttcgccatcgaagccgagaacagcatcctggacatcagcggcttcagcaagcagtacaactgtgccttcatctggcagaaggacggcgtgaagaagctgaacctgtacctgatcatcaactacttcaagggcggcaagctgcggttcaagaagatcaaacctgaagccttcgaagccaacagattctacaccgtgatcaacaaaaagagcggcgagatcgtgcccatggaggtgaacttcaacttcgacgaccccaacctgatcatcctgcctctggcctttggcaagagacagggcagagaattcatctggaacgacctgctgtccctggaaaccggcagcctgaagctggccaacggaagagtgatcgagaagacactgtacaacagaagaacccggcaggatgagcctgccctgttcgtggccctgaccttcgagcggcgggaggtcctggactcctccaatatcaaaccaatgaacctgatcggcgtggcaagaggcgaaaacatccccgccgtgatcgccctgaccgaccccgagggctgcccactgagccggtttaaggatagcctgggaaacccaacccacatcctgagaatcggcgagagctataaggagaagcagcggaccatccaggccaagaaggaggtggagcagcggagagccggcggctacagccggaagtacgccagcaaagccaagaatctggcagacgatatggtgagaaacaccgctagagatctgctgtactacgccgtgacccaggatgccatgctgatcttcgccaacctgagccggggcttcggccggcagggcaagcggaccttcatggccgagagacagtacacacggatggaggactggctgaccgccaagctggcctacgagggcctgagcaagacctacctgtccaagacactggcccagtacacctccaagacatgcagcaactgtgggtttaccatcaccagcgccgactacgacagggtgctggagaagctgaagaagacagcaacaggctggatgaccacaattaacggcaaggagctgaaggtggagggccagattacctactacaacagatacaagagacagaacgtagtcaaggacctgtccgtcgagctggatagactgagcgaagaatctgtgaacaacgacatctcctcctggacaaagggcagaagcggagaagctctgagcctcctgaagaaaagattctcccatagacccgtgcaggagaagttcgtgtgcctgaactgcggcttcgagacacacgcagccgagcaagccgccctgaacatcgccagatcctggctgttcctgcggagccaggagtacaagaaataccagacaaacaagacaaccggcaacaccgataagagagccttcgtcgagacctggcagtccttttaccggaagaagcttaaggaggtgtggaaacctgccgtgcggtctggcggatctggcggaggctccacaagcagccacgagagcgtgaccttcaaggacgtggccgtggacttcacctgggaggagtggggctacctggacaccagccagaaggagctgtactgggaggtgatgctggagaactacaggaacctggtgagcctgggcctggccgacagcaacgtggacatgatcagccagctggagagcggcgaggcccacggcatccccgtggacagcgtgctgaggagctgctggcccgacggcgacaccaggaccagccccaagaaaaagagaaaagtctaagctgccttctgcggggcttgccttctggccatgcccttcttctctcccttgcacctgtacctcttggtctttgaataaagcctgagtaggaaggctagcaaaaaaaaaaaaaaaaaaaaaaaaaaaaaaaaaaaaaaaaaaaaaaaaaaaaaaaaaaaaaaaaaaaaaaaaaaaaaaaa

SEQ ID NO: 3782 - RNA, 5419 nt, synthetic construct
  source 1..5419: mol_type = other RNA
aggaaataagagagaaaagaagagtaagaagaaatataagagccaccatggcccctaagaagaagcgtaaagtgagccgggtgaacggcagcggcagcggcggcggcatgaaccacgaccaggagttcgacccccctaaggtgtaccctcccgtccccgccgagaagagaaagcccatccgggtcctgagcctgttcgatggcatcgccaccggtctgctggtgctgaaggacctgggcatccaggtggataggtacattgcctccgaggtgtgcgaggactccatcaccgtgggaatggtgcgtcatcagggcaagatcatgtacgtgggcgacgtgcggagcgtgacacagaagcatatccaggagtggggccctttcgacctggtgatcggcggcagcccttgcaatgacctgagcatcgtgaacccagcccggaagggcctgtacgagggaaccggcagactgttcttcgagttttacagactgctgcacgacgcccggcctaaggaaggcgacgaccggcccttcttttggctgttcgagaatgtggtggccatgggagtcagcgacaagcgggatattagccggttcctggagagcaaccccgtgatgatcgatgccaaggaagtgagcgccgcccaccgggccagatacttctggggcaatctgcctggcatgaacagacccctggccagcaccgtgaacgacaagctggagctgcaggagtgcctggagcacggccggatcgccaagttcagcaaggtgagaaccatcaccacccgaagcaacagcatcaaacaaggcaaggaccagcactttcctgtgttcatgaacgagaaggaggacatcctgtggtgtaccgagatggagagagtgttcgggttcccagtccactacacagatgtcagcaacatgtctagactggccagacagagactgctgggaagaagctggtccgtccctgtgatcagacacctgttcgcccctctgaaggagtacttcgcctgcgtgagcagcggcaacagcaacgccaacagccggggccccagcttctctagcggcctggtgccactgtccctgagagggagccacatgggccccatggagatctacaaaaccgtgagcgcctggaagcggcagcctgtgcgcgtgctgagcctgtttcggaatatcgataaagtcctgaaaagcctgggattcctggagagcggctctggctccggcggtggcaccctgaagtacgtggaggatgtgacaaacgtggtcagacgggatgtggagaagtggggccccttcgatctggtgtacggcagcacccaacccctgggcagctcttgtgaccggtgccctggctggtacatgtttcagttccaccggatcctgcagtacgccctgccgagacaggagtcccagcggccattcttttggattttcatggacaacttgctgctgaccgaggatgaccaggaaactaccactcggttcctgcagaccgaagccgtgaccctgcaggacgtgagaggccgggactaccagaacgccatgcgggtgtggtccaacatccctggactgaaaagcaagcacgcacctctgacccctaaagaagaggagtacctgcaggcccaggtgcggagcagaagcaagctggacgcccctaaggtggatctgctggtgaagaattgcctcctgcccctgagagagtacttcaagtatttcagccagaatagtctgcccctgggcggcccaagcagcggcgcccctcctcccagcggcggcagcccagccggctccccaacctctaccgaggagggcacctctgagtccgccacccccgagagcggccctggcacctccaccgagcccagcgagggcagcgcacccggcagccctgccggcagccccacctccacagaggagggaaccagcaccgagcccagcgaaggcagcgccccaggcaccagcaccgagcctagtgagggcggctctggcggcggcagcgcccaggagattaaacggatcaacaagatcagaagaagacttgtgaaagacagcaacaccaagaaggccggcaagacaggccccatgaaaaccctgctggttagagtgatgacacccgatctgagagagcggctggaaaacctgagaaagaagcctgaaaatatcccccagcccatcagcaatacatctagagccaacctgaataagctgctgaccgattacaccgaaatgaagaaggcgatcctgcatgtgtactgggaagagttccagaaggaccctgtgggcctgatgagccgggtggcccagcctgccagcaagaagatcgatcagaacaagctgaaacctgagatggacgagaagggcaacctgaccaccgccggctttgcctgctctcagtgtggccagcccctgttcgtgtacaagctggagcaggtgtctgagaagggcaaggcttacaccaactacttcggacggtgcaatgtggccgagcacgaaaagctgatcctgctggcccagctgaagcccgagaaggatagcgacgaagccgtgacatatagcctgggaaagtttgggcagagggccctggatttctacagcattcatgtgaccaaggagtccacccaccccgtgaagcccctggcccagatcgccggaaacagatacgcctccggacctgtgggaaaggccctgagcgacgcatgtatgggcacaatcgcctccttcctgtctaagtaccaggacatcatcatcgaacaccagaaggtggtgaagggcaaccagaagagactggagagcctgcgggagctggccggcaaggaaaacctggaataccctagcgtgaccctgccacctcagcctcacaccaaggagggcgttgatgcctacaacgaagtgatcgcccgggtgcgaatgtgggtgaacctgaacctgtggcagaagctgaagctaagcagagatgatgccaagcctctgctgagactgaagggattcccttcctttcctctggtcgagagacaggccaacgaagtggactggtgggacatggtgtgtaacgtgaagaagctgatcaacgagaaaaaggaggatggcaaggtgttttggcagaatctggctggctacaagagacaggaagccctgagaccatacctgagcagcgaggaagatcggaagaagggaaagaaattcgctcggtaccagctgggcgacctgctgctgcacctggaaaagaagcacggcgaggactggggaaaggtgtacgacgaggcctgggagcggattgacaagaaagtggaaggcctgagcaagcacatcaagctggaagaggaacggagaagcgaggacgcccagagcaaggccgccctgaccgactggctgcgggctaaggccagcttcgtgatcgagggcctgaaggaggccgacaaggacgagttctgcagatgcgagctgaagctgcagaagtggtacggggacctgcggggaaagcccttcgccatcgaagccgagaacagcatcctggacatcagcggcttcagcaagcagtacaactgtgccttcatctggcagaaggacggcgtgaagaagctgaacctgtacctgatcatcaactacttcaagggcggcaagctgcggttcaagaagatcaaacctgaagccttcgaagccaacagattctacaccgtgatcaacaaaaagagcggcgagatcgtgcccatggaggtgaacttcaacttcgacgaccccaacctgatcatcctgcctctggcctttggcaagagacagggcagagaattcatctggaacgacctgctgtccctggaaaccggcagcctgaagctggccaacggaagagtgatcgagaagacactgtacaacagaagaacccggcaggatgagcctgccctgttcgtggccctgaccttcgagcggcgggaggtcctggactcctccaatatcaaaccaatgaacctgatcggcgtggcaagaggcgaaaacatccccgccgtgatcgccctgaccgaccccgagggctgcccactgagccggtttaaggatagcctgggaaacccaacccacatcctgagaatcggcgagagctataaggagaagcagcggaccatccaggccaagaaggaggtggagcagcggagagccggcggctacagccggaagtacgccagcaaagccaagaatctggcagacgatatggtgagaaacaccgctagagatctgctgtactacgccgtgacccaggatgccatgctgatcttcgccaacctgagccggggcttcggccggcagggcaagcggaccttcatggccgagagacagtacacacggatggaggactggctgaccgccaagctggcctacgagggcctgagcaagacctacctgtccaagacactggcccagtacacctccaagacatgcagcaactgtgggtttaccatcaccagcgccgactacgacagggtgctggagaagctgaagaagacagcaacaggctggatgaccacaattaacggcaaggagctgaaggtggagggccagattacctactacaacagatacaagagacagaacgtagtcaaggacctgtccgtcgagctggatagactgagcgaagaatctgtgaacaacgacatctcctcctggacaaagggcagaagcggagaagctctgagcctcctgaagaaaagattctcccatagacccgtgcaggagaagttcgtgtgcctgaactgcggcttcgagacacacgcagccgagcaagccgccctgaacatcgccagatcctggctgttcctgcggagccaggagtacaagaaataccagacaaacaagacaaccggcaacaccgataagagagccttcgtcgagacctggcagtccttttaccggaagaagcttaaggaggtgtggaaacctgccgtgcggtctggcggatctggcggaggctccacaagcaggctggagagcgtgaccttcgaggacgtggccgtgtacttcacccagaaccagtgggccagcctgaaccccgcccagagggccctgtacggcgaggtgatgctggagaactacgccaacgtggccagcctggtggccttccccttccccaagcccgccctgatcagccacctggagaggggcgaggccccctggggccccgacccctgggacaccaagatccccaggggcatcggccagggcaccagccccaagaaaaagagaaaagtctaagctgccttctgcggggcttgccttctggccatgcccttcttctctcccttgcacctgtacctcttggtctttgaataaagcctgagtaggaaggctagcaaaaaaaaaaaaaaaaaaaaaaaaaaaaaaaaaaaaaaaaaaaaaaaaaaaaaaaaaaaaaaaaaaaaaaaaaaaaaaaa

SEQ ID NO: 3783 - RNA, 5419 nt, synthetic construct
  source 1..5419: mol_type = other RNA
aggaaataagagagaaaagaagagtaagaagaaatataagagccaccatggcccctaagaagaagcgtaaagtgagccgggtgaacggcagcggcagcggcggcggcatgaaccacgaccaggagttcgacccccctaaggtgtaccctcccgtccccgccgagaagagaaagcccatccgggtcctgagcctgttcgatggcatcgccaccggtctgctggtgctgaaggacctgggcatccaggtggataggtacattgcctccgaggtgtgcgaggactccatcaccgtgggaatggtgcgtcatcagggcaagatcatgtacgtgggcgacgtgcggagcgtgacacagaagcatatccaggagtggggccctttcgacctggtgatcggcggcagcccttgcaatgacctgagcatcgtgaacccagcccggaagggcctgtacgagggaaccggcagactgttcttcgagttttacagactgctgcacgacgcccggcctaaggaaggcgacgaccggcccttcttttggctgttcgagaatgtggtggccatgggagtcagcgacaagcgggatattagccggttcctggagagcaaccccgtgatgatcgatgccaaggaagtgagcgccgcccaccgggccagatacttctggggcaatctgcctggcatgaacagacccctggccagcaccgtgaacgacaagctggagctgcaggagtgcctggagcacggccggatcgccaagttcagcaaggtgagaaccatcaccacccgaagcaacagcatcaaacaaggcaaggaccagcactttcctgtgttcatgaacgagaaggaggacatcctgtggtgtaccgagatggagagagtgttcgggttcccagtccactacacagatgtcagcaacatgtctagactggccagacagagactgctgggaagaagctggtccgtccctgtgatcagacacctgttcgcccctctgaaggagtacttcgcctgcgtgagcagcggcaacagcaacgccaacagccggggccccagcttctctagcggcctggtgccactgtccctgagagggagccacatgggccccatggagatctacaaaaccgtgagcgcctggaagcggcagcctgtgcgcgtgctgagcctgtttcggaatatcgataaagtcctgaaaagcctgggattcctggagagcggctctggctccggcggtggcaccctgaagtacgtggaggatgtgacaaacgtggtcagacgggatgtggagaagtggggccccttcgatctggtgtacggcagcacccaacccctgggcagctcttgtgaccggtgccctggctggtacatgtttcagttccaccggatcctgcagtacgccctgccgagacaggagtcccagcggccattcttttggattttcatggacaacttgctgctgaccgaggatgaccaggaaactaccactcggttcctgcagaccgaagccgtgaccctgcaggacgtgagaggccgggactaccagaacgccatgcgggtgtggtccaacatccctggactgaaaagcaagcacgcacctctgacccctaaagaagaggagtacctgcaggcccaggtgcggagcagaagcaagctggacgcccctaaggtggatctgctggtgaagaattgcctcctgcccctgagagagtacttcaagtatttcagccagaatagtctgcccctgggcggcccaagcagcggcgcccctcctcccagcggcggcagcccagccggctccccaacctctaccgaggagggcacctctgagtccgccacccccgagagcggccctggcacctccaccgagcccagcgagggcagcgcacccggcagccctgccggcagccccacctccacagaggagggaaccagcaccgagcccagcgaaggcagcgccccaggcaccagcaccgagcctagtgagggcggctctggcggcggcagcgcccaggagattaaacggatcaacaagatcagaagaagacttgtgaaagacagcaacaccaagaaggccggcaagacaggccccatgaaaaccctgctggttagagtgatgacacccgatctgagagagcggctggaaaacctgagaaagaagcctgaaaatatcccccagcccatcagcaatacatctagagccaacctgaataagctgctgaccgattacaccgaaatgaagaaggcgatcctgcatgtgtactgggaagagttccagaaggaccctgtgggcctgatgagccgggtggcccagcctgccagcaagaagatcgatcagaacaagctgaaacctgagatggacgagaagggcaacctgaccaccgccggctttgcctgctctcagtgtggccagcccctgttcgtgtacaagctggagcaggtgtctgagaagggcaaggcttacaccaactacttcggacggtgcaatgtggccgagcacgaaaagctgatcctgctggcccagctgaagcccgagaaggatagcgacgaagccgtgacatatagcctgggaaagtttgggcagagggccctggatttctacagcattcatgtgaccaaggagtccacccaccccgtgaagcccctggcccagatcgccggaaacagatacgcctccggacctgtgggaaaggccctgagcgacgcatgtatgggcacaatcgcctccttcctgtctaagtaccaggacatcatcatcgaacaccagaaggtggtgaagggcaaccagaagagactggagagcctgcgggagctggccggcaaggaaaacctggaataccctagcgtgaccctgccacctcagcctcacaccaaggagggcgttgatgcctacaacgaagtgatcgcccgggtgcgaatgtgggtgaacctgaacctgtggcagaagctgaagctaagcagagatgatgccaagcctctgctgagactgaagggattcccttcctttcctctggtcgagagacaggccaacgaagtggactggtgggacatggtgtgtaacgtgaagaagctgatcaacgagaaaaaggaggatggcaaggtgttttggcagaatctggctggctacaagagacaggaagccctgagaccatacctgagcagcgaggaagatcggaagaagggaaagaaattcgctcggtaccagctgggcgacctgctgctgcacctggaaaagaagcacggcgaggactggggaaaggtgtacgacgaggcctgggagcggattgacaagaaagtggaaggcctgagcaagcacatcaagctggaagaggaacggagaagcgaggacgcccagagcaaggccgccctgaccgactggctgcgggctaaggccagcttcgtgatcgagggcctgaaggaggccgacaaggacgagttctgcagatgcgagctgaagctgcagaagtggtacggggacctgcggggaaagcccttcgccatcgaagccgagaacagcatcctggacatcagcggcttcagcaagcagtacaactgtgccttcatctggcagaaggacggcgtgaagaagctgaacctgtacctgatcatcaactacttcaagggcggcaagctgcggttcaagaagatcaaacctgaagccttcgaagccaacagattctacaccgtgatcaacaaaaagagcggcgagatcgtgcccatggaggtgaacttcaacttcgacgaccccaacctgatcatcctgcctctggcctttggcaagagacagggcagagaattcatctggaacgacctgctgtccctggaaaccggcagcctgaagctggccaacggaagagtgatcgagaagacactgtacaacagaagaacccggcaggatgagcctgccctgttcgtggccctgaccttcgagcggcgggaggtcctggactcctccaatatcaaaccaatgaacctgatcggcgtggcaagaggcgaaaacatccccgccgtgatcgccctgaccgaccccgagggctgcccactgagccggtttaaggatagcctgggaaacccaacccacatcctgagaatcggcgagagctataaggagaagcagcggaccatccaggccaagaaggaggtggagcagcggagagccggcggctacagccggaagtacgccagcaaagccaagaatctggcagacgatatggtgagaaacaccgctagagatctgctgtactacgccgtgacccaggatgccatgctgatcttcgccaacctgagccggggcttcggccggcagggcaagcggaccttcatggccgagagacagtacacacggatggaggactggctgaccgccaagctggcctacgagggcctgagcaagacctacctgtccaagacactggcccagtacacctccaagacatgcagcaactgtgggtttaccatcaccagcgccgactacgacagggtgctggagaagctgaagaagacagcaacaggctggatgaccacaattaacggcaaggagctgaaggtggagggccagattacctactacaacagatacaagagacagaacgtagtcaaggacctgtccgtcgagctggatagactgagcgaagaatctgtgaacaacgacatctcctcctggacaaagggcagaagcggagaagctctgagcctcctgaagaaaagattctcccatagacccgtgcaggagaagttcgtgtgcctgaactgcggcttcgagacacacgcagccgagcaagccgccctgaacatcgccagatcctggctgttcctgcggagccaggagtacaagaaataccagacaaacaagacaaccggcaacaccgataagagagccttcgtcgagacctggcagtccttttaccggaagaagcttaaggaggtgtggaaacctgccgtgcggtctggcggatctggcggaggctccacaagcttccaggccagcgtgagcttcaaggacgtgaccgtggagctgacccaggaggagtggcagcagatgggccccctgcagaggaccctgtacagggacgtgatgctggagaactacaacaacctggtgagcgtgggcagctgcatctacaagcccgagctgatcttcaagctggagcagggcgaggagccctggctgctggaggaggagttcagcaaccagagctaccaggtgctggagcactacaccagccccaagaaaaagagaaaagtctaagctgccttctgcggggcttgccttctggccatgcccttcttctctcccttgcacctgtacctcttggtctttgaataaagcctgagtaggaaggctagcaaaaaaaaaaaaaaaaaaaaaaaaaaaaaaaaaaaaaaaaaaaaaaaaaaaaaaaaaaaaaaaaaaaaaaaaaaaaaaaa

SEQ ID NO: 3784 - RNA, 5419 nt, synthetic construct
  source 1..5419: mol_type = other RNA
aggaaataagagagaaaagaagagtaagaagaaatataagagccaccatggcccctaagaagaagcgtaaagtgagccgggtgaacggcagcggcagcggcggcggcatgaaccacgaccaggagttcgacccccctaaggtgtaccctcccgtccccgccgagaagagaaagcccatccgggtcctgagcctgttcgatggcatcgccaccggtctgctggtgctgaaggacctgggcatccaggtggataggtacattgcctccgaggtgtgcgaggactccatcaccgtgggaatggtgcgtcatcagggcaagatcatgtacgtgggcgacgtgcggagcgtgacacagaagcatatccaggagtggggccctttcgacctggtgatcggcggcagcccttgcaatgacctgagcatcgtgaacccagcccggaagggcctgtacgagggaaccggcagactgttcttcgagttttacagactgctgcacgacgcccggcctaaggaaggcgacgaccggcccttcttttggctgttcgagaatgtggtggccatgggagtcagcgacaagcgggatattagccggttcctggagagcaaccccgtgatgatcgatgccaaggaagtgagcgccgcccaccgggccagatacttctggggcaatctgcctggcatgaacagacccctggccagcaccgtgaacgacaagctggagctgcaggagtgcctggagcacggccggatcgccaagttcagcaaggtgagaaccatcaccacccgaagcaacagcatcaaacaaggcaaggaccagcactttcctgtgttcatgaacgagaaggaggacatcctgtggtgtaccgagatggagagagtgttcgggttcccagtccactacacagatgtcagcaacatgtctagactggccagacagagactgctgggaagaagctggtccgtccctgtgatcagacacctgttcgcccctctgaaggagtacttcgcctgcgtgagcagcggcaacagcaacgccaacagccggggccccagcttctctagcggcctggtgccactgtccctgagagggagccacatgggccccatggagatctacaaaaccgtgagcgcctggaagcggcagcctgtgcgcgtgctgagcctgtttcggaatatcgataaagtcctgaaaagcctgggattcctggagagcggctctggctccggcggtggcaccctgaagtacgtggaggatgtgacaaacgtggtcagacgggatgtggagaagtggggccccttcgatctggtgtacggcagcacccaacccctgggcagctcttgtgaccggtgccctggctggtacatgtttcagttccaccggatcctgcagtacgccctgccgagacaggagtcccagcggccattcttttggattttcatggacaacttgctgctgaccgaggatgaccaggaaactaccactcggttcctgcagaccgaagccgtgaccctgcaggacgtgagaggccgggactaccagaacgccatgcgggtgtggtccaacatccctggactgaaaagcaagcacgcacctctgacccctaaagaagaggagtacctgcaggcccaggtgcggagcagaagcaagctggacgcccctaaggtggatctgctggtgaagaattgcctcctgcccctgagagagtacttcaagtatttcagccagaatagtctgcccctgggcggcccaagcagcggcgcccctcctcccagcggcggcagcccagccggctccccaacctctaccgaggagggcacctctgagtccgccacccccgagagcggccctggcacctccaccgagcccagcgagggcagcgcacccggcagccctgccggcagccccacctccacagaggagggaaccagcaccgagcccagcgaaggcagcgccccaggcaccagcaccgagcctagtgagggcggctctggcggcggcagcgcccaggagattaaacggatcaacaagatcagaagaagacttgtgaaagacagcaacaccaagaaggccggcaagacaggccccatgaaaaccctgctggttagagtgatgacacccgatctgagagagcggctggaaaacctgagaaagaagcctgaaaatatcccccagcccatcagcaatacatctagagccaacctgaataagctgctgaccgattacaccgaaatgaagaaggcgatcctgcatgtgtactgggaagagttccagaaggaccctgtgggcctgatgagccgggtggcccagcctgccagcaagaagatcgatcagaacaagctgaaacctgagatggacgagaagggcaacctgaccaccgccggctttgcctgctctcagtgtggccagcccctgttcgtgtacaagctggagcaggtgtctgagaagggcaaggcttacaccaactacttcggacggtgcaatgtggccgagcacgaaaagctgatcctgctggcccagctgaagcccgagaaggatagcgacgaagccgtgacatatagcctgggaaagtttgggcagagggccctggatttctacagcattcatgtgaccaaggagtccacccaccccgtgaagcccctggcccagatcgccggaaacagatacgcctccggacctgtgggaaaggccctgagcgacgcatgtatgggcacaatcgcctccttcctgtctaagtaccaggacatcatcatcgaacaccagaaggtggtgaagggcaaccagaagagactggagagcctgcgggagctggccggcaaggaaaacctggaataccctagcgtgaccctgccacctcagcctcacaccaaggagggcgttgatgcctacaacgaagtgatcgcccgggtgcgaatgtgggtgaacctgaacctgtggcagaagctgaagctaagcagagatgatgccaagcctctgctgagactgaagggattcccttcctttcctctggtcgagagacaggccaacgaagtggactggtgggacatggtgtgtaacgtgaagaagctgatcaacgagaaaaaggaggatggcaaggtgttttggcagaatctggctggctacaagagacaggaagccctgagaccatacctgagcagcgaggaagatcggaagaagggaaagaaattcgctcggtaccagctgggcgacctgctgctgcacctggaaaagaagcacggcgaggactggggaaaggtgtacgacgaggcctgggagcggattgacaagaaagtggaaggcctgagcaagcacatcaagctggaagaggaacggagaagcgaggacgcccagagcaaggccgccctgaccgactggctgcgggctaaggccagcttcgtgatcgagggcctgaaggaggccgacaaggacgagttctgcagatgcgagctgaagctgcagaagtggtacggggacctgcggggaaagcccttcgccatcgaagccgagaacagcatcctggacatcagcggcttcagcaagcagtacaactgtgccttcatctggcagaaggacggcgtgaagaagctgaacctgtacctgatcatcaactacttcaagggcggcaagctgcggttcaagaagatcaaacctgaagccttcgaagccaacagattctacaccgtgatcaacaaaaagagcggcgagatcgtgcccatggaggtgaacttcaacttcgacgaccccaacctgatcatcctgcctctggcctttggcaagagacagggcagagaattcatctggaacgacctgctgtccctggaaaccggcagcctgaagctggccaacggaagagtgatcgagaagacactgtacaacagaagaacccggcaggatgagcctgccctgttcgtggccctgaccttcgagcggcgggaggtcctggactcctccaatatcaaaccaatgaacctgatcggcgtggcaagaggcgaaaacatccccgccgtgatcgccctgaccgaccccgagggctgcccactgagccggtttaaggatagcctgggaaacccaacccacatcctgagaatcggcgagagctataaggagaagcagcggaccatccaggccaagaaggaggtggagcagcggagagccggcggctacagccggaagtacgccagcaaagccaagaatctggcagacgatatggtgagaaacaccgctagagatctgctgtactacgccgtgacccaggatgccatgctgatcttcgccaacctgagccggggcttcggccggcagggcaagcggaccttcatggccgagagacagtacacacggatggaggactggctgaccgccaagctggcctacgagggcctgagcaagacctacctgtccaagacactggcccagtacacctccaagacatgcagcaactgtgggtttaccatcaccagcgccgactacgacagggtgctggagaagctgaagaagacagcaacaggctggatgaccacaattaacggcaaggagctgaaggtggagggccagattacctactacaacagatacaagagacagaacgtagtcaaggacctgtccgtcgagctggatagactgagcgaagaatctgtgaacaacgacatctcctcctggacaaagggcagaagcggagaagctctgagcctcctgaagaaaagattctcccatagacccgtgcaggagaagttcgtgtgcctgaactgcggcttcgagacacacgcagccgagcaagccgccctgaacatcgccagatcctggctgttcctgcggagccaggagtacaagaaataccagacaaacaagacaaccggcaacaccgataagagagccttcgtcgagacctggcagtccttttaccggaagaagcttaaggaggtgtggaaacctgccgtgcggtctggcggatctggcggaggctccacaagcatgaacgccgtgacctacagggacgtgcacgtgaacttcacccaggaggagtgggccctgctggaccccagccagaagaagctgtacaaggacgtgatgctggagacctacaggaacctgaacgccatcggcttcaactgggaggcccagaacatcgaggagcactgccagagcagcaggaggcacaggaggtgcgagaggagccagagcgccgagaagcccagcgagtacacccagagggacaccagccccaagaaaaagagaaaagtctaagctgccttctgcggggcttgccttctggccatgcccttcttctctcccttgcacctgtacctcttggtctttgaataaagcctgagtaggaaggctagcaaaaaaaaaaaaaaaaaaaaaaaaaaaaaaaaaaaaaaaaaaaaaaaaaaaaaaaaaaaaaaaaaaaaaaaaaaaaaaaa

SEQ ID NO: 3785 - RNA, 5419 nt, synthetic construct
  source 1..5419: mol_type = other RNA
aggaaataagagagaaaagaagagtaagaagaaatataagagccaccatggcccctaagaagaagcgtaaagtgagccgggtgaacggcagcggcagcggcggcggcatgaaccacgaccaggagttcgacccccctaaggtgtaccctcccgtccccgccgagaagagaaagcccatccgggtcctgagcctgttcgatggcatcgccaccggtctgctggtgctgaaggacctgggcatccaggtggataggtacattgcctccgaggtgtgcgaggactccatcaccgtgggaatggtgcgtcatcagggcaagatcatgtacgtgggcgacgtgcggagcgtgacacagaagcatatccaggagtggggccctttcgacctggtgatcggcggcagcccttgcaatgacctgagcatcgtgaacccagcccggaagggcctgtacgagggaaccggcagactgttcttcgagttttacagactgctgcacgacgcccggcctaaggaaggcgacgaccggcccttcttttggctgttcgagaatgtggtggccatgggagtcagcgacaagcgggatattagccggttcctggagagcaaccccgtgatgatcgatgccaaggaagtgagcgccgcccaccgggccagatacttctggggcaatctgcctggcatgaacagacccctggccagcaccgtgaacgacaagctggagctgcaggagtgcctggagcacggccggatcgccaagttcagcaaggtgagaaccatcaccacccgaagcaacagcatcaaacaaggcaaggaccagcactttcctgtgttcatgaacgagaaggaggacatcctgtggtgtaccgagatggagagagtgttcgggttcccagtccactacacagatgtcagcaacatgtctagactggccagacagagactgctgggaagaagctggtccgtccctgtgatcagacacctgttcgcccctctgaaggagtacttcgcctgcgtgagcagcggcaacagcaacgccaacagccggggccccagcttctctagcggcctggtgccactgtccctgagagggagccacatgggccccatggagatctacaaaaccgtgagcgcctggaagcggcagcctgtgcgcgtgctgagcctgtttcggaatatcgataaagtcctgaaaagcctgggattcctggagagcggctctggctccggcggtggcaccctgaagtacgtggaggatgtgacaaacgtggtcagacgggatgtggagaagtggggccccttcgatctggtgtacggcagcacccaacccctgggcagctcttgtgaccggtgccctggctggtacatgtttcagttccaccggatcctgcagtacgccctgccgagacaggagtcccagcggccattcttttggattttcatggacaacttgctgctgaccgaggatgaccaggaaactaccactcggttcctgcagaccgaagccgtgaccctgcaggacgtgagaggccgggactaccagaacgccatgcgggtgtggtccaacatccctggactgaaaagcaagcacgcacctctgacccctaaagaagaggagtacctgcaggcccaggtgcggagcagaagcaagctggacgcccctaaggtggatctgctggtgaagaattgcctcctgcccctgagagagtacttcaagtatttcagccagaatagtctgcccctgggcggcccaagcagcggcgcccctcctcccagcggcggcagcccagccggctccccaacctctaccgaggagggcacctctgagtccgccacccccgagagcggccctggcacctccaccgagcccagcgagggcagcgcacccggcagccctgccggcagccccacctccacagaggagggaaccagcaccgagcccagcgaaggcagcgccccaggcaccagcaccgagcctagtgagggcggctctggcggcggcagcgcccaggagattaaacggatcaacaagatcagaagaagacttgtgaaagacagcaacaccaagaaggccggcaagacaggccccatgaaaaccctgctggttagagtgatgacacccgatctgagagagcggctggaaaacctgagaaagaagcctgaaaatatcccccagcccatcagcaatacatctagagccaacctgaataagctgctgaccgattacaccgaaatgaagaaggcgatcctgcatgtgtactgggaagagttccagaaggaccctgtgggcctgatgagccgggtggcccagcctgccagcaagaagatcgatcagaacaagctgaaacctgagatggacgagaagggcaacctgaccaccgccggctttgcctgctctcagtgtggccagcccctgttcgtgtacaagctggagcaggtgtctgagaagggcaaggcttacaccaactacttcggacggtgcaatgtggccgagcacgaaaagctgatcctgctggcccagctgaagcccgagaaggatagcgacgaagccgtgacatatagcctgggaaagtttgggcagagggccctggatttctacagcattcatgtgaccaaggagtccacccaccccgtgaagcccctggcccagatcgccggaaacagatacgcctccggacctgtgggaaaggccctgagcgacgcatgtatgggcacaatcgcctccttcctgtctaagtaccaggacatcatcatcgaacaccagaaggtggtgaagggcaaccagaagagactggagagcctgcgggagctggccggcaaggaaaacctggaataccctagcgtgaccctgccacctcagcctcacaccaaggagggcgttgatgcctacaacgaagtgatcgcccgggtgcgaatgtgggtgaacctgaacctgtggcagaagctgaagctaagcagagatgatgccaagcctctgctgagactgaagggattcccttcctttcctctggtcgagagacaggccaacgaagtggactggtgggacatggtgtgtaacgtgaagaagctgatcaacgagaaaaaggaggatggcaaggtgttttggcagaatctggctggctacaagagacaggaagccctgagaccatacctgagcagcgaggaagatcggaagaagggaaagaaattcgctcggtaccagctgggcgacctgctgctgcacctggaaaagaagcacggcgaggactggggaaaggtgtacgacgaggcctgggagcggattgacaagaaagtggaaggcctgagcaagcacatcaagctggaagaggaacggagaagcgaggacgcccagagcaaggccgccctgaccgactggctgcgggctaaggccagcttcgtgatcgagggcctgaaggaggccgacaaggacgagttctgcagatgcgagctgaagctgcagaagtggtacggggacctgcggggaaagcccttcgccatcgaagccgagaacagcatcctggacatcagcggcttcagcaagcagtacaactgtgccttcatctggcagaaggacggcgtgaagaagctgaacctgtacctgatcatcaactacttcaagggcggcaagctgcggttcaagaagatcaaacctgaagccttcgaagccaacagattctacaccgtgatcaacaaaaagagcggcgagatcgtgcccatggaggtgaacttcaacttcgacgaccccaacctgatcatcctgcctctggcctttggcaagagacagggcagagaattcatctggaacgacctgctgtccctggaaaccggcagcctgaagctggccaacggaagagtgatcgagaagacactgtacaacagaagaacccggcaggatgagcctgccctgttcgtggccctgaccttcgagcggcgggaggtcctggactcctccaatatcaaaccaatgaacctgatcggcgtggcaagaggcgaaaacatccccgccgtgatcgccctgaccgaccccgagggctgcccactgagccggtttaaggatagcctgggaaacccaacccacatcctgagaatcggcgagagctataaggagaagcagcggaccatccaggccaagaaggaggtggagcagcggagagccggcggctacagccggaagtacgccagcaaagccaagaatctggcagacgatatggtgagaaacaccgctagagatctgctgtactacgccgtgacccaggatgccatgctgatcttcgccaacctgagccggggcttcggccggcagggcaagcggaccttcatggccgagagacagtacacacggatggaggactggctgaccgccaagctggcctacgagggcctgagcaagacctacctgtccaagacactggcccagtacacctccaagacatgcagcaactgtgggtttaccatcaccagcgccgactacgacagggtgctggagaagctgaagaagacagcaacaggctggatgaccacaattaacggcaaggagctgaaggtggagggccagattacctactacaacagatacaagagacagaacgtagtcaaggacctgtccgtcgagctggatagactgagcgaagaatctgtgaacaacgacatctcctcctggacaaagggcagaagcggagaagctctgagcctcctgaagaaaagattctcccatagacccgtgcaggagaagttcgtgtgcctgaactgcggcttcgagacacacgcagccgagcaagccgccctgaacatcgccagatcctggctgttcctgcggagccaggagtacaagaaataccagacaaacaagacaaccggcaacaccgataagagagccttcgtcgagacctggcagtccttttaccggaagaagcttaaggaggtgtggaaacctgccgtgcggtctggcggatctggcggaggctccacaagcctggtgagcttcgaggacgtggccatggacttcagcagggaggagtggcagcagctggaccccgcccagaggtgcctgtaccaggacgtgatgctggagatctacagccacctgctgagcgtggagggcgccctgggcctgaagaccagccagcagaagatcttcgagaaggccagcttccacaacggcaaggagagcgaggtgaccaggggcggcatgtggtgcagcatcagcgaggacctgaccagccccaagaaaaagagaaaagtctaagctgccttctgcggggcttgccttctggccatgcccttcttctctcccttgcacctgtacctcttggtctttgaataaagcctgagtaggaaggctagcaaaaaaaaaaaaaaaaaaaaaaaaaaaaaaaaaaaaaaaaaaaaaaaaaaaaaaaaaaaaaaaaaaaaaaaaaaaaaaaa

SEQ ID NO: 3786 - RNA, 5419 nt, synthetic construct
  source 1..5419: mol_type = other RNA
aggaaataagagagaaaagaagagtaagaagaaatataagagccaccatggcccctaagaagaagcgtaaagtgagccgggtgaacggcagcggcagcggcggcggcatgaaccacgaccaggagttcgacccccctaaggtgtaccctcccgtccccgccgagaagagaaagcccatccgggtcctgagcctgttcgatggcatcgccaccggtctgctggtgctgaaggacctgggcatccaggtggataggtacattgcctccgaggtgtgcgaggactccatcaccgtgggaatggtgcgtcatcagggcaagatcatgtacgtgggcgacgtgcggagcgtgacacagaagcatatccaggagtggggccctttcgacctggtgatcggcggcagcccttgcaatgacctgagcatcgtgaacccagcccggaagggcctgtacgagggaaccggcagactgttcttcgagttttacagactgctgcacgacgcccggcctaaggaaggcgacgaccggcccttcttttggctgttcgagaatgtggtggccatgggagtcagcgacaagcgggatattagccggttcctggagagcaaccccgtgatgatcgatgccaaggaagtgagcgccgcccaccgggccagatacttctggggcaatctgcctggcatgaacagacccctggccagcaccgtgaacgacaagctggagctgcaggagtgcctggagcacggccggatcgccaagttcagcaaggtgagaaccatcaccacccgaagcaacagcatcaaacaaggcaaggaccagcactttcctgtgttcatgaacgagaaggaggacatcctgtggtgtaccgagatggagagagtgttcgggttcccagtccactacacagatgtcagcaacatgtctagactggccagacagagactgctgggaagaagctggtccgtccctgtgatcagacacctgttcgcccctctgaaggagtacttcgcctgcgtgagcagcggcaacagcaacgccaacagccggggccccagcttctctagcggcctggtgccactgtccctgagagggagccacatgggccccatggagatctacaaaaccgtgagcgcctggaagcggcagcctgtgcgcgtgctgagcctgtttcggaatatcgataaagtcctgaaaagcctgggattcctggagagcggctctggctccggcggtggcaccctgaagtacgtggaggatgtgacaaacgtggtcagacgggatgtggagaagtggggccccttcgatctggtgtacggcagcacccaacccctgggcagctcttgtgaccggtgccctggctggtacatgtttcagttccaccggatcctgcagtacgccctgccgagacaggagtcccagcggccattcttttggattttcatggacaacttgctgctgaccgaggatgaccaggaaactaccactcggttcctgcagaccgaagccgtgaccctgcaggacgtgagaggccgggactaccagaacgccatgcgggtgtggtccaacatccctggactgaaaagcaagcacgcacctctgacccctaaagaagaggagtacctgcaggcccaggtgcggagcagaagcaagctggacgcccctaaggtggatctgctggtgaagaattgcctcctgcccctgagagagtacttcaagtatttcagccagaatagtctgcccctgggcggcccaagcagcggcgcccctcctcccagcggcggcagcccagccggctccccaacctctaccgaggagggcacctctgagtccgccacccccgagagcggccctggcacctccaccgagcccagcgagggcagcgcacccggcagccctgccggcagccccacctccacagaggagggaaccagcaccgagcccagcgaaggcagcgccccaggcaccagcaccgagcctagtgagggcggctctggcggcggcagcgcccaggagattaaacggatcaacaagatcagaagaagacttgtgaaagacagcaacaccaagaaggccggcaagacaggccccatgaaaaccctgctggttagagtgatgacacccgatctgagagagcggctggaaaacctgagaaagaagcctgaaaatatcccccagcccatcagcaatacatctagagccaacctgaataagctgctgaccgattacaccgaaatgaagaaggcgatcctgcatgtgtactgggaagagttccagaaggaccctgtgggcctgatgagccgggtggcccagcctgccagcaagaagatcgatcagaacaagctgaaacctgagatggacgagaagggcaacctgaccaccgccggctttgcctgctctcagtgtggccagcccctgttcgtgtacaagctggagcaggtgtctgagaagggcaaggcttacaccaactacttcggacggtgcaatgtggccgagcacgaaaagctgatcctgctggcccagctgaagcccgagaaggatagcgacgaagccgtgacatatagcctgggaaagtttgggcagagggccctggatttctacagcattcatgtgaccaaggagtccacccaccccgtgaagcccctggcccagatcgccggaaacagatacgcctccggacctgtgggaaaggccctgagcgacgcatgtatgggcacaatcgcctccttcctgtctaagtaccaggacatcatcatcgaacaccagaaggtggtgaagggcaaccagaagagactggagagcctgcgggagctggccggcaaggaaaacctggaataccctagcgtgaccctgccacctcagcctcacaccaaggagggcgttgatgcctacaacgaagtgatcgcccgggtgcgaatgtgggtgaacctgaacctgtggcagaagctgaagctaagcagagatgatgccaagcctctgctgagactgaagggattcccttcctttcctctggtcgagagacaggccaacgaagtggactggtgggacatggtgtgtaacgtgaagaagctgatcaacgagaaaaaggaggatggcaaggtgttttggcagaatctggctggctacaagagacaggaagccctgagaccatacctgagcagcgaggaagatcggaagaagggaaagaaattcgctcggtaccagctgggcgacctgctgctgcacctggaaaagaagcacggcgaggactggggaaaggtgtacgacgaggcctgggagcggattgacaagaaagtggaaggcctgagcaagcacatcaagctggaagaggaacggagaagcgaggacgcccagagcaaggccgccctgaccgactggctgcgggctaaggccagcttcgtgatcgagggcctgaaggaggccgacaaggacgagttctgcagatgcgagctgaagctgcagaagtggtacggggacctgcggggaaagcccttcgccatcgaagccgagaacagcatcctggacatcagcggcttcagcaagcagtacaactgtgccttcatctggcagaaggacggcgtgaagaagctgaacctgtacctgatcatcaactacttcaagggcggcaagctgcggttcaagaagatcaaacctgaagccttcgaagccaacagattctacaccgtgatcaacaaaaagagcggcgagatcgtgcccatggaggtgaacttcaacttcgacgaccccaacctgatcatcctgcctctggcctttggcaagagacagggcagagaattcatctggaacgacctgctgtccctggaaaccggcagcctgaagctggccaacggaagagtgatcgagaagacactgtacaacagaagaacccggcaggatgagcctgccctgttcgtggccctgaccttcgagcggcgggaggtcctggactcctccaatatcaaaccaatgaacctgatcggcgtggcaagaggcgaaaacatccccgccgtgatcgccctgaccgaccccgagggctgcccactgagccggtttaaggatagcctgggaaacccaacccacatcctgagaatcggcgagagctataaggagaagcagcggaccatccaggccaagaaggaggtggagcagcggagagccggcggctacagccggaagtacgccagcaaagccaagaatctggcagacgatatggtgagaaacaccgctagagatctgctgtactacgccgtgacccaggatgccatgctgatcttcgccaacctgagccggggcttcggccggcagggcaagcggaccttcatggccgagagacagtacacacggatggaggactggctgaccgccaagctggcctacgagggcctgagcaagacctacctgtccaagacactggcccagtacacctccaagacatgcagcaactgtgggtttaccatcaccagcgccgactacgacagggtgctggagaagctgaagaagacagcaacaggctggatgaccacaattaacggcaaggagctgaaggtggagggccagattacctactacaacagatacaagagacagaacgtagtcaaggacctgtccgtcgagctggatagactgagcgaagaatctgtgaacaacgacatctcctcctggacaaagggcagaagcggagaagctctgagcctcctgaagaaaagattctcccatagacccgtgcaggagaagttcgtgtgcctgaactgcggcttcgagacacacgcagccgagcaagccgccctgaacatcgccagatcctggctgttcctgcggagccaggagtacaagaaataccagacaaacaagacaaccggcaacaccgataagagagccttcgtcgagacctggcagtccttttaccggaagaagcttaaggaggtgtggaaacctgccgtgcggtctggcggatctggcggaggctccacaagcagccagcacctggtgaccttcgaggacgtggccgtgaacttcacccaggaggagtggaccctgctggaccagacccagagggacctgtacagggacgtgatgctggagaactaccagaacctgatggccctgggcagcgagagctgcaagccccacgtgaacagccccctggagggcgccgaggagctgaggaccagggccaggaggatcctgcagagcgagttcatggccgagagcgacctgaccagccccaagaaaaagagaaaagtctaagctgccttctgcggggcttgccttctggccatgcccttcttctctcccttgcacctgtacctcttggtctttgaataaagcctgagtaggaaggctagcaaaaaaaaaaaaaaaaaaaaaaaaaaaaaaaaaaaaaaaaaaaaaaaaaaaaaaaaaaaaaaaaaaaaaaaaaaaaaaaa

SEQ ID NO: 3787 - RNA, 5419 nt, synthetic construct
  source 1..5419: mol_type = other RNA
aggaaataagagagaaaagaagagtaagaagaaatataagagccaccatggcccctaagaagaagcgtaaagtgagccgggtgaacggcagcggcagcggcggcggcatgaaccacgaccaggagttcgacccccctaaggtgtaccctcccgtccccgccgagaagagaaagcccatccgggtcctgagcctgttcgatggcatcgccaccggtctgctggtgctgaaggacctgggcatccaggtggataggtacattgcctccgaggtgtgcgaggactccatcaccgtgggaatggtgcgtcatcagggcaagatcatgtacgtgggcgacgtgcggagcgtgacacagaagcatatccaggagtggggccctttcgacctggtgatcggcggcagcccttgcaatgacctgagcatcgtgaacccagcccggaagggcctgtacgagggaaccggcagactgttcttcgagttttacagactgctgcacgacgcccggcctaaggaaggcgacgaccggcccttcttttggctgttcgagaatgtggtggccatgggagtcagcgacaagcgggatattagccggttcctggagagcaaccccgtgatgatcgatgccaaggaagtgagcgccgcccaccgggccagatacttctggggcaatctgcctggcatgaacagacccctggccagcaccgtgaacgacaagctggagctgcaggagtgcctggagcacggccggatcgccaagttcagcaaggtgagaaccatcaccacccgaagcaacagcatcaaacaaggcaaggaccagcactttcctgtgttcatgaacgagaaggaggacatcctgtggtgtaccgagatggagagagtgttcgggttcccagtccactacacagatgtcagcaacatgtctagactggccagacagagactgctgggaagaagctggtccgtccctgtgatcagacacctgttcgcccctctgaaggagtacttcgcctgcgtgagcagcggcaacagcaacgccaacagccggggccccagcttctctagcggcctggtgccactgtccctgagagggagccacatgggccccatggagatctacaaaaccgtgagcgcctggaagcggcagcctgtgcgcgtgctgagcctgtttcggaatatcgataaagtcctgaaaagcctgggattcctggagagcggctctggctccggcggtggcaccctgaagtacgtggaggatgtgacaaacgtggtcagacgggatgtggagaagtggggccccttcgatctggtgtacggcagcacccaacccctgggcagctcttgtgaccggtgccctggctggtacatgtttcagttccaccggatcctgcagtacgccctgccgagacaggagtcccagcggccattcttttggattttcatggacaacttgctgctgaccgaggatgaccaggaaactaccactcggttcctgcagaccgaagccgtgaccctgcaggacgtgagaggccgggactaccagaacgccatgcgggtgtggtccaacatccctggactgaaaagcaagcacgcacctctgacccctaaagaagaggagtacctgcaggcccaggtgcggagcagaagcaagctggacgcccctaaggtggatctgctggtgaagaattgcctcctgcccctgagagagtacttcaagtatttcagccagaatagtctgcccctgggcggcccaagcagcggcgcccctcctcccagcggcggcagcccagccggctccccaacctctaccgaggagggcacctctgagtccgccacccccgagagcggccctggcacctccaccgagcccagcgagggcagcgcacccggcagccctgccggcagccccacctccacagaggagggaaccagcaccgagcccagcgaaggcagcgccccaggcaccagcaccgagcctagtgagggcggctctggcggcggcagcgcccaggagattaaacggatcaacaagatcagaagaagacttgtgaaagacagcaacaccaagaaggccggcaagacaggccccatgaaaaccctgctggttagagtgatgacacccgatctgagagagcggctggaaaacctgagaaagaagcctgaaaatatcccccagcccatcagcaatacatctagagccaacctgaataagctgctgaccgattacaccgaaatgaagaaggcgatcctgcatgtgtactgggaagagttccagaaggaccctgtgggcctgatgagccgggtggcccagcctgccagcaagaagatcgatcagaacaagctgaaacctgagatggacgagaagggcaacctgaccaccgccggctttgcctgctctcagtgtggccagcccctgttcgtgtacaagctggagcaggtgtctgagaagggcaaggcttacaccaactacttcggacggtgcaatgtggccgagcacgaaaagctgatcctgctggcccagctgaagcccgagaaggatagcgacgaagccgtgacatatagcctgggaaagtttgggcagagggccctggatttctacagcattcatgtgaccaaggagtccacccaccccgtgaagcccctggcccagatcgccggaaacagatacgcctccggacctgtgggaaaggccctgagcgacgcatgtatgggcacaatcgcctccttcctgtctaagtaccaggacatcatcatcgaacaccagaaggtggtgaagggcaaccagaagagactggagagcctgcgggagctggccggcaaggaaaacctggaataccctagcgtgaccctgccacctcagcctcacaccaaggagggcgttgatgcctacaacgaagtgatcgcccgggtgcgaatgtgggtgaacctgaacctgtggcagaagctgaagctaagcagagatgatgccaagcctctgctgagactgaagggattcccttcctttcctctggtcgagagacaggccaacgaagtggactggtgggacatggtgtgtaacgtgaagaagctgatcaacgagaaaaaggaggatggcaaggtgttttggcagaatctggctggctacaagagacaggaagccctgagaccatacctgagcagcgaggaagatcggaagaagggaaagaaattcgctcggtaccagctgggcgacctgctgctgcacctggaaaagaagcacggcgaggactggggaaaggtgtacgacgaggcctgggagcggattgacaagaaagtggaaggcctgagcaagcacatcaagctggaagaggaacggagaagcgaggacgcccagagcaaggccgccctgaccgactggctgcgggctaaggccagcttcgtgatcgagggcctgaaggaggccgacaaggacgagttctgcagatgcgagctgaagctgcagaagtggtacggggacctgcggggaaagcccttcgccatcgaagccgagaacagcatcctggacatcagcggcttcagcaagcagtacaactgtgccttcatctggcagaaggacggcgtgaagaagctgaacctgtacctgatcatcaactacttcaagggcggcaagctgcggttcaagaagatcaaacctgaagccttcgaagccaacagattctacaccgtgatcaacaaaaagagcggcgagatcgtgcccatggaggtgaacttcaacttcgacgaccccaacctgatcatcctgcctctggcctttggcaagagacagggcagagaattcatctggaacgacctgctgtccctggaaaccggcagcctgaagctggccaacggaagagtgatcgagaagacactgtacaacagaagaacccggcaggatgagcctgccctgttcgtggccctgaccttcgagcggcgggaggtcctggactcctccaatatcaaaccaatgaacctgatcggcgtggcaagaggcgaaaacatccccgccgtgatcgccctgaccgaccccgagggctgcccactgagccggtttaaggatagcctgggaaacccaacccacatcctgagaatcggcgagagctataaggagaagcagcggaccatccaggccaagaaggaggtggagcagcggagagccggcggctacagccggaagtacgccagcaaagccaagaatctggcagacgatatggtgagaaacaccgctagagatctgctgtactacgccgtgacccaggatgccatgctgatcttcgccaacctgagccggggcttcggccggcagggcaagcggaccttcatggccgagagacagtacacacggatggaggactggctgaccgccaagctggcctacgagggcctgagcaagacctacctgtccaagacactggcccagtacacctccaagacatgcagcaactgtgggtttaccatcaccagcgccgactacgacagggtgctggagaagctgaagaagacagcaacaggctggatgaccacaattaacggcaaggagctgaaggtggagggccagattacctactacaacagatacaagagacagaacgtagtcaaggacctgtccgtcgagctggatagactgagcgaagaatctgtgaacaacgacatctcctcctggacaaagggcagaagcggagaagctctgagcctcctgaagaaaagattctcccatagacccgtgcaggagaagttcgtgtgcctgaactgcggcttcgagacacacgcagccgagcaagccgccctgaacatcgccagatcctggctgttcctgcggagccaggagtacaagaaataccagacaaacaagacaaccggcaacaccgataagagagccttcgtcgagacctggcagtccttttaccggaagaagcttaaggaggtgtggaaacctgccgtgcggtctggcggatctggcggaggctccacaagcatgggcctgctgaccttcagggacgtggccatcgagttcagcctggaggagtggcagtgcctggacaccgcccagaagaacctgtacaggaacgtgatgctggagaactacaggaacctggccttcctgggcatcgccgtgagcaagcccgacctgatcatctgcctggagaaggagaaggagccctggaacatgaagaggcacgagatggtggacgagccccccggcctggccgtgagcaacaccagccccaagaaaaagagaaaagtctaagctgccttctgcggggcttgccttctggccatgcccttcttctctcccttgcacctgtacctcttggtctttgaataaagcctgagtaggaaggctagcaaaaaaaaaaaaaaaaaaaaaaaaaaaaaaaaaaaaaaaaaaaaaaaaaaaaaaaaaaaaaaaaaaaaaaaaaaaaaaaa

SEQ ID NO: 3788 - RNA, 5419 nt, synthetic construct
  source 1..5419: mol_type = other RNA
aggaaataagagagaaaagaagagtaagaagaaatataagagccaccatggcccctaagaagaagcgtaaagtgagccgggtgaacggcagcggcagcggcggcggcatgaaccacgaccaggagttcgacccccctaaggtgtaccctcccgtccccgccgagaagagaaagcccatccgggtcctgagcctgttcgatggcatcgccaccggtctgctggtgctgaaggacctgggcatccaggtggataggtacattgcctccgaggtgtgcgaggactccatcaccgtgggaatggtgcgtcatcagggcaagatcatgtacgtgggcgacgtgcggagcgtgacacagaagcatatccaggagtggggccctttcgacctggtgatcggcggcagcccttgcaatgacctgagcatcgtgaacccagcccggaagggcctgtacgagggaaccggcagactgttcttcgagttttacagactgctgcacgacgcccggcctaaggaaggcgacgaccggcccttcttttggctgttcgagaatgtggtggccatgggagtcagcgacaagcgggatattagccggttcctggagagcaaccccgtgatgatcgatgccaaggaagtgagcgccgcccaccgggccagatacttctggggcaatctgcctggcatgaacagacccctggccagcaccgtgaacgacaagctggagctgcaggagtgcctggagcacggccggatcgccaagttcagcaaggtgagaaccatcaccacccgaagcaacagcatcaaacaaggcaaggaccagcactttcctgtgttcatgaacgagaaggaggacatcctgtggtgtaccgagatggagagagtgttcgggttcccagtccactacacagatgtcagcaacatgtctagactggccagacagagactgctgggaagaagctggtccgtccctgtgatcagacacctgttcgcccctctgaaggagtacttcgcctgcgtgagcagcggcaacagcaacgccaacagccggggccccagcttctctagcggcctggtgccactgtccctgagagggagccacatgggccccatggagatctacaaaaccgtgagcgcctggaagcggcagcctgtgcgcgtgctgagcctgtttcggaatatcgataaagtcctgaaaagcctgggattcctggagagcggctctggctccggcggtggcaccctgaagtacgtggaggatgtgacaaacgtggtcagacgggatgtggagaagtggggccccttcgatctggtgtacggcagcacccaacccctgggcagctcttgtgaccggtgccctggctggtacatgtttcagttccaccggatcctgcagtacgccctgccgagacaggagtcccagcggccattcttttggattttcatggacaacttgctgctgaccgaggatgaccaggaaactaccactcggttcctgcagaccgaagccgtgaccctgcaggacgtgagaggccgggactaccagaacgccatgcgggtgtggtccaacatccctggactgaaaagcaagcacgcacctctgacccctaaagaagaggagtacctgcaggcccaggtgcggagcagaagcaagctggacgcccctaaggtggatctgctggtgaagaattgcctcctgcccctgagagagtacttcaagtatttcagccagaatagtctgcccctgggcggcccaagcagcggcgcccctcctcccagcggcggcagcccagccggctccccaacctctaccgaggagggcacctctgagtccgccacccccgagagcggccctggcacctccaccgagcccagcgagggcagcgcacccggcagccctgccggcagccccacctccacagaggagggaaccagcaccgagcccagcgaaggcagcgccccaggcaccagcaccgagcctagtgagggcggctctggcggcggcagcgcccaggagattaaacggatcaacaagatcagaagaagacttgtgaaagacagcaacaccaagaaggccggcaagacaggccccatgaaaaccctgctggttagagtgatgacacccgatctgagagagcggctggaaaacctgagaaagaagcctgaaaatatcccccagcccatcagcaatacatctagagccaacctgaataagctgctgaccgattacaccgaaatgaagaaggcgatcctgcatgtgtactgggaagagttccagaaggaccctgtgggcctgatgagccgggtggcccagcctgccagcaagaagatcgatcagaacaagctgaaacctgagatggacgagaagggcaacctgaccaccgccggctttgcctgctctcagtgtggccagcccctgttcgtgtacaagctggagcaggtgtctgagaagggcaaggcttacaccaactacttcggacggtgcaatgtggccgagcacgaaaagctgatcctgctggcccagctgaagcccgagaaggatagcgacgaagccgtgacatatagcctgggaaagtttgggcagagggccctggatttctacagcattcatgtgaccaaggagtccacccaccccgtgaagcccctggcccagatcgccggaaacagatacgcctccggacctgtgggaaaggccctgagcgacgcatgtatgggcacaatcgcctccttcctgtctaagtaccaggacatcatcatcgaacaccagaaggtggtgaagggcaaccagaagagactggagagcctgcgggagctggccggcaaggaaaacctggaataccctagcgtgaccctgccacctcagcctcacaccaaggagggcgttgatgcctacaacgaagtgatcgcccgggtgcgaatgtgggtgaacctgaacctgtggcagaagctgaagctaagcagagatgatgccaagcctctgctgagactgaagggattcccttcctttcctctggtcgagagacaggccaacgaagtggactggtgggacatggtgtgtaacgtgaagaagctgatcaacgagaaaaaggaggatggcaaggtgttttggcagaatctggctggctacaagagacaggaagccctgagaccatacctgagcagcgaggaagatcggaagaagggaaagaaattcgctcggtaccagctgggcgacctgctgctgcacctggaaaagaagcacggcgaggactggggaaaggtgtacgacgaggcctgggagcggattgacaagaaagtggaaggcctgagcaagcacatcaagctggaagaggaacggagaagcgaggacgcccagagcaaggccgccctgaccgactggctgcgggctaaggccagcttcgtgatcgagggcctgaaggaggccgacaaggacgagttctgcagatgcgagctgaagctgcagaagtggtacggggacctgcggggaaagcccttcgccatcgaagccgagaacagcatcctggacatcagcggcttcagcaagcagtacaactgtgccttcatctggcagaaggacggcgtgaagaagctgaacctgtacctgatcatcaactacttcaagggcggcaagctgcggttcaagaagatcaaacctgaagccttcgaagccaacagattctacaccgtgatcaacaaaaagagcggcgagatcgtgcccatggaggtgaacttcaacttcgacgaccccaacctgatcatcctgcctctggcctttggcaagagacagggcagagaattcatctggaacgacctgctgtccctggaaaccggcagcctgaagctggccaacggaagagtgatcgagaagacactgtacaacagaagaacccggcaggatgagcctgccctgttcgtggccctgaccttcgagcggcgggaggtcctggactcctccaatatcaaaccaatgaacctgatcggcgtggcaagaggcgaaaacatccccgccgtgatcgccctgaccgaccccgagggctgcccactgagccggtttaaggatagcctgggaaacccaacccacatcctgagaatcggcgagagctataaggagaagcagcggaccatccaggccaagaaggaggtggagcagcggagagccggcggctacagccggaagtacgccagcaaagccaagaatctggcagacgatatggtgagaaacaccgctagagatctgctgtactacgccgtgacccaggatgccatgctgatcttcgccaacctgagccggggcttcggccggcagggcaagcggaccttcatggccgagagacagtacacacggatggaggactggctgaccgccaagctggcctacgagggcctgagcaagacctacctgtccaagacactggcccagtacacctccaagacatgcagcaactgtgggtttaccatcaccagcgccgactacgacagggtgctggagaagctgaagaagacagcaacaggctggatgaccacaattaacggcaaggagctgaaggtggagggccagattacctactacaacagatacaagagacagaacgtagtcaaggacctgtccgtcgagctggatagactgagcgaagaatctgtgaacaacgacatctcctcctggacaaagggcagaagcggagaagctctgagcctcctgaagaaaagattctcccatagacccgtgcaggagaagttcgtgtgcctgaactgcggcttcgagacacacgcagccgagcaagccgccctgaacatcgccagatcctggctgttcctgcggagccaggagtacaagaaataccagacaaacaagacaaccggcaacaccgataagagagccttcgtcgagacctggcagtccttttaccggaagaagcttaaggaggtgtggaaacctgccgtgcggtctggcggatctggcggaggctccacaagcatggccgccctgttcctgagcgccccccaccaggccaaggtgaccttcgaggacgtggccgtgtacctgagcagggaggagtggggcaggctgggccccgcccagaggggcctgtacagggacgtgatgctggagacctacggcaacctggtgagcctgggcgtgggccccgccggccccaagcccggcgtgatcagccagctggagaggggcgacgagccctgggtgctggacgtgcagggcaccagccccaagaaaaagagaaaagtctaagctgccttctgcggggcttgccttctggccatgcccttcttctctcccttgcacctgtacctcttggtctttgaataaagcctgagtaggaaggctagcaaaaaaaaaaaaaaaaaaaaaaaaaaaaaaaaaaaaaaaaaaaaaaaaaaaaaaaaaaaaaaaaaaaaaaaaaaaaaaaa

SEQ ID NO: 3789 - RNA, 5419 nt, synthetic construct
  source 1..5419: mol_type = other RNA
aggaaataagagagaaaagaagagtaagaagaaatataagagccaccatggcccctaagaagaagcgtaaagtgagccgggtgaacggcagcggcagcggcggcggcatgaaccacgaccaggagttcgacccccctaaggtgtaccctcccgtccccgccgagaagagaaagcccatccgggtcctgagcctgttcgatggcatcgccaccggtctgctggtgctgaaggacctgggcatccaggtggataggtacattgcctccgaggtgtgcgaggactccatcaccgtgggaatggtgcgtcatcagggcaagatcatgtacgtgggcgacgtgcggagcgtgacacagaagcatatccaggagtggggccctttcgacctggtgatcggcggcagcccttgcaatgacctgagcatcgtgaacccagcccggaagggcctgtacgagggaaccggcagactgttcttcgagttttacagactgctgcacgacgcccggcctaaggaaggcgacgaccggcccttcttttggctgttcgagaatgtggtggccatgggagtcagcgacaagcgggatattagccggttcctggagagcaaccccgtgatgatcgatgccaaggaagtgagcgccgcccaccgggccagatacttctggggcaatctgcctggcatgaacagacccctggccagcaccgtgaacgacaagctggagctgcaggagtgcctggagcacggccggatcgccaagttcagcaaggtgagaaccatcaccacccgaagcaacagcatcaaacaaggcaaggaccagcactttcctgtgttcatgaacgagaaggaggacatcctgtggtgtaccgagatggagagagtgttcgggttcccagtccactacacagatgtcagcaacatgtctagactggccagacagagactgctgggaagaagctggtccgtccctgtgatcagacacctgttcgcccctctgaaggagtacttcgcctgcgtgagcagcggcaacagcaacgccaacagccggggccccagcttctctagcggcctggtgccactgtccctgagagggagccacatgggccccatggagatctacaaaaccgtgagcgcctggaagcggcagcctgtgcgcgtgctgagcctgtttcggaatatcgataaagtcctgaaaagcctgggattcctggagagcggctctggctccggcggtggcaccctgaagtacgtggaggatgtgacaaacgtggtcagacgggatgtggagaagtggggccccttcgatctggtgtacggcagcacccaacccctgggcagctcttgtgaccggtgccctggctggtacatgtttcagttccaccggatcctgcagtacgccctgccgagacaggagtcccagcggccattcttttggattttcatggacaacttgctgctgaccgaggatgaccaggaaactaccactcggttcctgcagaccgaagccgtgaccctgcaggacgtgagaggccgggactaccagaacgccatgcgggtgtggtccaacatccctggactgaaaagcaagcacgcacctctgacccctaaagaagaggagtacctgcaggcccaggtgcggagcagaagcaagctggacgcccctaaggtggatctgctggtgaagaattgcctcctgcccctgagagagtacttcaagtatttcagccagaatagtctgcccctgggcggcccaagcagcggcgcccctcctcccagcggcggcagcccagccggctccccaacctctaccgaggagggcacctctgagtccgccacccccgagagcggccctggcacctccaccgagcccagcgagggcagcgcacccggcagccctgccggcagccccacctccacagaggagggaaccagcaccgagcccagcgaaggcagcgccccaggcaccagcaccgagcctagtgagggcggctctggcggcggcagcgcccaggagattaaacggatcaacaagatcagaagaagacttgtgaaagacagcaacaccaagaaggccggcaagacaggccccatgaaaaccctgctggttagagtgatgacacccgatctgagagagcggctggaaaacctgagaaagaagcctgaaaatatcccccagcccatcagcaatacatctagagccaacctgaataagctgctgaccgattacaccgaaatgaagaaggcgatcctgcatgtgtactgggaagagttccagaaggaccctgtgggcctgatgagccgggtggcccagcctgccagcaagaagatcgatcagaacaagctgaaacctgagatggacgagaagggcaacctgaccaccgccggctttgcctgctctcagtgtggccagcccctgttcgtgtacaagctggagcaggtgtctgagaagggcaaggcttacaccaactacttcggacggtgcaatgtggccgagcacgaaaagctgatcctgctggcccagctgaagcccgagaaggatagcgacgaagccgtgacatatagcctgggaaagtttgggcagagggccctggatttctacagcattcatgtgaccaaggagtccacccaccccgtgaagcccctggcccagatcgccggaaacagatacgcctccggacctgtgggaaaggccctgagcgacgcatgtatgggcacaatcgcctccttcctgtctaagtaccaggacatcatcatcgaacaccagaaggtggtgaagggcaaccagaagagactggagagcctgcgggagctggccggcaaggaaaacctggaataccctagcgtgaccctgccacctcagcctcacaccaaggagggcgttgatgcctacaacgaagtgatcgcccgggtgcgaatgtgggtgaacctgaacctgtggcagaagctgaagctaagcagagatgatgccaagcctctgctgagactgaagggattcccttcctttcctctggtcgagagacaggccaacgaagtggactggtgggacatggtgtgtaacgtgaagaagctgatcaacgagaaaaaggaggatggcaaggtgttttggcagaatctggctggctacaagagacaggaagccctgagaccatacctgagcagcgaggaagatcggaagaagggaaagaaattcgctcggtaccagctgggcgacctgctgctgcacctggaaaagaagcacggcgaggactggggaaaggtgtacgacgaggcctgggagcggattgacaagaaagtggaaggcctgagcaagcacatcaagctggaagaggaacggagaagcgaggacgcccagagcaaggccgccctgaccgactggctgcgggctaaggccagcttcgtgatcgagggcctgaaggaggccgacaaggacgagttctgcagatgcgagctgaagctgcagaagtggtacggggacctgcggggaaagcccttcgccatcgaagccgagaacagcatcctggacatcagcggcttcagcaagcagtacaactgtgccttcatctggcagaaggacggcgtgaagaagctgaacctgtacctgatcatcaactacttcaagggcggcaagctgcggttcaagaagatcaaacctgaagccttcgaagccaacagattctacaccgtgatcaacaaaaagagcggcgagatcgtgcccatggaggtgaacttcaacttcgacgaccccaacctgatcatcctgcctctggcctttggcaagagacagggcagagaattcatctggaacgacctgctgtccctggaaaccggcagcctgaagctggccaacggaagagtgatcgagaagacactgtacaacagaagaacccggcaggatgagcctgccctgttcgtggccctgaccttcgagcggcgggaggtcctggactcctccaatatcaaaccaatgaacctgatcggcgtggcaagaggcgaaaacatccccgccgtgatcgccctgaccgaccccgagggctgcccactgagccggtttaaggatagcctgggaaacccaacccacatcctgagaatcggcgagagctataaggagaagcagcggaccatccaggccaagaaggaggtggagcagcggagagccggcggctacagccggaagtacgccagcaaagccaagaatctggcagacgatatggtgagaaacaccgctagagatctgctgtactacgccgtgacccaggatgccatgctgatcttcgccaacctgagccggggcttcggccggcagggcaagcggaccttcatggccgagagacagtacacacggatggaggactggctgaccgccaagctggcctacgagggcctgagcaagacctacctgtccaagacactggcccagtacacctccaagacatgcagcaactgtgggtttaccatcaccagcgccgactacgacagggtgctggagaagctgaagaagacagcaacaggctggatgaccacaattaacggcaaggagctgaaggtggagggccagattacctactacaacagatacaagagacagaacgtagtcaaggacctgtccgtcgagctggatagactgagcgaagaatctgtgaacaacgacatctcctcctggacaaagggcagaagcggagaagctctgagcctcctgaagaaaagattctcccatagacccgtgcaggagaagttcgtgtgcctgaactgcggcttcgagacacacgcagccgagcaagccgccctgaacatcgccagatcctggctgttcctgcggagccaggagtacaagaaataccagacaaacaagacaaccggcaacaccgataagagagccttcgtcgagacctggcagtccttttaccggaagaagcttaaggaggtgtggaaacctgccgtgcggtctggcggatctggcggaggctccacaagcatggccttcagggacgtggccgtggccttcagccagaaggagtggaagctgctgagccccgcccagaggaccctgtacagggacgtgatgctggagaactacagcctgctggtgagcctgggcatcgccttccccaagcccaagctgatcacccagctggagcagggcgacgagccctggagggaggagagcgagtgcttcctggacctgtacagcgagcccaggaccgagttccagccctgcaccagccccaagaaaaagagaaaagtctaagctgccttctgcggggcttgccttctggccatgcccttcttctctcccttgcacctgtacctcttggtctttgaataaagcctgagtaggaaggctagcaaaaaaaaaaaaaaaaaaaaaaaaaaaaaaaaaaaaaaaaaaaaaaaaaaaaaaaaaaaaaaaaaaaaaaaaaaaaaaaa

SEQ ID NO: 3790 - RNA, 5419 nt, synthetic construct
  source 1..5419: mol_type = other RNA
aggaaataagagagaaaagaagagtaagaagaaatataagagccaccatggcccctaagaagaagcgtaaagtgagccgggtgaacggcagcggcagcggcggcggcatgaaccacgaccaggagttcgacccccctaaggtgtaccctcccgtccccgccgagaagagaaagcccatccgggtcctgagcctgttcgatggcatcgccaccggtctgctggtgctgaaggacctgggcatccaggtggataggtacattgcctccgaggtgtgcgaggactccatcaccgtgggaatggtgcgtcatcagggcaagatcatgtacgtgggcgacgtgcggagcgtgacacagaagcatatccaggagtggggccctttcgacctggtgatcggcggcagcccttgcaatgacctgagcatcgtgaacccagcccggaagggcctgtacgagggaaccggcagactgttcttcgagttttacagactgctgcacgacgcccggcctaaggaaggcgacgaccggcccttcttttggctgttcgagaatgtggtggccatgggagtcagcgacaagcgggatattagccggttcctggagagcaaccccgtgatgatcgatgccaaggaagtgagcgccgcccaccgggccagatacttctggggcaatctgcctggcatgaacagacccctggccagcaccgtgaacgacaagctggagctgcaggagtgcctggagcacggccggatcgccaagttcagcaaggtgagaaccatcaccacccgaagcaacagcatcaaacaaggcaaggaccagcactttcctgtgttcatgaacgagaaggaggacatcctgtggtgtaccgagatggagagagtgttcgggttcccagtccactacacagatgtcagcaacatgtctagactggccagacagagactgctgggaagaagctggtccgtccctgtgatcagacacctgttcgcccctctgaaggagtacttcgcctgcgtgagcagcggcaacagcaacgccaacagccggggccccagcttctctagcggcctggtgccactgtccctgagagggagccacatgggccccatggagatctacaaaaccgtgagcgcctggaagcggcagcctgtgcgcgtgctgagcctgtttcggaatatcgataaagtcctgaaaagcctgggattcctggagagcggctctggctccggcggtggcaccctgaagtacgtggaggatgtgacaaacgtggtcagacgggatgtggagaagtggggccccttcgatctggtgtacggcagcacccaacccctgggcagctcttgtgaccggtgccctggctggtacatgtttcagttccaccggatcctgcagtacgccctgccgagacaggagtcccagcggccattcttttggattttcatggacaacttgctgctgaccgaggatgaccaggaaactaccactcggttcctgcagaccgaagccgtgaccctgcaggacgtgagaggccgggactaccagaacgccatgcgggtgtggtccaacatccctggactgaaaagcaagcacgcacctctgacccctaaagaagaggagtacctgcaggcccaggtgcggagcagaagcaagctggacgcccctaaggtggatctgctggtgaagaattgcctcctgcccctgagagagtacttcaagtatttcagccagaatagtctgcccctgggcggcccaagcagcggcgcccctcctcccagcggcggcagcccagccggctccccaacctctaccgaggagggcacctctgagtccgccacccccgagagcggccctggcacctccaccgagcccagcgagggcagcgcacccggcagccctgccggcagccccacctccacagaggagggaaccagcaccgagcccagcgaaggcagcgccccaggcaccagcaccgagcctagtgagggcggctctggcggcggcagcgcccaggagattaaacggatcaacaagatcagaagaagacttgtgaaagacagcaacaccaagaaggccggcaagacaggccccatgaaaaccctgctggttagagtgatgacacccgatctgagagagcggctggaaaacctgagaaagaagcctgaaaatatcccccagcccatcagcaatacatctagagccaacctgaataagctgctgaccgattacaccgaaatgaagaaggcgatcctgcatgtgtactgggaagagttccagaaggaccctgtgggcctgatgagccgggtggcccagcctgccagcaagaagatcgatcagaacaagctgaaacctgagatggacgagaagggcaacctgaccaccgccggctttgcctgctctcagtgtggccagcccctgttcgtgtacaagctggagcaggtgtctgagaagggcaaggcttacaccaactacttcggacggtgcaatgtggccgagcacgaaaagctgatcctgctggcccagctgaagcccgagaaggatagcgacgaagccgtgacatatagcctgggaaagtttgggcagagggccctggatttctacagcattcatgtgaccaaggagtccacccaccccgtgaagcccctggcccagatcgccggaaacagatacgcctccggacctgtgggaaaggccctgagcgacgcatgtatgggcacaatcgcctccttcctgtctaagtaccaggacatcatcatcgaacaccagaaggtggtgaagggcaaccagaagagactggagagcctgcgggagctggccggcaaggaaaacctggaataccctagcgtgaccctgccacctcagcctcacaccaaggagggcgttgatgcctacaacgaagtgatcgcccgggtgcgaatgtgggtgaacctgaacctgtggcagaagctgaagctaagcagagatgatgccaagcctctgctgagactgaagggattcccttcctttcctctggtcgagagacaggccaacgaagtggactggtgggacatggtgtgtaacgtgaagaagctgatcaacgagaaaaaggaggatggcaaggtgttttggcagaatctggctggctacaagagacaggaagccctgagaccatacctgagcagcgaggaagatcggaagaagggaaagaaattcgctcggtaccagctgggcgacctgctgctgcacctggaaaagaagcacggcgaggactggggaaaggtgtacgacgaggcctgggagcggattgacaagaaagtggaaggcctgagcaagcacatcaagctggaagaggaacggagaagcgaggacgcccagagcaaggccgccctgaccgactggctgcgggctaaggccagcttcgtgatcgagggcctgaaggaggccgacaaggacgagttctgcagatgcgagctgaagctgcagaagtggtacggggacctgcggggaaagcccttcgccatcgaagccgagaacagcatcctggacatcagcggcttcagcaagcagtacaactgtgccttcatctggcagaaggacggcgtgaagaagctgaacctgtacctgatcatcaactacttcaagggcggcaagctgcggttcaagaagatcaaacctgaagccttcgaagccaacagattctacaccgtgatcaacaaaaagagcggcgagatcgtgcccatggaggtgaacttcaacttcgacgaccccaacctgatcatcctgcctctggcctttggcaagagacagggcagagaattcatctggaacgacctgctgtccctggaaaccggcagcctgaagctggccaacggaagagtgatcgagaagacactgtacaacagaagaacccggcaggatgagcctgccctgttcgtggccctgaccttcgagcggcgggaggtcctggactcctccaatatcaaaccaatgaacctgatcggcgtggcaagaggcgaaaacatccccgccgtgatcgccctgaccgaccccgagggctgcccactgagccggtttaaggatagcctgggaaacccaacccacatcctgagaatcggcgagagctataaggagaagcagcggaccatccaggccaagaaggaggtggagcagcggagagccggcggctacagccggaagtacgccagcaaagccaagaatctggcagacgatatggtgagaaacaccgctagagatctgctgtactacgccgtgacccaggatgccatgctgatcttcgccaacctgagccggggcttcggccggcagggcaagcggaccttcatggccgagagacagtacacacggatggaggactggctgaccgccaagctggcctacgagggcctgagcaagacctacctgtccaagacactggcccagtacacctccaagacatgcagcaactgtgggtttaccatcaccagcgccgactacgacagggtgctggagaagctgaagaagacagcaacaggctggatgaccacaattaacggcaaggagctgaaggtggagggccagattacctactacaacagatacaagagacagaacgtagtcaaggacctgtccgtcgagctggatagactgagcgaagaatctgtgaacaacgacatctcctcctggacaaagggcagaagcggagaagctctgagcctcctgaagaaaagattctcccatagacccgtgcaggagaagttcgtgtgcctgaactgcggcttcgagacacacgcagccgagcaagccgccctgaacatcgccagatcctggctgttcctgcggagccaggagtacaagaaataccagacaaacaagacaaccggcaacaccgataagagagccttcgtcgagacctggcagtccttttaccggaagaagcttaaggaggtgtggaaacctgccgtgcggtctggcggatctggcggaggctccacaagcatggccatgagccaggagagcctgaccttcaaggacgtgttcgtggacttcaccctggaggagtggcagcagctggacagcgcccagaagaacctgtacagggacgtgatgctggagaactacagccacctggtgagcgtgggctacctggtggagaagcccgacgtgatcttcaggctgggccccggcgaggagagctggatggccgacggcggcacccccgtgaggacctgcgccggcgagaccagccccaagaaaaagagaaaagtctaagctgccttctgcggggcttgccttctggccatgcccttcttctctcccttgcacctgtacctcttggtctttgaataaagcctgagtaggaaggctagcaaaaaaaaaaaaaaaaaaaaaaaaaaaaaaaaaaaaaaaaaaaaaaaaaaaaaaaaaaaaaaaaaaaaaaaaaaaaaaaa

SEQ ID NO: 3791 - RNA, 5419 nt, synthetic construct
  source 1..5419: mol_type = other RNA
aggaaataagagagaaaagaagagtaagaagaaatataagagccaccatggcccctaagaagaagcgtaaagtgagccgggtgaacggcagcggcagcggcggcggcatgaaccacgaccaggagttcgacccccctaaggtgtaccctcccgtccccgccgagaagagaaagcccatccgggtcctgagcctgttcgatggcatcgccaccggtctgctggtgctgaaggacctgggcatccaggtggataggtacattgcctccgaggtgtgcgaggactccatcaccgtgggaatggtgcgtcatcagggcaagatcatgtacgtgggcgacgtgcggagcgtgacacagaagcatatccaggagtggggccctttcgacctggtgatcggcggcagcccttgcaatgacctgagcatcgtgaacccagcccggaagggcctgtacgagggaaccggcagactgttcttcgagttttacagactgctgcacgacgcccggcctaaggaaggcgacgaccggcccttcttttggctgttcgagaatgtggtggccatgggagtcagcgacaagcgggatattagccggttcctggagagcaaccccgtgatgatcgatgccaaggaagtgagcgccgcccaccgggccagatacttctggggcaatctgcctggcatgaacagacccctggccagcaccgtgaacgacaagctggagctgcaggagtgcctggagcacggccggatcgccaagttcagcaaggtgagaaccatcaccacccgaagcaacagcatcaaacaaggcaaggaccagcactttcctgtgttcatgaacgagaaggaggacatcctgtggtgtaccgagatggagagagtgttcgggttcccagtccactacacagatgtcagcaacatgtctagactggccagacagagactgctgggaagaagctggtccgtccctgtgatcagacacctgttcgcccctctgaaggagtacttcgcctgcgtgagcagcggcaacagcaacgccaacagccggggccccagcttctctagcggcctggtgccactgtccctgagagggagccacatgggccccatggagatctacaaaaccgtgagcgcctggaagcggcagcctgtgcgcgtgctgagcctgtttcggaatatcgataaagtcctgaaaagcctgggattcctggagagcggctctggctccggcggtggcaccctgaagtacgtggaggatgtgacaaacgtggtcagacgggatgtggagaagtggggccccttcgatctggtgtacggcagcacccaacccctgggcagctcttgtgaccggtgccctggctggtacatgtttcagttccaccggatcctgcagtacgccctgccgagacaggagtcccagcggccattcttttggattttcatggacaacttgctgctgaccgaggatgaccaggaaactaccactcggttcctgcagaccgaagccgtgaccctgcaggacgtgagaggccgggactaccagaacgccatgcgggtgtggtccaacatccctggactgaaaagcaagcacgcacctctgacccctaaagaagaggagtacctgcaggcccaggtgcggagcagaagcaagctggacgcccctaaggtggatctgctggtgaagaattgcctcctgcccctgagagagtacttcaagtatttcagccagaatagtctgcccctgggcggcccaagcagcggcgcccctcctcccagcggcggcagcccagccggctccccaacctctaccgaggagggcacctctgagtccgccacccccgagagcggccctggcacctccaccgagcccagcgagggcagcgcacccggcagccctgccggcagccccacctccacagaggagggaaccagcaccgagcccagcgaaggcagcgccccaggcaccagcaccgagcctagtgagggcggctctggcggcggcagcgcccaggagattaaacggatcaacaagatcagaagaagacttgtgaaagacagcaacaccaagaaggccggcaagacaggccccatgaaaaccctgctggttagagtgatgacacccgatctgagagagcggctggaaaacctgagaaagaagcctgaaaatatcccccagcccatcagcaatacatctagagccaacctgaataagctgctgaccgattacaccgaaatgaagaaggcgatcctgcatgtgtactgggaagagttccagaaggaccctgtgggcctgatgagccgggtggcccagcctgccagcaagaagatcgatcagaacaagctgaaacctgagatggacgagaagggcaacctgaccaccgccggctttgcctgctctcagtgtggccagcccctgttcgtgtacaagctggagcaggtgtctgagaagggcaaggcttacaccaactacttcggacggtgcaatgtggccgagcacgaaaagctgatcctgctggcccagctgaagcccgagaaggatagcgacgaagccgtgacatatagcctgggaaagtttgggcagagggccctggatttctacagcattcatgtgaccaaggagtccacccaccccgtgaagcccctggcccagatcgccggaaacagatacgcctccggacctgtgggaaaggccctgagcgacgcatgtatgggcacaatcgcctccttcctgtctaagtaccaggacatcatcatcgaacaccagaaggtggtgaagggcaaccagaagagactggagagcctgcgggagctggccggcaaggaaaacctggaataccctagcgtgaccctgccacctcagcctcacaccaaggagggcgttgatgcctacaacgaagtgatcgcccgggtgcgaatgtgggtgaacctgaacctgtggcagaagctgaagctaagcagagatgatgccaagcctctgctgagactgaagggattcccttcctttcctctggtcgagagacaggccaacgaagtggactggtgggacatggtgtgtaacgtgaagaagctgatcaacgagaaaaaggaggatggcaaggtgttttggcagaatctggctggctacaagagacaggaagccctgagaccatacctgagcagcgaggaagatcggaagaagggaaagaaattcgctcggtaccagctgggcgacctgctgctgcacctggaaaagaagcacggcgaggactggggaaaggtgtacgacgaggcctgggagcggattgacaagaaagtggaaggcctgagcaagcacatcaagctggaagaggaacggagaagcgaggacgcccagagcaaggccgccctgaccgactggctgcgggctaaggccagcttcgtgatcgagggcctgaaggaggccgacaaggacgagttctgcagatgcgagctgaagctgcagaagtggtacggggacctgcggggaaagcccttcgccatcgaagccgagaacagcatcctggacatcagcggcttcagcaagcagtacaactgtgccttcatctggcagaaggacggcgtgaagaagctgaacctgtacctgatcatcaactacttcaagggcggcaagctgcggttcaagaagatcaaacctgaagccttcgaagccaacagattctacaccgtgatcaacaaaaagagcggcgagatcgtgcccatggaggtgaacttcaacttcgacgaccccaacctgatcatcctgcctctggcctttggcaagagacagggcagagaattcatctggaacgacctgctgtccctggaaaccggcagcctgaagctggccaacggaagagtgatcgagaagacactgtacaacagaagaacccggcaggatgagcctgccctgttcgtggccctgaccttcgagcggcgggaggtcctggactcctccaatatcaaaccaatgaacctgatcggcgtggcaagaggcgaaaacatccccgccgtgatcgccctgaccgaccccgagggctgcccactgagccggtttaaggatagcctgggaaacccaacccacatcctgagaatcggcgagagctataaggagaagcagcggaccatccaggccaagaaggaggtggagcagcggagagccggcggctacagccggaagtacgccagcaaagccaagaatctggcagacgatatggtgagaaacaccgctagagatctgctgtactacgccgtgacccaggatgccatgctgatcttcgccaacctgagccggggcttcggccggcagggcaagcggaccttcatggccgagagacagtacacacggatggaggactggctgaccgccaagctggcctacgagggcctgagcaagacctacctgtccaagacactggcccagtacacctccaagacatgcagcaactgtgggtttaccatcaccagcgccgactacgacagggtgctggagaagctgaagaagacagcaacaggctggatgaccacaattaacggcaaggagctgaaggtggagggccagattacctactacaacagatacaagagacagaacgtagtcaaggacctgtccgtcgagctggatagactgagcgaagaatctgtgaacaacgacatctcctcctggacaaagggcagaagcggagaagctctgagcctcctgaagaaaagattctcccatagacccgtgcaggagaagttcgtgtgcctgaactgcggcttcgagacacacgcagccgagcaagccgccctgaacatcgccagatcctggctgttcctgcggagccaggagtacaagaaataccagacaaacaagacaaccggcaacaccgataagagagccttcgtcgagacctggcagtccttttaccggaagaagcttaaggaggtgtggaaacctgccgtgcggtctggcggatctggcggaggctccacaagcctgctgaccttcgaggacgtggccgtgagcttcagcgaggaggagtggaagctgctggaccccagccagaagatcctgtacaacgacgtgatgcaggagaactacgagaccgtgatcagcctgggcctgaagctgaagaacgacaccggcaacgaccagcccatcagcctgagcgccctggagatccaggccagcggcggcaaggtgctgaggaaggccaggatgaaggtggcccagaagaccaccagccccaagaaaaagagaaaagtctaagctgccttctgcggggcttgccttctggccatgcccttcttctctcccttgcacctgtacctcttggtctttgaataaagcctgagtaggaaggctagcaaaaaaaaaaaaaaaaaaaaaaaaaaaaaaaaaaaaaaaaaaaaaaaaaaaaaaaaaaaaaaaaaaaaaaaaaaaaaaaa

SEQ ID NO: 3792 - RNA, 5419 nt, synthetic construct
  source 1..5419: mol_type = other RNA
aggaaataagagagaaaagaagagtaagaagaaatataagagccaccatggcccctaagaagaagcgtaaagtgagccgggtgaacggcagcggcagcggcggcggcatgaaccacgaccaggagttcgacccccctaaggtgtaccctcccgtccccgccgagaagagaaagcccatccgggtcctgagcctgttcgatggcatcgccaccggtctgctggtgctgaaggacctgggcatccaggtggataggtacattgcctccgaggtgtgcgaggactccatcaccgtgggaatggtgcgtcatcagggcaagatcatgtacgtgggcgacgtgcggagcgtgacacagaagcatatccaggagtggggccctttcgacctggtgatcggcggcagcccttgcaatgacctgagcatcgtgaacccagcccggaagggcctgtacgagggaaccggcagactgttcttcgagttttacagactgctgcacgacgcccggcctaaggaaggcgacgaccggcccttcttttggctgttcgagaatgtggtggccatgggagtcagcgacaagcgggatattagccggttcctggagagcaaccccgtgatgatcgatgccaaggaagtgagcgccgcccaccgggccagatacttctggggcaatctgcctggcatgaacagacccctggccagcaccgtgaacgacaagctggagctgcaggagtgcctggagcacggccggatcgccaagttcagcaaggtgagaaccatcaccacccgaagcaacagcatcaaacaaggcaaggaccagcactttcctgtgttcatgaacgagaaggaggacatcctgtggtgtaccgagatggagagagtgttcgggttcccagtccactacacagatgtcagcaacatgtctagactggccagacagagactgctgggaagaagctggtccgtccctgtgatcagacacctgttcgcccctctgaaggagtacttcgcctgcgtgagcagcggcaacagcaacgccaacagccggggccccagcttctctagcggcctggtgccactgtccctgagagggagccacatgggccccatggagatctacaaaaccgtgagcgcctggaagcggcagcctgtgcgcgtgctgagcctgtttcggaatatcgataaagtcctgaaaagcctgggattcctggagagcggctctggctccggcggtggcaccctgaagtacgtggaggatgtgacaaacgtggtcagacgggatgtggagaagtggggccccttcgatctggtgtacggcagcacccaacccctgggcagctcttgtgaccggtgccctggctggtacatgtttcagttccaccggatcctgcagtacgccctgccgagacaggagtcccagcggccattcttttggattttcatggacaacttgctgctgaccgaggatgaccaggaaactaccactcggttcctgcagaccgaagccgtgaccctgcaggacgtgagaggccgggactaccagaacgccatgcgggtgtggtccaacatccctggactgaaaagcaagcacgcacctctgacccctaaagaagaggagtacctgcaggcccaggtgcggagcagaagcaagctggacgcccctaaggtggatctgctggtgaagaattgcctcctgcccctgagagagtacttcaagtatttcagccagaatagtctgcccctgggcggcccaagcagcggcgcccctcctcccagcggcggcagcccagccggctccccaacctctaccgaggagggcacctctgagtccgccacccccgagagcggccctggcacctccaccgagcccagcgagggcagcgcacccggcagccctgccggcagccccacctccacagaggagggaaccagcaccgagcccagcgaaggcagcgccccaggcaccagcaccgagcctagtgagggcggctctggcggcggcagcgcccaggagattaaacggatcaacaagatcagaagaagacttgtgaaagacagcaacaccaagaaggccggcaagacaggccccatgaaaaccctgctggttagagtgatgacacccgatctgagagagcggctggaaaacctgagaaagaagcctgaaaatatcccccagcccatcagcaatacatctagagccaacctgaataagctgctgaccgattacaccgaaatgaagaaggcgatcctgcatgtgtactgggaagagttccagaaggaccctgtgggcctgatgagccgggtggcccagcctgccagcaagaagatcgatcagaacaagctgaaacctgagatggacgagaagggcaacctgaccaccgccggctttgcctgctctcagtgtggccagcccctgttcgtgtacaagctggagcaggtgtctgagaagggcaaggcttacaccaactacttcggacggtgcaatgtggccgagcacgaaaagctgatcctgctggcccagctgaagcccgagaaggatagcgacgaagccgtgacatatagcctgggaaagtttgggcagagggccctggatttctacagcattcatgtgaccaaggagtccacccaccccgtgaagcccctggcccagatcgccggaaacagatacgcctccggacctgtgggaaaggccctgagcgacgcatgtatgggcacaatcgcctccttcctgtctaagtaccaggacatcatcatcgaacaccagaaggtggtgaagggcaaccagaagagactggagagcctgcgggagctggccggcaaggaaaacctggaataccctagcgtgaccctgccacctcagcctcacaccaaggagggcgttgatgcctacaacgaagtgatcgcccgggtgcgaatgtgggtgaacctgaacctgtggcagaagctgaagctaagcagagatgatgccaagcctctgctgagactgaagggattcccttcctttcctctggtcgagagacaggccaacgaagtggactggtgggacatggtgtgtaacgtgaagaagctgatcaacgagaaaaaggaggatggcaaggtgttttggcagaatctggctggctacaagagacaggaagccctgagaccatacctgagcagcgaggaagatcggaagaagggaaagaaattcgctcggtaccagctgggcgacctgctgctgcacctggaaaagaagcacggcgaggactggggaaaggtgtacgacgaggcctgggagcggattgacaagaaagtggaaggcctgagcaagcacatcaagctggaagaggaacggagaagcgaggacgcccagagcaaggccgccctgaccgactggctgcgggctaaggccagcttcgtgatcgagggcctgaaggaggccgacaaggacgagttctgcagatgcgagctgaagctgcagaagtggtacggggacctgcggggaaagcccttcgccatcgaagccgagaacagcatcctggacatcagcggcttcagcaagcagtacaactgtgccttcatctggcagaaggacggcgtgaagaagctgaacctgtacctgatcatcaactacttcaagggcggcaagctgcggttcaagaagatcaaacctgaagccttcgaagccaacagattctacaccgtgatcaacaaaaagagcggcgagatcgtgcccatggaggtgaacttcaacttcgacgaccccaacctgatcatcctgcctctggcctttggcaagagacagggcagagaattcatctggaacgacctgctgtccctggaaaccggcagcctgaagctggccaacggaagagtgatcgagaagacactgtacaacagaagaacccggcaggatgagcctgccctgttcgtggccctgaccttcgagcggcgggaggtcctggactcctccaatatcaaaccaatgaacctgatcggcgtggcaagaggcgaaaacatccccgccgtgatcgccctgaccgaccccgagggctgcccactgagccggtttaaggatagcctgggaaacccaacccacatcctgagaatcggcgagagctataaggagaagcagcggaccatccaggccaagaaggaggtggagcagcggagagccggcggctacagccggaagtacgccagcaaagccaagaatctggcagacgatatggtgagaaacaccgctagagatctgctgtactacgccgtgacccaggatgccatgctgatcttcgccaacctgagccggggcttcggccggcagggcaagcggaccttcatggccgagagacagtacacacggatggaggactggctgaccgccaagctggcctacgagggcctgagcaagacctacctgtccaagacactggcccagtacacctccaagacatgcagcaactgtgggtttaccatcaccagcgccgactacgacagggtgctggagaagctgaagaagacagcaacaggctggatgaccacaattaacggcaaggagctgaaggtggagggccagattacctactacaacagatacaagagacagaacgtagtcaaggacctgtccgtcgagctggatagactgagcgaagaatctgtgaacaacgacatctcctcctggacaaagggcagaagcggagaagctctgagcctcctgaagaaaagattctcccatagacccgtgcaggagaagttcgtgtgcctgaactgcggcttcgagacacacgcagccgagcaagccgccctgaacatcgccagatcctggctgttcctgcggagccaggagtacaagaaataccagacaaacaagacaaccggcaacaccgataagagagccttcgtcgagacctggcagtccttttaccggaagaagcttaaggaggtgtggaaacctgccgtgcggtctggcggatctggcggaggctccacaagcgagcccgtgaccttcaaggacgtggccgtggtgttcagcgaggaggagctgggcctgctggacagcgtgcagaggaagctgtacagggacgtgaccctggagaacttcaggaacctggtgagcgtgggccacctgttcagcaagcccgacgtgatcagccagctggagagggaggagcagctgtggatgaccgagatccagacccagaggggcggccacagcgccgagaactgcgccgccaggaccagccccaagaaaaagagaaaagtctaagctgccttctgcggggcttgccttctggccatgcccttcttctctcccttgcacctgtacctcttggtctttgaataaagcctgagtaggaaggctagcaaaaaaaaaaaaaaaaaaaaaaaaaaaaaaaaaaaaaaaaaaaaaaaaaaaaaaaaaaaaaaaaaaaaaaaaaaaaaaaa

SEQ ID NO: 3793 - RNA, 5419 nt, synthetic construct
  source 1..5419: mol_type = other RNA
aggaaataagagagaaaagaagagtaagaagaaatataagagccaccatggcccctaagaagaagcgtaaagtgagccgggtgaacggcagcggcagcggcggcggcatgaaccacgaccaggagttcgacccccctaaggtgtaccctcccgtccccgccgagaagagaaagcccatccgggtcctgagcctgttcgatggcatcgccaccggtctgctggtgctgaaggacctgggcatccaggtggataggtacattgcctccgaggtgtgcgaggactccatcaccgtgggaatggtgcgtcatcagggcaagatcatgtacgtgggcgacgtgcggagcgtgacacagaagcatatccaggagtggggccctttcgacctggtgatcggcggcagcccttgcaatgacctgagcatcgtgaacccagcccggaagggcctgtacgagggaaccggcagactgttcttcgagttttacagactgctgcacgacgcccggcctaaggaaggcgacgaccggcccttcttttggctgttcgagaatgtggtggccatgggagtcagcgacaagcgggatattagccggttcctggagagcaaccccgtgatgatcgatgccaaggaagtgagcgccgcccaccgggccagatacttctggggcaatctgcctggcatgaacagacccctggccagcaccgtgaacgacaagctggagctgcaggagtgcctggagcacggccggatcgccaagttcagcaaggtgagaaccatcaccacccgaagcaacagcatcaaacaaggcaaggaccagcactttcctgtgttcatgaacgagaaggaggacatcctgtggtgtaccgagatggagagagtgttcgggttcccagtccactacacagatgtcagcaacatgtctagactggccagacagagactgctgggaagaagctggtccgtccctgtgatcagacacctgttcgcccctctgaaggagtacttcgcctgcgtgagcagcggcaacagcaacgccaacagccggggccccagcttctctagcggcctggtgccactgtccctgagagggagccacatgggccccatggagatctacaaaaccgtgagcgcctggaagcggcagcctgtgcgcgtgctgagcctgtttcggaatatcgataaagtcctgaaaagcctgggattcctggagagcggctctggctccggcggtggcaccctgaagtacgtggaggatgtgacaaacgtggtcagacgggatgtggagaagtggggccccttcgatctggtgtacggcagcacccaacccctgggcagctcttgtgaccggtgccctggctggtacatgtttcagttccaccggatcctgcagtacgccctgccgagacaggagtcccagcggccattcttttggattttcatggacaacttgctgctgaccgaggatgaccaggaaactaccactcggttcctgcagaccgaagccgtgaccctgcaggacgtgagaggccgggactaccagaacgccatgcgggtgtggtccaacatccctggactgaaaagcaagcacgcacctctgacccctaaagaagaggagtacctgcaggcccaggtgcggagcagaagcaagctggacgcccctaaggtggatctgctggtgaagaattgcctcctgcccctgagagagtacttcaagtatttcagccagaatagtctgcccctgggcggcccaagcagcggcgcccctcctcccagcggcggcagcccagccggctccccaacctctaccgaggagggcacctctgagtccgccacccccgagagcggccctggcacctccaccgagcccagcgagggcagcgcacccggcagccctgccggcagccccacctccacagaggagggaaccagcaccgagcccagcgaaggcagcgccccaggcaccagcaccgagcctagtgagggcggctctggcggcggcagcgcccaggagattaaacggatcaacaagatcagaagaagacttgtgaaagacagcaacaccaagaaggccggcaagacaggccccatgaaaaccctgctggttagagtgatgacacccgatctgagagagcggctggaaaacctgagaaagaagcctgaaaatatcccccagcccatcagcaatacatctagagccaacctgaataagctgctgaccgattacaccgaaatgaagaaggcgatcctgcatgtgtactgggaagagttccagaaggaccctgtgggcctgatgagccgggtggcccagcctgccagcaagaagatcgatcagaacaagctgaaacctgagatggacgagaagggcaacctgaccaccgccggctttgcctgctctcagtgtggccagcccctgttcgtgtacaagctggagcaggtgtctgagaagggcaaggcttacaccaactacttcggacggtgcaatgtggccgagcacgaaaagctgatcctgctggcccagctgaagcccgagaaggatagcgacgaagccgtgacatatagcctgggaaagtttgggcagagggccctggatttctacagcattcatgtgaccaaggagtccacccaccccgtgaagcccctggcccagatcgccggaaacagatacgcctccggacctgtgggaaaggccctgagcgacgcatgtatgggcacaatcgcctccttcctgtctaagtaccaggacatcatcatcgaacaccagaaggtggtgaagggcaaccagaagagactggagagcctgcgggagctggccggcaaggaaaacctggaataccctagcgtgaccctgccacctcagcctcacaccaaggagggcgttgatgcctacaacgaagtgatcgcccgggtgcgaatgtgggtgaacctgaacctgtggcagaagctgaagctaagcagagatgatgccaagcctctgctgagactgaagggattcccttcctttcctctggtcgagagacaggccaacgaagtggactggtgggacatggtgtgtaacgtgaagaagctgatcaacgagaaaaaggaggatggcaaggtgttttggcagaatctggctggctacaagagacaggaagccctgagaccatacctgagcagcgaggaagatcggaagaagggaaagaaattcgctcggtaccagctgggcgacctgctgctgcacctggaaaagaagcacggcgaggactggggaaaggtgtacgacgaggcctgggagcggattgacaagaaagtggaaggcctgagcaagcacatcaagctggaagaggaacggagaagcgaggacgcccagagcaaggccgccctgaccgactggctgcgggctaaggccagcttcgtgatcgagggcctgaaggaggccgacaaggacgagttctgcagatgcgagctgaagctgcagaagtggtacggggacctgcggggaaagcccttcgccatcgaagccgagaacagcatcctggacatcagcggcttcagcaagcagtacaactgtgccttcatctggcagaaggacggcgtgaagaagctgaacctgtacctgatcatcaactacttcaagggcggcaagctgcggttcaagaagatcaaacctgaagccttcgaagccaacagattctacaccgtgatcaacaaaaagagcggcgagatcgtgcccatggaggtgaacttcaacttcgacgaccccaacctgatcatcctgcctctggcctttggcaagagacagggcagagaattcatctggaacgacctgctgtccctggaaaccggcagcctgaagctggccaacggaagagtgatcgagaagacactgtacaacagaagaacccggcaggatgagcctgccctgttcgtggccctgaccttcgagcggcgggaggtcctggactcctccaatatcaaaccaatgaacctgatcggcgtggcaagaggcgaaaacatccccgccgtgatcgccctgaccgaccccgagggctgcccactgagccggtttaaggatagcctgggaaacccaacccacatcctgagaatcggcgagagctataaggagaagcagcggaccatccaggccaagaaggaggtggagcagcggagagccggcggctacagccggaagtacgccagcaaagccaagaatctggcagacgatatggtgagaaacaccgctagagatctgctgtactacgccgtgacccaggatgccatgctgatcttcgccaacctgagccggggcttcggccggcagggcaagcggaccttcatggccgagagacagtacacacggatggaggactggctgaccgccaagctggcctacgagggcctgagcaagacctacctgtccaagacactggcccagtacacctccaagacatgcagcaactgtgggtttaccatcaccagcgccgactacgacagggtgctggagaagctgaagaagacagcaacaggctggatgaccacaattaacggcaaggagctgaaggtggagggccagattacctactacaacagatacaagagacagaacgtagtcaaggacctgtccgtcgagctggatagactgagcgaagaatctgtgaacaacgacatctcctcctggacaaagggcagaagcggagaagctctgagcctcctgaagaaaagattctcccatagacccgtgcaggagaagttcgtgtgcctgaactgcggcttcgagacacacgcagccgagcaagccgccctgaacatcgccagatcctggctgttcctgcggagccaggagtacaagaaataccagacaaacaagacaaccggcaacaccgataagagagccttcgtcgagacctggcagtccttttaccggaagaagcttaaggaggtgtggaaacctgccgtgcggtctggcggatctggcggaggctccacaagcttccagggcctggtgaccttccaggacgtggccgtgatcttcagcctggacgagtggggccacctggaccccgcccagagggagctgtacagggaggtgatgctggagaactaccagaccctggcctgcctgggcctggccgtgagcaagcccgacgtgatcgcccagctggagcagggcggcgccccctggaagctggagaaggacatccccgccagcccctgccccggcgagcagtacgtgaccagccccaagaaaaagagaaaagtctaagctgccttctgcggggcttgccttctggccatgcccttcttctctcccttgcacctgtacctcttggtctttgaataaagcctgagtaggaaggctagcaaaaaaaaaaaaaaaaaaaaaaaaaaaaaaaaaaaaaaaaaaaaaaaaaaaaaaaaaaaaaaaaaaaaaaaaaaaaaaaa

SEQ ID NO: 3794 - RNA, 5419 nt, synthetic construct
  source 1..5419: mol_type = other RNA
aggaaataagagagaaaagaagagtaagaagaaatataagagccaccatggcccctaagaagaagcgtaaagtgagccgggtgaacggcagcggcagcggcggcggcatgaaccacgaccaggagttcgacccccctaaggtgtaccctcccgtccccgccgagaagagaaagcccatccgggtcctgagcctgttcgatggcatcgccaccggtctgctggtgctgaaggacctgggcatccaggtggataggtacattgcctccgaggtgtgcgaggactccatcaccgtgggaatggtgcgtcatcagggcaagatcatgtacgtgggcgacgtgcggagcgtgacacagaagcatatccaggagtggggccctttcgacctggtgatcggcggcagcccttgcaatgacctgagcatcgtgaacccagcccggaagggcctgtacgagggaaccggcagactgttcttcgagttttacagactgctgcacgacgcccggcctaaggaaggcgacgaccggcccttcttttggctgttcgagaatgtggtggccatgggagtcagcgacaagcgggatattagccggttcctggagagcaaccccgtgatgatcgatgccaaggaagtgagcgccgcccaccgggccagatacttctggggcaatctgcctggcatgaacagacccctggccagcaccgtgaacgacaagctggagctgcaggagtgcctggagcacggccggatcgccaagttcagcaaggtgagaaccatcaccacccgaagcaacagcatcaaacaaggcaaggaccagcactttcctgtgttcatgaacgagaaggaggacatcctgtggtgtaccgagatggagagagtgttcgggttcccagtccactacacagatgtcagcaacatgtctagactggccagacagagactgctgggaagaagctggtccgtccctgtgatcagacacctgttcgcccctctgaaggagtacttcgcctgcgtgagcagcggcaacagcaacgccaacagccggggccccagcttctctagcggcctggtgccactgtccctgagagggagccacatgggccccatggagatctacaaaaccgtgagcgcctggaagcggcagcctgtgcgcgtgctgagcctgtttcggaatatcgataaagtcctgaaaagcctgggattcctggagagcggctctggctccggcggtggcaccctgaagtacgtggaggatgtgacaaacgtggtcagacgggatgtggagaagtggggccccttcgatctggtgtacggcagcacccaacccctgggcagctcttgtgaccggtgccctggctggtacatgtttcagttccaccggatcctgcagtacgccctgccgagacaggagtcccagcggccattcttttggattttcatggacaacttgctgctgaccgaggatgaccaggaaactaccactcggttcctgcagaccgaagccgtgaccctgcaggacgtgagaggccgggactaccagaacgccatgcgggtgtggtccaacatccctggactgaaaagcaagcacgcacctctgacccctaaagaagaggagtacctgcaggcccaggtgcggagcagaagcaagctggacgcccctaaggtggatctgctggtgaagaattgcctcctgcccctgagagagtacttcaagtatttcagccagaatagtctgcccctgggcggcccaagcagcggcgcccctcctcccagcggcggcagcccagccggctccccaacctctaccgaggagggcacctctgagtccgccacccccgagagcggccctggcacctccaccgagcccagcgagggcagcgcacccggcagccctgccggcagccccacctccacagaggagggaaccagcaccgagcccagcgaaggcagcgccccaggcaccagcaccgagcctagtgagggcggctctggcggcggcagcgcccaggagattaaacggatcaacaagatcagaagaagacttgtgaaagacagcaacaccaagaaggccggcaagacaggccccatgaaaaccctgctggttagagtgatgacacccgatctgagagagcggctggaaaacctgagaaagaagcctgaaaatatcccccagcccatcagcaatacatctagagccaacctgaataagctgctgaccgattacaccgaaatgaagaaggcgatcctgcatgtgtactgggaagagttccagaaggaccctgtgggcctgatgagccgggtggcccagcctgccagcaagaagatcgatcagaacaagctgaaacctgagatggacgagaagggcaacctgaccaccgccggctttgcctgctctcagtgtggccagcccctgttcgtgtacaagctggagcaggtgtctgagaagggcaaggcttacaccaactacttcggacggtgcaatgtggccgagcacgaaaagctgatcctgctggcccagctgaagcccgagaaggatagcgacgaagccgtgacatatagcctgggaaagtttgggcagagggccctggatttctacagcattcatgtgaccaaggagtccacccaccccgtgaagcccctggcccagatcgccggaaacagatacgcctccggacctgtgggaaaggccctgagcgacgcatgtatgggcacaatcgcctccttcctgtctaagtaccaggacatcatcatcgaacaccagaaggtggtgaagggcaaccagaagagactggagagcctgcgggagctggccggcaaggaaaacctggaataccctagcgtgaccctgccacctcagcctcacaccaaggagggcgttgatgcctacaacgaagtgatcgcccgggtgcgaatgtgggtgaacctgaacctgtggcagaagctgaagctaagcagagatgatgccaagcctctgctgagactgaagggattcccttcctttcctctggtcgagagacaggccaacgaagtggactggtgggacatggtgtgtaacgtgaagaagctgatcaacgagaaaaaggaggatggcaaggtgttttggcagaatctggctggctacaagagacaggaagccctgagaccatacctgagcagcgaggaagatcggaagaagggaaagaaattcgctcggtaccagctgggcgacctgctgctgcacctggaaaagaagcacggcgaggactggggaaaggtgtacgacgaggcctgggagcggattgacaagaaagtggaaggcctgagcaagcacatcaagctggaagaggaacggagaagcgaggacgcccagagcaaggccgccctgaccgactggctgcgggctaaggccagcttcgtgatcgagggcctgaaggaggccgacaaggacgagttctgcagatgcgagctgaagctgcagaagtggtacggggacctgcggggaaagcccttcgccatcgaagccgagaacagcatcctggacatcagcggcttcagcaagcagtacaactgtgccttcatctggcagaaggacggcgtgaagaagctgaacctgtacctgatcatcaactacttcaagggcggcaagctgcggttcaagaagatcaaacctgaagccttcgaagccaacagattctacaccgtgatcaacaaaaagagcggcgagatcgtgcccatggaggtgaacttcaacttcgacgaccccaacctgatcatcctgcctctggcctttggcaagagacagggcagagaattcatctggaacgacctgctgtccctggaaaccggcagcctgaagctggccaacggaagagtgatcgagaagacactgtacaacagaagaacccggcaggatgagcctgccctgttcgtggccctgaccttcgagcggcgggaggtcctggactcctccaatatcaaaccaatgaacctgatcggcgtggcaagaggcgaaaacatccccgccgtgatcgccctgaccgaccccgagggctgcccactgagccggtttaaggatagcctgggaaacccaacccacatcctgagaatcggcgagagctataaggagaagcagcggaccatccaggccaagaaggaggtggagcagcggagagccggcggctacagccggaagtacgccagcaaagccaagaatctggcagacgatatggtgagaaacaccgctagagatctgctgtactacgccgtgacccaggatgccatgctgatcttcgccaacctgagccggggcttcggccggcagggcaagcggaccttcatggccgagagacagtacacacggatggaggactggctgaccgccaagctggcctacgagggcctgagcaagacctacctgtccaagacactggcccagtacacctccaagacatgcagcaactgtgggtttaccatcaccagcgccgactacgacagggtgctggagaagctgaagaagacagcaacaggctggatgaccacaattaacggcaaggagctgaaggtggagggccagattacctactacaacagatacaagagacagaacgtagtcaaggacctgtccgtcgagctggatagactgagcgaagaatctgtgaacaacgacatctcctcctggacaaagggcagaagcggagaagctctgagcctcctgaagaaaagattctcccatagacccgtgcaggagaagttcgtgtgcctgaactgcggcttcgagacacacgcagccgagcaagccgccctgaacatcgccagatcctggctgttcctgcggagccaggagtacaagaaataccagacaaacaagacaaccggcaacaccgataagagagccttcgtcgagacctggcagtccttttaccggaagaagcttaaggaggtgtggaaacctgccgtgcggtctggcggatctggcggaggctccacaagcacccagggccaggtgaccttcagggacgtggccatcgagttcagccaggaggagtggacctgcctggaccccgcccagaggagcctgtacagggacgtgatgctggagaactacaggaacctggccagcctgggcatcagctgcttcgacctgagcatcatcagcatgctggagcagaggaaggagcccttcaccctggagagccaggtgcagatcgccggcaaccccgacggctgggagtggaccagccccaagaaaaagagaaaagtctaagctgccttctgcggggcttgccttctggccatgcccttcttctctcccttgcacctgtacctcttggtctttgaataaagcctgagtaggaaggctagcaaaaaaaaaaaaaaaaaaaaaaaaaaaaaaaaaaaaaaaaaaaaaaaaaaaaaaaaaaaaaaaaaaaaaaaaaaaaaaaa

SEQ ID NO: 3795 - RNA, 5419 nt, synthetic construct
  source 1..5419: mol_type = other RNA
aggaaataagagagaaaagaagagtaagaagaaatataagagccaccatggcccctaagaagaagcgtaaagtgagccgggtgaacggcagcggcagcggcggcggcatgaaccacgaccaggagttcgacccccctaaggtgtaccctcccgtccccgccgagaagagaaagcccatccgggtcctgagcctgttcgatggcatcgccaccggtctgctggtgctgaaggacctgggcatccaggtggataggtacattgcctccgaggtgtgcgaggactccatcaccgtgggaatggtgcgtcatcagggcaagatcatgtacgtgggcgacgtgcggagcgtgacacagaagcatatccaggagtggggccctttcgacctggtgatcggcggcagcccttgcaatgacctgagcatcgtgaacccagcccggaagggcctgtacgagggaaccggcagactgttcttcgagttttacagactgctgcacgacgcccggcctaaggaaggcgacgaccggcccttcttttggctgttcgagaatgtggtggccatgggagtcagcgacaagcgggatattagccggttcctggagagcaaccccgtgatgatcgatgccaaggaagtgagcgccgcccaccgggccagatacttctggggcaatctgcctggcatgaacagacccctggccagcaccgtgaacgacaagctggagctgcaggagtgcctggagcacggccggatcgccaagttcagcaaggtgagaaccatcaccacccgaagcaacagcatcaaacaaggcaaggaccagcactttcctgtgttcatgaacgagaaggaggacatcctgtggtgtaccgagatggagagagtgttcgggttcccagtccactacacagatgtcagcaacatgtctagactggccagacagagactgctgggaagaagctggtccgtccctgtgatcagacacctgttcgcccctctgaaggagtacttcgcctgcgtgagcagcggcaacagcaacgccaacagccggggccccagcttctctagcggcctggtgccactgtccctgagagggagccacatgggccccatggagatctacaaaaccgtgagcgcctggaagcggcagcctgtgcgcgtgctgagcctgtttcggaatatcgataaagtcctgaaaagcctgggattcctggagagcggctctggctccggcggtggcaccctgaagtacgtggaggatgtgacaaacgtggtcagacgggatgtggagaagtggggccccttcgatctggtgtacggcagcacccaacccctgggcagctcttgtgaccggtgccctggctggtacatgtttcagttccaccggatcctgcagtacgccctgccgagacaggagtcccagcggccattcttttggattttcatggacaacttgctgctgaccgaggatgaccaggaaactaccactcggttcctgcagaccgaagccgtgaccctgcaggacgtgagaggccgggactaccagaacgccatgcgggtgtggtccaacatccctggactgaaaagcaagcacgcacctctgacccctaaagaagaggagtacctgcaggcccaggtgcggagcagaagcaagctggacgcccctaaggtggatctgctggtgaagaattgcctcctgcccctgagagagtacttcaagtatttcagccagaatagtctgcccctgggcggcccaagcagcggcgcccctcctcccagcggcggcagcccagccggctccccaacctctaccgaggagggcacctctgagtccgccacccccgagagcggccctggcacctccaccgagcccagcgagggcagcgcacccggcagccctgccggcagccccacctccacagaggagggaaccagcaccgagcccagcgaaggcagcgccccaggcaccagcaccgagcctagtgagggcggctctggcggcggcagcgcccaggagattaaacggatcaacaagatcagaagaagacttgtgaaagacagcaacaccaagaaggccggcaagacaggccccatgaaaaccctgctggttagagtgatgacacccgatctgagagagcggctggaaaacctgagaaagaagcctgaaaatatcccccagcccatcagcaatacatctagagccaacctgaataagctgctgaccgattacaccgaaatgaagaaggcgatcctgcatgtgtactgggaagagttccagaaggaccctgtgggcctgatgagccgggtggcccagcctgccagcaagaagatcgatcagaacaagctgaaacctgagatggacgagaagggcaacctgaccaccgccggctttgcctgctctcagtgtggccagcccctgttcgtgtacaagctggagcaggtgtctgagaagggcaaggcttacaccaactacttcggacggtgcaatgtggccgagcacgaaaagctgatcctgctggcccagctgaagcccgagaaggatagcgacgaagccgtgacatatagcctgggaaagtttgggcagagggccctggatttctacagcattcatgtgaccaaggagtccacccaccccgtgaagcccctggcccagatcgccggaaacagatacgcctccggacctgtgggaaaggccctgagcgacgcatgtatgggcacaatcgcctccttcctgtctaagtaccaggacatcatcatcgaacaccagaaggtggtgaagggcaaccagaagagactggagagcctgcgggagctggccggcaaggaaaacctggaataccctagcgtgaccctgccacctcagcctcacaccaaggagggcgttgatgcctacaacgaagtgatcgcccgggtgcgaatgtgggtgaacctgaacctgtggcagaagctgaagctaagcagagatgatgccaagcctctgctgagactgaagggattcccttcctttcctctggtcgagagacaggccaacgaagtggactggtgggacatggtgtgtaacgtgaagaagctgatcaacgagaaaaaggaggatggcaaggtgttttggcagaatctggctggctacaagagacaggaagccctgagaccatacctgagcagcgaggaagatcggaagaagggaaagaaattcgctcggtaccagctgggcgacctgctgctgcacctggaaaagaagcacggcgaggactggggaaaggtgtacgacgaggcctgggagcggattgacaagaaagtggaaggcctgagcaagcacatcaagctggaagaggaacggagaagcgaggacgcccagagcaaggccgccctgaccgactggctgcgggctaaggccagcttcgtgatcgagggcctgaaggaggccgacaaggacgagttctgcagatgcgagctgaagctgcagaagtggtacggggacctgcggggaaagcccttcgccatcgaagccgagaacagcatcctggacatcagcggcttcagcaagcagtacaactgtgccttcatctggcagaaggacggcgtgaagaagctgaacctgtacctgatcatcaactacttcaagggcggcaagctgcggttcaagaagatcaaacctgaagccttcgaagccaacagattctacaccgtgatcaacaaaaagagcggcgagatcgtgcccatggaggtgaacttcaacttcgacgaccccaacctgatcatcctgcctctggcctttggcaagagacagggcagagaattcatctggaacgacctgctgtccctggaaaccggcagcctgaagctggccaacggaagagtgatcgagaagacactgtacaacagaagaacccggcaggatgagcctgccctgttcgtggccctgaccttcgagcggcgggaggtcctggactcctccaatatcaaaccaatgaacctgatcggcgtggcaagaggcgaaaacatccccgccgtgatcgccctgaccgaccccgagggctgcccactgagccggtttaaggatagcctgggaaacccaacccacatcctgagaatcggcgagagctataaggagaagcagcggaccatccaggccaagaaggaggtggagcagcggagagccggcggctacagccggaagtacgccagcaaagccaagaatctggcagacgatatggtgagaaacaccgctagagatctgctgtactacgccgtgacccaggatgccatgctgatcttcgccaacctgagccggggcttcggccggcagggcaagcggaccttcatggccgagagacagtacacacggatggaggactggctgaccgccaagctggcctacgagggcctgagcaagacctacctgtccaagacactggcccagtacacctccaagacatgcagcaactgtgggtttaccatcaccagcgccgactacgacagggtgctggagaagctgaagaagacagcaacaggctggatgaccacaattaacggcaaggagctgaaggtggagggccagattacctactacaacagatacaagagacagaacgtagtcaaggacctgtccgtcgagctggatagactgagcgaagaatctgtgaacaacgacatctcctcctggacaaagggcagaagcggagaagctctgagcctcctgaagaaaagattctcccatagacccgtgcaggagaagttcgtgtgcctgaactgcggcttcgagacacacgcagccgagcaagccgccctgaacatcgccagatcctggctgttcctgcggagccaggagtacaagaaataccagacaaacaagacaaccggcaacaccgataagagagccttcgtcgagacctggcagtccttttaccggaagaagcttaaggaggtgtggaaacctgccgtgcggtctggcggatctggcggaggctccacaagcgacagggtgaagttcaccttcagcgacgtggccgtgtacttcagcgaggaggagtggcagctgctggaggagcagcagaaggagctgtacaggaacgtgatgaaggagaactacaccaccctgaccagcctgggctacaccaccgtgaagcccgacgtgatcagcaagatcgagcagggcaagcagcccagcgtgagcagccccagcggcagcaagggcaggagggccgtgggcaggcccaccaccagccccaagaaaaagagaaaagtctaagctgccttctgcggggcttgccttctggccatgcccttcttctctcccttgcacctgtacctcttggtctttgaataaagcctgagtaggaaggctagcaaaaaaaaaaaaaaaaaaaaaaaaaaaaaaaaaaaaaaaaaaaaaaaaaaaaaaaaaaaaaaaaaaaaaaaaaaaaaaaa

SEQ ID NO: 3796 - RNA, 5419 nt, synthetic construct
  source 1..5419: mol_type = other RNA
aggaaataagagagaaaagaagagtaagaagaaatataagagccaccatggcccctaagaagaagcgtaaagtgagccgggtgaacggcagcggcagcggcggcggcatgaaccacgaccaggagttcgacccccctaaggtgtaccctcccgtccccgccgagaagagaaagcccatccgggtcctgagcctgttcgatggcatcgccaccggtctgctggtgctgaaggacctgggcatccaggtggataggtacattgcctccgaggtgtgcgaggactccatcaccgtgggaatggtgcgtcatcagggcaagatcatgtacgtgggcgacgtgcggagcgtgacacagaagcatatccaggagtggggccctttcgacctggtgatcggcggcagcccttgcaatgacctgagcatcgtgaacccagcccggaagggcctgtacgagggaaccggcagactgttcttcgagttttacagactgctgcacgacgcccggcctaaggaaggcgacgaccggcccttcttttggctgttcgagaatgtggtggccatgggagtcagcgacaagcgggatattagccggttcctggagagcaaccccgtgatgatcgatgccaaggaagtgagcgccgcccaccgggccagatacttctggggcaatctgcctggcatgaacagacccctggccagcaccgtgaacgacaagctggagctgcaggagtgcctggagcacggccggatcgccaagttcagcaaggtgagaaccatcaccacccgaagcaacagcatcaaacaaggcaaggaccagcactttcctgtgttcatgaacgagaaggaggacatcctgtggtgtaccgagatggagagagtgttcgggttcccagtccactacacagatgtcagcaacatgtctagactggccagacagagactgctgggaagaagctggtccgtccctgtgatcagacacctgttcgcccctctgaaggagtacttcgcctgcgtgagcagcggcaacagcaacgccaacagccggggccccagcttctctagcggcctggtgccactgtccctgagagggagccacatgggccccatggagatctacaaaaccgtgagcgcctggaagcggcagcctgtgcgcgtgctgagcctgtttcggaatatcgataaagtcctgaaaagcctgggattcctggagagcggctctggctccggcggtggcaccctgaagtacgtggaggatgtgacaaacgtggtcagacgggatgtggagaagtggggccccttcgatctggtgtacggcagcacccaacccctgggcagctcttgtgaccggtgccctggctggtacatgtttcagttccaccggatcctgcagtacgccctgccgagacaggagtcccagcggccattcttttggattttcatggacaacttgctgctgaccgaggatgaccaggaaactaccactcggttcctgcagaccgaagccgtgaccctgcaggacgtgagaggccgggactaccagaacgccatgcgggtgtggtccaacatccctggactgaaaagcaagcacgcacctctgacccctaaagaagaggagtacctgcaggcccaggtgcggagcagaagcaagctggacgcccctaaggtggatctgctggtgaagaattgcctcctgcccctgagagagtacttcaagtatttcagccagaatagtctgcccctgggcggcccaagcagcggcgcccctcctcccagcggcggcagcccagccggctccccaacctctaccgaggagggcacctctgagtccgccacccccgagagcggccctggcacctccaccgagcccagcgagggcagcgcacccggcagccctgccggcagccccacctccacagaggagggaaccagcaccgagcccagcgaaggcagcgccccaggcaccagcaccgagcctagtgagggcggctctggcggcggcagcgcccaggagattaaacggatcaacaagatcagaagaagacttgtgaaagacagcaacaccaagaaggccggcaagacaggccccatgaaaaccctgctggttagagtgatgacacccgatctgagagagcggctggaaaacctgagaaagaagcctgaaaatatcccccagcccatcagcaatacatctagagccaacctgaataagctgctgaccgattacaccgaaatgaagaaggcgatcctgcatgtgtactgggaagagttccagaaggaccctgtgggcctgatgagccgggtggcccagcctgccagcaagaagatcgatcagaacaagctgaaacctgagatggacgagaagggcaacctgaccaccgccggctttgcctgctctcagtgtggccagcccctgttcgtgtacaagctggagcaggtgtctgagaagggcaaggcttacaccaactacttcggacggtgcaatgtggccgagcacgaaaagctgatcctgctggcccagctgaagcccgagaaggatagcgacgaagccgtgacatatagcctgggaaagtttgggcagagggccctggatttctacagcattcatgtgaccaaggagtccacccaccccgtgaagcccctggcccagatcgccggaaacagatacgcctccggacctgtgggaaaggccctgagcgacgcatgtatgggcacaatcgcctccttcctgtctaagtaccaggacatcatcatcgaacaccagaaggtggtgaagggcaaccagaagagactggagagcctgcgggagctggccggcaaggaaaacctggaataccctagcgtgaccctgccacctcagcctcacaccaaggagggcgttgatgcctacaacgaagtgatcgcccgggtgcgaatgtgggtgaacctgaacctgtggcagaagctgaagctaagcagagatgatgccaagcctctgctgagactgaagggattcccttcctttcctctggtcgagagacaggccaacgaagtggactggtgggacatggtgtgtaacgtgaagaagctgatcaacgagaaaaaggaggatggcaaggtgttttggcagaatctggctggctacaagagacaggaagccctgagaccatacctgagcagcgaggaagatcggaagaagggaaagaaattcgctcggtaccagctgggcgacctgctgctgcacctggaaaagaagcacggcgaggactggggaaaggtgtacgacgaggcctgggagcggattgacaagaaagtggaaggcctgagcaagcacatcaagctggaagaggaacggagaagcgaggacgcccagagcaaggccgccctgaccgactggctgcgggctaaggccagcttcgtgatcgagggcctgaaggaggccgacaaggacgagttctgcagatgcgagctgaagctgcagaagtggtacggggacctgcggggaaagcccttcgccatcgaagccgagaacagcatcctggacatcagcggcttcagcaagcagtacaactgtgccttcatctggcagaaggacggcgtgaagaagctgaacctgtacctgatcatcaactacttcaagggcggcaagctgcggttcaagaagatcaaacctgaagccttcgaagccaacagattctacaccgtgatcaacaaaaagagcggcgagatcgtgcccatggaggtgaacttcaacttcgacgaccccaacctgatcatcctgcctctggcctttggcaagagacagggcagagaattcatctggaacgacctgctgtccctggaaaccggcagcctgaagctggccaacggaagagtgatcgagaagacactgtacaacagaagaacccggcaggatgagcctgccctgttcgtggccctgaccttcgagcggcgggaggtcctggactcctccaatatcaaaccaatgaacctgatcggcgtggcaagaggcgaaaacatccccgccgtgatcgccctgaccgaccccgagggctgcccactgagccggtttaaggatagcctgggaaacccaacccacatcctgagaatcggcgagagctataaggagaagcagcggaccatccaggccaagaaggaggtggagcagcggagagccggcggctacagccggaagtacgccagcaaagccaagaatctggcagacgatatggtgagaaacaccgctagagatctgctgtactacgccgtgacccaggatgccatgctgatcttcgccaacctgagccggggcttcggccggcagggcaagcggaccttcatggccgagagacagtacacacggatggaggactggctgaccgccaagctggcctacgagggcctgagcaagacctacctgtccaagacactggcccagtacacctccaagacatgcagcaactgtgggtttaccatcaccagcgccgactacgacagggtgctggagaagctgaagaagacagcaacaggctggatgaccacaattaacggcaaggagctgaaggtggagggccagattacctactacaacagatacaagagacagaacgtagtcaaggacctgtccgtcgagctggatagactgagcgaagaatctgtgaacaacgacatctcctcctggacaaagggcagaagcggagaagctctgagcctcctgaagaaaagattctcccatagacccgtgcaggagaagttcgtgtgcctgaactgcggcttcgagacacacgcagccgagcaagccgccctgaacatcgccagatcctggctgttcctgcggagccaggagtacaagaaataccagacaaacaagacaaccggcaacaccgataagagagccttcgtcgagacctggcagtccttttaccggaagaagcttaaggaggtgtggaaacctgccgtgcggtctggcggatctggcggaggctccacaagcagccagcacctggtgaccttcgaggacgtggccgtgaacttcacccaggaggagtggaccctgctggaccagacccagagggacctgtacagggacgtgatgctggagaactaccagaacctgatggccctggccggcagcgagagctgcaagccccacgtgaacagccccctggagggcgccgaggagctgaggaccagggccaggaggatcctgcagagcgagttcatggccgagagcgacaccagccccaagaaaaagagaaaagtctaagctgccttctgcggggcttgccttctggccatgcccttcttctctcccttgcacctgtacctcttggtctttgaataaagcctgagtaggaaggctagcaaaaaaaaaaaaaaaaaaaaaaaaaaaaaaaaaaaaaaaaaaaaaaaaaaaaaaaaaaaaaaaaaaaaaaaaaaaaaaaa

SEQ ID NO: 3797 - RNA, 5419 nt, synthetic construct
  source 1..5419: mol_type = other RNA
aggaaataagagagaaaagaagagtaagaagaaatataagagccaccatggcccctaagaagaagcgtaaagtgagccgggtgaacggcagcggcagcggcggcggcatgaaccacgaccaggagttcgacccccctaaggtgtaccctcccgtccccgccgagaagagaaagcccatccgggtcctgagcctgttcgatggcatcgccaccggtctgctggtgctgaaggacctgggcatccaggtggataggtacattgcctccgaggtgtgcgaggactccatcaccgtgggaatggtgcgtcatcagggcaagatcatgtacgtgggcgacgtgcggagcgtgacacagaagcatatccaggagtggggccctttcgacctggtgatcggcggcagcccttgcaatgacctgagcatcgtgaacccagcccggaagggcctgtacgagggaaccggcagactgttcttcgagttttacagactgctgcacgacgcccggcctaaggaaggcgacgaccggcccttcttttggctgttcgagaatgtggtggccatgggagtcagcgacaagcgggatattagccggttcctggagagcaaccccgtgatgatcgatgccaaggaagtgagcgccgcccaccgggccagatacttctggggcaatctgcctggcatgaacagacccctggccagcaccgtgaacgacaagctggagctgcaggagtgcctggagcacggccggatcgccaagttcagcaaggtgagaaccatcaccacccgaagcaacagcatcaaacaaggcaaggaccagcactttcctgtgttcatgaacgagaaggaggacatcctgtggtgtaccgagatggagagagtgttcgggttcccagtccactacacagatgtcagcaacatgtctagactggccagacagagactgctgggaagaagctggtccgtccctgtgatcagacacctgttcgcccctctgaaggagtacttcgcctgcgtgagcagcggcaacagcaacgccaacagccggggccccagcttctctagcggcctggtgccactgtccctgagagggagccacatgggccccatggagatctacaaaaccgtgagcgcctggaagcggcagcctgtgcgcgtgctgagcctgtttcggaatatcgataaagtcctgaaaagcctgggattcctggagagcggctctggctccggcggtggcaccctgaagtacgtggaggatgtgacaaacgtggtcagacgggatgtggagaagtggggccccttcgatctggtgtacggcagcacccaacccctgggcagctcttgtgaccggtgccctggctggtacatgtttcagttccaccggatcctgcagtacgccctgccgagacaggagtcccagcggccattcttttggattttcatggacaacttgctgctgaccgaggatgaccaggaaactaccactcggttcctgcagaccgaagccgtgaccctgcaggacgtgagaggccgggactaccagaacgccatgcgggtgtggtccaacatccctggactgaaaagcaagcacgcacctctgacccctaaagaagaggagtacctgcaggcccaggtgcggagcagaagcaagctggacgcccctaaggtggatctgctggtgaagaattgcctcctgcccctgagagagtacttcaagtatttcagccagaatagtctgcccctgggcggcccaagcagcggcgcccctcctcccagcggcggcagcccagccggctccccaacctctaccgaggagggcacctctgagtccgccacccccgagagcggccctggcacctccaccgagcccagcgagggcagcgcacccggcagccctgccggcagccccacctccacagaggagggaaccagcaccgagcccagcgaaggcagcgccccaggcaccagcaccgagcctagtgagggcggctctggcggcggcagcgcccaggagattaaacggatcaacaagatcagaagaagacttgtgaaagacagcaacaccaagaaggccggcaagacaggccccatgaaaaccctgctggttagagtgatgacacccgatctgagagagcggctggaaaacctgagaaagaagcctgaaaatatcccccagcccatcagcaatacatctagagccaacctgaataagctgctgaccgattacaccgaaatgaagaaggcgatcctgcatgtgtactgggaagagttccagaaggaccctgtgggcctgatgagccgggtggcccagcctgccagcaagaagatcgatcagaacaagctgaaacctgagatggacgagaagggcaacctgaccaccgccggctttgcctgctctcagtgtggccagcccctgttcgtgtacaagctggagcaggtgtctgagaagggcaaggcttacaccaactacttcggacggtgcaatgtggccgagcacgaaaagctgatcctgctggcccagctgaagcccgagaaggatagcgacgaagccgtgacatatagcctgggaaagtttgggcagagggccctggatttctacagcattcatgtgaccaaggagtccacccaccccgtgaagcccctggcccagatcgccggaaacagatacgcctccggacctgtgggaaaggccctgagcgacgcatgtatgggcacaatcgcctccttcctgtctaagtaccaggacatcatcatcgaacaccagaaggtggtgaagggcaaccagaagagactggagagcctgcgggagctggccggcaaggaaaacctggaataccctagcgtgaccctgccacctcagcctcacaccaaggagggcgttgatgcctacaacgaagtgatcgcccgggtgcgaatgtgggtgaacctgaacctgtggcagaagctgaagctaagcagagatgatgccaagcctctgctgagactgaagggattcccttcctttcctctggtcgagagacaggccaacgaagtggactggtgggacatggtgtgtaacgtgaagaagctgatcaacgagaaaaaggaggatggcaaggtgttttggcagaatctggctggctacaagagacaggaagccctgagaccatacctgagcagcgaggaagatcggaagaagggaaagaaattcgctcggtaccagctgggcgacctgctgctgcacctggaaaagaagcacggcgaggactggggaaaggtgtacgacgaggcctgggagcggattgacaagaaagtggaaggcctgagcaagcacatcaagctggaagaggaacggagaagcgaggacgcccagagcaaggccgccctgaccgactggctgcgggctaaggccagcttcgtgatcgagggcctgaaggaggccgacaaggacgagttctgcagatgcgagctgaagctgcagaagtggtacggggacctgcggggaaagcccttcgccatcgaagccgagaacagcatcctggacatcagcggcttcagcaagcagtacaactgtgccttcatctggcagaaggacggcgtgaagaagctgaacctgtacctgatcatcaactacttcaagggcggcaagctgcggttcaagaagatcaaacctgaagccttcgaagccaacagattctacaccgtgatcaacaaaaagagcggcgagatcgtgcccatggaggtgaacttcaacttcgacgaccccaacctgatcatcctgcctctggcctttggcaagagacagggcagagaattcatctggaacgacctgctgtccctggaaaccggcagcctgaagctggccaacggaagagtgatcgagaagacactgtacaacagaagaacccggcaggatgagcctgccctgttcgtggccctgaccttcgagcggcgggaggtcctggactcctccaatatcaaaccaatgaacctgatcggcgtggcaagaggcgaaaacatccccgccgtgatcgccctgaccgaccccgagggctgcccactgagccggtttaaggatagcctgggaaacccaacccacatcctgagaatcggcgagagctataaggagaagcagcggaccatccaggccaagaaggaggtggagcagcggagagccggcggctacagccggaagtacgccagcaaagccaagaatctggcagacgatatggtgagaaacaccgctagagatctgctgtactacgccgtgacccaggatgccatgctgatcttcgccaacctgagccggggcttcggccggcagggcaagcggaccttcatggccgagagacagtacacacggatggaggactggctgaccgccaagctggcctacgagggcctgagcaagacctacctgtccaagacactggcccagtacacctccaagacatgcagcaactgtgggtttaccatcaccagcgccgactacgacagggtgctggagaagctgaagaagacagcaacaggctggatgaccacaattaacggcaaggagctgaaggtggagggccagattacctactacaacagatacaagagacagaacgtagtcaaggacctgtccgtcgagctggatagactgagcgaagaatctgtgaacaacgacatctcctcctggacaaagggcagaagcggagaagctctgagcctcctgaagaaaagattctcccatagacccgtgcaggagaagttcgtgtgcctgaactgcggcttcgagacacacgcagccgagcaagccgccctgaacatcgccagatcctggctgttcctgcggagccaggagtacaagaaataccagacaaacaagacaaccggcaacaccgataagagagccttcgtcgagacctggcagtccttttaccggaagaagcttaaggaggtgtggaaacctgccgtgcggtctggcggatctggcggaggctccacaagctgcgagggcctggtgagcttcgaggacgtgaccatggacttcagcagggaggagtggcagcagctggaccccgcccagaggtgcctgtactgggacgtgatgctggagatctacagccacctgctgagcgtgggctaccacatccccaaccccgagatcatcagcaggatggagaagggcaagaagagctggatcaggggcgcccagctgccccaccagaggcacagggaggtggtgttcggcaccagccccaagaaaaagagaaaagtctaagctgccttctgcggggcttgccttctggccatgcccttcttctctcccttgcacctgtacctcttggtctttgaataaagcctgagtaggaaggctagcaaaaaaaaaaaaaaaaaaaaaaaaaaaaaaaaaaaaaaaaaaaaaaaaaaaaaaaaaaaaaaaaaaaaaaaaaaaaaaaa

SEQ ID NO: 3798 - RNA, 5419 nt, synthetic construct
  source 1..5419: mol_type = other RNA
aggaaataagagagaaaagaagagtaagaagaaatataagagccaccatggcccctaagaagaagcgtaaagtgagccgggtgaacggcagcggcagcggcggcggcatgaaccacgaccaggagttcgacccccctaaggtgtaccctcccgtccccgccgagaagagaaagcccatccgggtcctgagcctgttcgatggcatcgccaccggtctgctggtgctgaaggacctgggcatccaggtggataggtacattgcctccgaggtgtgcgaggactccatcaccgtgggaatggtgcgtcatcagggcaagatcatgtacgtgggcgacgtgcggagcgtgacacagaagcatatccaggagtggggccctttcgacctggtgatcggcggcagcccttgcaatgacctgagcatcgtgaacccagcccggaagggcctgtacgagggaaccggcagactgttcttcgagttttacagactgctgcacgacgcccggcctaaggaaggcgacgaccggcccttcttttggctgttcgagaatgtggtggccatgggagtcagcgacaagcgggatattagccggttcctggagagcaaccccgtgatgatcgatgccaaggaagtgagcgccgcccaccgggccagatacttctggggcaatctgcctggcatgaacagacccctggccagcaccgtgaacgacaagctggagctgcaggagtgcctggagcacggccggatcgccaagttcagcaaggtgagaaccatcaccacccgaagcaacagcatcaaacaaggcaaggaccagcactttcctgtgttcatgaacgagaaggaggacatcctgtggtgtaccgagatggagagagtgttcgggttcccagtccactacacagatgtcagcaacatgtctagactggccagacagagactgctgggaagaagctggtccgtccctgtgatcagacacctgttcgcccctctgaaggagtacttcgcctgcgtgagcagcggcaacagcaacgccaacagccggggccccagcttctctagcggcctggtgccactgtccctgagagggagccacatgggccccatggagatctacaaaaccgtgagcgcctggaagcggcagcctgtgcgcgtgctgagcctgtttcggaatatcgataaagtcctgaaaagcctgggattcctggagagcggctctggctccggcggtggcaccctgaagtacgtggaggatgtgacaaacgtggtcagacgggatgtggagaagtggggccccttcgatctggtgtacggcagcacccaacccctgggcagctcttgtgaccggtgccctggctggtacatgtttcagttccaccggatcctgcagtacgccctgccgagacaggagtcccagcggccattcttttggattttcatggacaacttgctgctgaccgaggatgaccaggaaactaccactcggttcctgcagaccgaagccgtgaccctgcaggacgtgagaggccgggactaccagaacgccatgcgggtgtggtccaacatccctggactgaaaagcaagcacgcacctctgacccctaaagaagaggagtacctgcaggcccaggtgcggagcagaagcaagctggacgcccctaaggtggatctgctggtgaagaattgcctcctgcccctgagagagtacttcaagtatttcagccagaatagtctgcccctgggcggcccaagcagcggcgcccctcctcccagcggcggcagcccagccggctccccaacctctaccgaggagggcacctctgagtccgccacccccgagagcggccctggcacctccaccgagcccagcgagggcagcgcacccggcagccctgccggcagccccacctccacagaggagggaaccagcaccgagcccagcgaaggcagcgccccaggcaccagcaccgagcctagtgagggcggctctggcggcggcagcgcccaggagattaaacggatcaacaagatcagaagaagacttgtgaaagacagcaacaccaagaaggccggcaagacaggccccatgaaaaccctgctggttagagtgatgacacccgatctgagagagcggctggaaaacctgagaaagaagcctgaaaatatcccccagcccatcagcaatacatctagagccaacctgaataagctgctgaccgattacaccgaaatgaagaaggcgatcctgcatgtgtactgggaagagttccagaaggaccctgtgggcctgatgagccgggtggcccagcctgccagcaagaagatcgatcagaacaagctgaaacctgagatggacgagaagggcaacctgaccaccgccggctttgcctgctctcagtgtggccagcccctgttcgtgtacaagctggagcaggtgtctgagaagggcaaggcttacaccaactacttcggacggtgcaatgtggccgagcacgaaaagctgatcctgctggcccagctgaagcccgagaaggatagcgacgaagccgtgacatatagcctgggaaagtttgggcagagggccctggatttctacagcattcatgtgaccaaggagtccacccaccccgtgaagcccctggcccagatcgccggaaacagatacgcctccggacctgtgggaaaggccctgagcgacgcatgtatgggcacaatcgcctccttcctgtctaagtaccaggacatcatcatcgaacaccagaaggtggtgaagggcaaccagaagagactggagagcctgcgggagctggccggcaaggaaaacctggaataccctagcgtgaccctgccacctcagcctcacaccaaggagggcgttgatgcctacaacgaagtgatcgcccgggtgcgaatgtgggtgaacctgaacctgtggcagaagctgaagctaagcagagatgatgccaagcctctgctgagactgaagggattcccttcctttcctctggtcgagagacaggccaacgaagtggactggtgggacatggtgtgtaacgtgaagaagctgatcaacgagaaaaaggaggatggcaaggtgttttggcagaatctggctggctacaagagacaggaagccctgagaccatacctgagcagcgaggaagatcggaagaagggaaagaaattcgctcggtaccagctgggcgacctgctgctgcacctggaaaagaagcacggcgaggactggggaaaggtgtacgacgaggcctgggagcggattgacaagaaagtggaaggcctgagcaagcacatcaagctggaagaggaacggagaagcgaggacgcccagagcaaggccgccctgaccgactggctgcgggctaaggccagcttcgtgatcgagggcctgaaggaggccgacaaggacgagttctgcagatgcgagctgaagctgcagaagtggtacggggacctgcggggaaagcccttcgccatcgaagccgagaacagcatcctggacatcagcggcttcagcaagcagtacaactgtgccttcatctggcagaaggacggcgtgaagaagctgaacctgtacctgatcatcaactacttcaagggcggcaagctgcggttcaagaagatcaaacctgaagccttcgaagccaacagattctacaccgtgatcaacaaaaagagcggcgagatcgtgcccatggaggtgaacttcaacttcgacgaccccaacctgatcatcctgcctctggcctttggcaagagacagggcagagaattcatctggaacgacctgctgtccctggaaaccggcagcctgaagctggccaacggaagagtgatcgagaagacactgtacaacagaagaacccggcaggatgagcctgccctgttcgtggccctgaccttcgagcggcgggaggtcctggactcctccaatatcaaaccaatgaacctgatcggcgtggcaagaggcgaaaacatccccgccgtgatcgccctgaccgaccccgagggctgcccactgagccggtttaaggatagcctgggaaacccaacccacatcctgagaatcggcgagagctataaggagaagcagcggaccatccaggccaagaaggaggtggagcagcggagagccggcggctacagccggaagtacgccagcaaagccaagaatctggcagacgatatggtgagaaacaccgctagagatctgctgtactacgccgtgacccaggatgccatgctgatcttcgccaacctgagccggggcttcggccggcagggcaagcggaccttcatggccgagagacagtacacacggatggaggactggctgaccgccaagctggcctacgagggcctgagcaagacctacctgtccaagacactggcccagtacacctccaagacatgcagcaactgtgggtttaccatcaccagcgccgactacgacagggtgctggagaagctgaagaagacagcaacaggctggatgaccacaattaacggcaaggagctgaaggtggagggccagattacctactacaacagatacaagagacagaacgtagtcaaggacctgtccgtcgagctggatagactgagcgaagaatctgtgaacaacgacatctcctcctggacaaagggcagaagcggagaagctctgagcctcctgaagaaaagattctcccatagacccgtgcaggagaagttcgtgtgcctgaactgcggcttcgagacacacgcagccgagcaagccgccctgaacatcgccagatcctggctgttcctgcggagccaggagtacaagaaataccagacaaacaagacaaccggcaacaccgataagagagccttcgtcgagacctggcagtccttttaccggaagaagcttaaggaggtgtggaaacctgccgtgcggtctggcggatctggcggaggctccacaagcttccaggagcccgtgaccttcgaggacgtggccgtgtacttcacccagaacgagtgggccagcctgcaccccacccagagggccctgtacagggaggtgatgctggagaactacgccaacgtgaccagcctgagcgccttccccttccccaagcccgacctgatcttccagctggagcagggcgaggccgcctggggccccgacccctggaccctggccggcggcgaggccctgaggggcatgaccagccccaagaaaaagagaaaagtctaagctgccttctgcggggcttgccttctggccatgcccttcttctctcccttgcacctgtacctcttggtctttgaataaagcctgagtaggaaggctagcaaaaaaaaaaaaaaaaaaaaaaaaaaaaaaaaaaaaaaaaaaaaaaaaaaaaaaaaaaaaaaaaaaaaaaaaaaaaaaaa

SEQ ID NO: 3799 - RNA, 5416 nt, synthetic construct
  source 1..5416: mol_type = other RNA
aggaaataagagagaaaagaagagtaagaagaaatataagagccaccatggcccctaagaagaagcgtaaagtgagccgggtgaacggcagcggcagcggcggcggcatgaaccacgaccaggagttcgacccccctaaggtgtaccctcccgtccccgccgagaagagaaagcccatccgggtcctgagcctgttcgatggcatcgccaccggtctgctggtgctgaaggacctgggcatccaggtggataggtacattgcctccgaggtgtgcgaggactccatcaccgtgggaatggtgcgtcatcagggcaagatcatgtacgtgggcgacgtgcggagcgtgacacagaagcatatccaggagtggggccctttcgacctggtgatcggcggcagcccttgcaatgacctgagcatcgtgaacccagcccggaagggcctgtacgagggaaccggcagactgttcttcgagttttacagactgctgcacgacgcccggcctaaggaaggcgacgaccggcccttcttttggctgttcgagaatgtggtggccatgggagtcagcgacaagcgggatattagccggttcctggagagcaaccccgtgatgatcgatgccaaggaagtgagcgccgcccaccgggccagatacttctggggcaatctgcctggcatgaacagacccctggccagcaccgtgaacgacaagctggagctgcaggagtgcctggagcacggccggatcgccaagttcagcaaggtgagaaccatcaccacccgaagcaacagcatcaaacaaggcaaggaccagcactttcctgtgttcatgaacgagaaggaggacatcctgtggtgtaccgagatggagagagtgttcgggttcccagtccactacacagatgtcagcaacatgtctagactggccagacagagactgctgggaagaagctggtccgtccctgtgatcagacacctgttcgcccctctgaaggagtacttcgcctgcgtgagcagcggcaacagcaacgccaacagccggggccccagcttctctagcggcctggtgccactgtccctgagagggagccacatgggccccatggagatctacaaaaccgtgagcgcctggaagcggcagcctgtgcgcgtgctgagcctgtttcggaatatcgataaagtcctgaaaagcctgggattcctggagagcggctctggctccggcggtggcaccctgaagtacgtggaggatgtgacaaacgtggtcagacgggatgtggagaagtggggccccttcgatctggtgtacggcagcacccaacccctgggcagctcttgtgaccggtgccctggctggtacatgtttcagttccaccggatcctgcagtacgccctgccgagacaggagtcccagcggccattcttttggattttcatggacaacttgctgctgaccgaggatgaccaggaaactaccactcggttcctgcagaccgaagccgtgaccctgcaggacgtgagaggccgggactaccagaacgccatgcgggtgtggtccaacatccctggactgaaaagcaagcacgcacctctgacccctaaagaagaggagtacctgcaggcccaggtgcggagcagaagcaagctggacgcccctaaggtggatctgctggtgaagaattgcctcctgcccctgagagagtacttcaagtatttcagccagaatagtctgcccctgggcggcccaagcagcggcgcccctcctcccagcggcggcagcccagccggctccccaacctctaccgaggagggcacctctgagtccgccacccccgagagcggccctggcacctccaccgagcccagcgagggcagcgcacccggcagccctgccggcagccccacctccacagaggagggaaccagcaccgagcccagcgaaggcagcgccccaggcaccagcaccgagcctagtgagggcggctctggcggcggcagcgcccaggagattaaacggatcaacaagatcagaagaagacttgtgaaagacagcaacaccaagaaggccggcaagacaggccccatgaaaaccctgctggttagagtgatgacacccgatctgagagagcggctggaaaacctgagaaagaagcctgaaaatatcccccagcccatcagcaatacatctagagccaacctgaataagctgctgaccgattacaccgaaatgaagaaggcgatcctgcatgtgtactgggaagagttccagaaggaccctgtgggcctgatgagccgggtggcccagcctgccagcaagaagatcgatcagaacaagctgaaacctgagatggacgagaagggcaacctgaccaccgccggctttgcctgctctcagtgtggccagcccctgttcgtgtacaagctggagcaggtgtctgagaagggcaaggcttacaccaactacttcggacggtgcaatgtggccgagcacgaaaagctgatcctgctggcccagctgaagcccgagaaggatagcgacgaagccgtgacatatagcctgggaaagtttgggcagagggccctggatttctacagcattcatgtgaccaaggagtccacccaccccgtgaagcccctggcccagatcgccggaaacagatacgcctccggacctgtgggaaaggccctgagcgacgcatgtatgggcacaatcgcctccttcctgtctaagtaccaggacatcatcatcgaacaccagaaggtggtgaagggcaaccagaagagactggagagcctgcgggagctggccggcaaggaaaacctggaataccctagcgtgaccctgccacctcagcctcacaccaaggagggcgttgatgcctacaacgaagtgatcgcccgggtgcgaatgtgggtgaacctgaacctgtggcagaagctgaagctaagcagagatgatgccaagcctctgctgagactgaagggattcccttcctttcctctggtcgagagacaggccaacgaagtggactggtgggacatggtgtgtaacgtgaagaagctgatcaacgagaaaaaggaggatggcaaggtgttttggcagaatctggctggctacaagagacaggaagccctgagaccatacctgagcagcgaggaagatcggaagaagggaaagaaattcgctcggtaccagctgggcgacctgctgctgcacctggaaaagaagcacggcgaggactggggaaaggtgtacgacgaggcctgggagcggattgacaagaaagtggaaggcctgagcaagcacatcaagctggaagaggaacggagaagcgaggacgcccagagcaaggccgccctgaccgactggctgcgggctaaggccagcttcgtgatcgagggcctgaaggaggccgacaaggacgagttctgcagatgcgagctgaagctgcagaagtggtacggggacctgcggggaaagcccttcgccatcgaagccgagaacagcatcctggacatcagcggcttcagcaagcagtacaactgtgccttcatctggcagaaggacggcgtgaagaagctgaacctgtacctgatcatcaactacttcaagggcggcaagctgcggttcaagaagatcaaacctgaagccttcgaagccaacagattctacaccgtgatcaacaaaaagagcggcgagatcgtgcccatggaggtgaacttcaacttcgacgaccccaacctgatcatcctgcctctggcctttggcaagagacagggcagagaattcatctggaacgacctgctgtccctggaaaccggcagcctgaagctggccaacggaagagtgatcgagaagacactgtacaacagaagaacccggcaggatgagcctgccctgttcgtggccctgaccttcgagcggcgggaggtcctggactcctccaatatcaaaccaatgaacctgatcggcgtggcaagaggcgaaaacatccccgccgtgatcgccctgaccgaccccgagggctgcccactgagccggtttaaggatagcctgggaaacccaacccacatcctgagaatcggcgagagctataaggagaagcagcggaccatccaggccaagaaggaggtggagcagcggagagccggcggctacagccggaagtacgccagcaaagccaagaatctggcagacgatatggtgagaaacaccgctagagatctgctgtactacgccgtgacccaggatgccatgctgatcttcgccaacctgagccggggcttcggccggcagggcaagcggaccttcatggccgagagacagtacacacggatggaggactggctgaccgccaagctggcctacgagggcctgagcaagacctacctgtccaagacactggcccagtacacctccaagacatgcagcaactgtgggtttaccatcaccagcgccgactacgacagggtgctggagaagctgaagaagacagcaacaggctggatgaccacaattaacggcaaggagctgaaggtggagggccagattacctactacaacagatacaagagacagaacgtagtcaaggacctgtccgtcgagctggatagactgagcgaagaatctgtgaacaacgacatctcctcctggacaaagggcagaagcggagaagctctgagcctcctgaagaaaagattctcccatagacccgtgcaggagaagttcgtgtgcctgaactgcggcttcgagacacacgcagccgagcaagccgccctgaacatcgccagatcctggctgttcctgcggagccaggagtacaagaaataccagacaaacaagacaaccggcaacaccgataagagagccttcgtcgagacctggcagtccttttaccggaagaagcttaaggaggtgtggaaacctgccgtgcggtctggcggatctggcggaggctccacaagcaacatgagccaggccagcgtgagcttccaggacgtgaccgtggagttcaccagagaggagtggcagcacctgggccccgtggagagaaccctgtacagagacgtgatgctggagaactacagccacctgatcagcgtgggctactgcatcaccaagcccaaggtgatcagcaagctggagaagggcgaggagccctggagcctggaggacgagttcctgaaccagagataccccggctacaccagccccaagaaaaagagaaaagtctaagctgccttctgcggggcttgccttctggccatgcccttcttctctcccttgcacctgtacctcttggtctttgaataaagcctgagtaggaaggctagcaaaaaaaaaaaaaaaaaaaaaaaaaaaaaaaaaaaaaaaaaaaaaaaaaaaaaaaaaaaaaaaaaaaaaaaaaaaaaaaa

SEQ ID NO: 3800 - RNA, 5419 nt, synthetic construct
  source 1..5419: mol_type = other RNA
aggaaataagagagaaaagaagagtaagaagaaatataagagccaccatggcccctaagaagaagcgtaaagtgagccgggtgaacggcagcggcagcggcggcggcatgaaccacgaccaggagttcgacccccctaaggtgtaccctcccgtccccgccgagaagagaaagcccatccgggtcctgagcctgttcgatggcatcgccaccggtctgctggtgctgaaggacctgggcatccaggtggataggtacattgcctccgaggtgtgcgaggactccatcaccgtgggaatggtgcgtcatcagggcaagatcatgtacgtgggcgacgtgcggagcgtgacacagaagcatatccaggagtggggccctttcgacctggtgatcggcggcagcccttgcaatgacctgagcatcgtgaacccagcccggaagggcctgtacgagggaaccggcagactgttcttcgagttttacagactgctgcacgacgcccggcctaaggaaggcgacgaccggcccttcttttggctgttcgagaatgtggtggccatgggagtcagcgacaagcgggatattagccggttcctggagagcaaccccgtgatgatcgatgccaaggaagtgagcgccgcccaccgggccagatacttctggggcaatctgcctggcatgaacagacccctggccagcaccgtgaacgacaagctggagctgcaggagtgcctggagcacggccggatcgccaagttcagcaaggtgagaaccatcaccacccgaagcaacagcatcaaacaaggcaaggaccagcactttcctgtgttcatgaacgagaaggaggacatcctgtggtgtaccgagatggagagagtgttcgggttcccagtccactacacagatgtcagcaacatgtctagactggccagacagagactgctgggaagaagctggtccgtccctgtgatcagacacctgttcgcccctctgaaggagtacttcgcctgcgtgagcagcggcaacagcaacgccaacagccggggccccagcttctctagcggcctggtgccactgtccctgagagggagccacatgggccccatggagatctacaaaaccgtgagcgcctggaagcggcagcctgtgcgcgtgctgagcctgtttcggaatatcgataaagtcctgaaaagcctgggattcctggagagcggctctggctccggcggtggcaccctgaagtacgtggaggatgtgacaaacgtggtcagacgggatgtggagaagtggggccccttcgatctggtgtacggcagcacccaacccctgggcagctcttgtgaccggtgccctggctggtacatgtttcagttccaccggatcctgcagtacgccctgccgagacaggagtcccagcggccattcttttggattttcatggacaacttgctgctgaccgaggatgaccaggaaactaccactcggttcctgcagaccgaagccgtgaccctgcaggacgtgagaggccgggactaccagaacgccatgcgggtgtggtccaacatccctggactgaaaagcaagcacgcacctctgacccctaaagaagaggagtacctgcaggcccaggtgcggagcagaagcaagctggacgcccctaaggtggatctgctggtgaagaattgcctcctgcccctgagagagtacttcaagtatttcagccagaatagtctgcccctgggcggcccaagcagcggcgcccctcctcccagcggcggcagcccagccggctccccaacctctaccgaggagggcacctctgagtccgccacccccgagagcggccctggcacctccaccgagcccagcgagggcagcgcacccggcagccctgccggcagccccacctccacagaggagggaaccagcaccgagcccagcgaaggcagcgccccaggcaccagcaccgagcctagtgagggcggctctggcggcggcagcgcccaggagattaaacggatcaacaagatcagaagaagacttgtgaaagacagcaacaccaagaaggccggcaagacaggccccatgaaaaccctgctggttagagtgatgacacccgatctgagagagcggctggaaaacctgagaaagaagcctgaaaatatcccccagcccatcagcaatacatctagagccaacctgaataagctgctgaccgattacaccgaaatgaagaaggcgatcctgcatgtgtactgggaagagttccagaaggaccctgtgggcctgatgagccgggtggcccagcctgccagcaagaagatcgatcagaacaagctgaaacctgagatggacgagaagggcaacctgaccaccgccggctttgcctgctctcagtgtggccagcccctgttcgtgtacaagctggagcaggtgtctgagaagggcaaggcttacaccaactacttcggacggtgcaatgtggccgagcacgaaaagctgatcctgctggcccagctgaagcccgagaaggatagcgacgaagccgtgacatatagcctgggaaagtttgggcagagggccctggatttctacagcattcatgtgaccaaggagtccacccaccccgtgaagcccctggcccagatcgccggaaacagatacgcctccggacctgtgggaaaggccctgagcgacgcatgtatgggcacaatcgcctccttcctgtctaagtaccaggacatcatcatcgaacaccagaaggtggtgaagggcaaccagaagagactggagagcctgcgggagctggccggcaaggaaaacctggaataccctagcgtgaccctgccacctcagcctcacaccaaggagggcgttgatgcctacaacgaagtgatcgcccgggtgcgaatgtgggtgaacctgaacctgtggcagaagctgaagctaagcagagatgatgccaagcctctgctgagactgaagggattcccttcctttcctctggtcgagagacaggccaacgaagtggactggtgggacatggtgtgtaacgtgaagaagctgatcaacgagaaaaaggaggatggcaaggtgttttggcagaatctggctggctacaagagacaggaagccctgagaccatacctgagcagcgaggaagatcggaagaagggaaagaaattcgctcggtaccagctgggcgacctgctgctgcacctggaaaagaagcacggcgaggactggggaaaggtgtacgacgaggcctgggagcggattgacaagaaagtggaaggcctgagcaagcacatcaagctggaagaggaacggagaagcgaggacgcccagagcaaggccgccctgaccgactggctgcgggctaaggccagcttcgtgatcgagggcctgaaggaggccgacaaggacgagttctgcagatgcgagctgaagctgcagaagtggtacggggacctgcggggaaagcccttcgccatcgaagccgagaacagcatcctggacatcagcggcttcagcaagcagtacaactgtgccttcatctggcagaaggacggcgtgaagaagctgaacctgtacctgatcatcaactacttcaagggcggcaagctgcggttcaagaagatcaaacctgaagccttcgaagccaacagattctacaccgtgatcaacaaaaagagcggcgagatcgtgcccatggaggtgaacttcaacttcgacgaccccaacctgatcatcctgcctctggcctttggcaagagacagggcagagaattcatctggaacgacctgctgtccctggaaaccggcagcctgaagctggccaacggaagagtgatcgagaagacactgtacaacagaagaacccggcaggatgagcctgccctgttcgtggccctgaccttcgagcggcgggaggtcctggactcctccaatatcaaaccaatgaacctgatcggcgtggcaagaggcgaaaacatccccgccgtgatcgccctgaccgaccccgagggctgcccactgagccggtttaaggatagcctgggaaacccaacccacatcctgagaatcggcgagagctataaggagaagcagcggaccatccaggccaagaaggaggtggagcagcggagagccggcggctacagccggaagtacgccagcaaagccaagaatctggcagacgatatggtgagaaacaccgctagagatctgctgtactacgccgtgacccaggatgccatgctgatcttcgccaacctgagccggggcttcggccggcagggcaagcggaccttcatggccgagagacagtacacacggatggaggactggctgaccgccaagctggcctacgagggcctgagcaagacctacctgtccaagacactggcccagtacacctccaagacatgcagcaactgtgggtttaccatcaccagcgccgactacgacagggtgctggagaagctgaagaagacagcaacaggctggatgaccacaattaacggcaaggagctgaaggtggagggccagattacctactacaacagatacaagagacagaacgtagtcaaggacctgtccgtcgagctggatagactgagcgaagaatctgtgaacaacgacatctcctcctggacaaagggcagaagcggagaagctctgagcctcctgaagaaaagattctcccatagacccgtgcaggagaagttcgtgtgcctgaactgcggcttcgagacacacgcagccgagcaagccgccctgaacatcgccagatcctggctgttcctgcggagccaggagtacaagaaataccagacaaacaagacaaccggcaacaccgataagagagccttcgtcgagacctggcagtccttttaccggaagaagcttaaggaggtgtggaaacctgccgtgcggtctggcggatctggcggaggctccacaagcctgaaggacctggtgaccttcaaggacgtggccatcgacttcagccaggaggagtggcagtggatgaaccccgcccagaagcacctgtacaggagcatgatgctggagaactaccagagcctggtgagcctgggcctgtgcatcagcaagccctacgtgatcagcctgctggagcagggcagggagccctgggagatgaccagcgagatgaccaggagccccttcagcgactgggagagcatcaccagccccaagaaaaagagaaaagtctaagctgccttctgcggggcttgccttctggccatgcccttcttctctcccttgcacctgtacctcttggtctttgaataaagcctgagtaggaaggctagcaaaaaaaaaaaaaaaaaaaaaaaaaaaaaaaaaaaaaaaaaaaaaaaaaaaaaaaaaaaaaaaaaaaaaaaaaaaaaaaa

SEQ ID NO: 3801 - RNA, 5419 nt, synthetic construct
  source 1..5419: mol_type = other RNA
aggaaataagagagaaaagaagagtaagaagaaatataagagccaccatggcccctaagaagaagcgtaaagtgagccgggtgaacggcagcggcagcggcggcggcatgaaccacgaccaggagttcgacccccctaaggtgtaccctcccgtccccgccgagaagagaaagcccatccgggtcctgagcctgttcgatggcatcgccaccggtctgctggtgctgaaggacctgggcatccaggtggataggtacattgcctccgaggtgtgcgaggactccatcaccgtgggaatggtgcgtcatcagggcaagatcatgtacgtgggcgacgtgcggagcgtgacacagaagcatatccaggagtggggccctttcgacctggtgatcggcggcagcccttgcaatgacctgagcatcgtgaacccagcccggaagggcctgtacgagggaaccggcagactgttcttcgagttttacagactgctgcacgacgcccggcctaaggaaggcgacgaccggcccttcttttggctgttcgagaatgtggtggccatgggagtcagcgacaagcgggatattagccggttcctggagagcaaccccgtgatgatcgatgccaaggaagtgagcgccgcccaccgggccagatacttctggggcaatctgcctggcatgaacagacccctggccagcaccgtgaacgacaagctggagctgcaggagtgcctggagcacggccggatcgccaagttcagcaaggtgagaaccatcaccacccgaagcaacagcatcaaacaaggcaaggaccagcactttcctgtgttcatgaacgagaaggaggacatcctgtggtgtaccgagatggagagagtgttcgggttcccagtccactacacagatgtcagcaacatgtctagactggccagacagagactgctgggaagaagctggtccgtccctgtgatcagacacctgttcgcccctctgaaggagtacttcgcctgcgtgagcagcggcaacagcaacgccaacagccggggccccagcttctctagcggcctggtgccactgtccctgagagggagccacatgggccccatggagatctacaaaaccgtgagcgcctggaagcggcagcctgtgcgcgtgctgagcctgtttcggaatatcgataaagtcctgaaaagcctgggattcctggagagcggctctggctccggcggtggcaccctgaagtacgtggaggatgtgacaaacgtggtcagacgggatgtggagaagtggggccccttcgatctggtgtacggcagcacccaacccctgggcagctcttgtgaccggtgccctggctggtacatgtttcagttccaccggatcctgcagtacgccctgccgagacaggagtcccagcggccattcttttggattttcatggacaacttgctgctgaccgaggatgaccaggaaactaccactcggttcctgcagaccgaagccgtgaccctgcaggacgtgagaggccgggactaccagaacgccatgcgggtgtggtccaacatccctggactgaaaagcaagcacgcacctctgacccctaaagaagaggagtacctgcaggcccaggtgcggagcagaagcaagctggacgcccctaaggtggatctgctggtgaagaattgcctcctgcccctgagagagtacttcaagtatttcagccagaatagtctgcccctgggcggcccaagcagcggcgcccctcctcccagcggcggcagcccagccggctccccaacctctaccgaggagggcacctctgagtccgccacccccgagagcggccctggcacctccaccgagcccagcgagggcagcgcacccggcagccctgccggcagccccacctccacagaggagggaaccagcaccgagcccagcgaaggcagcgccccaggcaccagcaccgagcctagtgagggcggctctggcggcggcagcgcccaggagattaaacggatcaacaagatcagaagaagacttgtgaaagacagcaacaccaagaaggccggcaagacaggccccatgaaaaccctgctggttagagtgatgacacccgatctgagagagcggctggaaaacctgagaaagaagcctgaaaatatcccccagcccatcagcaatacatctagagccaacctgaataagctgctgaccgattacaccgaaatgaagaaggcgatcctgcatgtgtactgggaagagttccagaaggaccctgtgggcctgatgagccgggtggcccagcctgccagcaagaagatcgatcagaacaagctgaaacctgagatggacgagaagggcaacctgaccaccgccggctttgcctgctctcagtgtggccagcccctgttcgtgtacaagctggagcaggtgtctgagaagggcaaggcttacaccaactacttcggacggtgcaatgtggccgagcacgaaaagctgatcctgctggcccagctgaagcccgagaaggatagcgacgaagccgtgacatatagcctgggaaagtttgggcagagggccctggatttctacagcattcatgtgaccaaggagtccacccaccccgtgaagcccctggcccagatcgccggaaacagatacgcctccggacctgtgggaaaggccctgagcgacgcatgtatgggcacaatcgcctccttcctgtctaagtaccaggacatcatcatcgaacaccagaaggtggtgaagggcaaccagaagagactggagagcctgcgggagctggccggcaaggaaaacctggaataccctagcgtgaccctgccacctcagcctcacaccaaggagggcgttgatgcctacaacgaagtgatcgcccgggtgcgaatgtgggtgaacctgaacctgtggcagaagctgaagctaagcagagatgatgccaagcctctgctgagactgaagggattcccttcctttcctctggtcgagagacaggccaacgaagtggactggtgggacatggtgtgtaacgtgaagaagctgatcaacgagaaaaaggaggatggcaaggtgttttggcagaatctggctggctacaagagacaggaagccctgagaccatacctgagcagcgaggaagatcggaagaagggaaagaaattcgctcggtaccagctgggcgacctgctgctgcacctggaaaagaagcacggcgaggactggggaaaggtgtacgacgaggcctgggagcggattgacaagaaagtggaaggcctgagcaagcacatcaagctggaagaggaacggagaagcgaggacgcccagagcaaggccgccctgaccgactggctgcgggctaaggccagcttcgtgatcgagggcctgaaggaggccgacaaggacgagttctgcagatgcgagctgaagctgcagaagtggtacggggacctgcggggaaagcccttcgccatcgaagccgagaacagcatcctggacatcagcggcttcagcaagcagtacaactgtgccttcatctggcagaaggacggcgtgaagaagctgaacctgtacctgatcatcaactacttcaagggcggcaagctgcggttcaagaagatcaaacctgaagccttcgaagccaacagattctacaccgtgatcaacaaaaagagcggcgagatcgtgcccatggaggtgaacttcaacttcgacgaccccaacctgatcatcctgcctctggcctttggcaagagacagggcagagaattcatctggaacgacctgctgtccctggaaaccggcagcctgaagctggccaacggaagagtgatcgagaagacactgtacaacagaagaacccggcaggatgagcctgccctgttcgtggccctgaccttcgagcggcgggaggtcctggactcctccaatatcaaaccaatgaacctgatcggcgtggcaagaggcgaaaacatccccgccgtgatcgccctgaccgaccccgagggctgcccactgagccggtttaaggatagcctgggaaacccaacccacatcctgagaatcggcgagagctataaggagaagcagcggaccatccaggccaagaaggaggtggagcagcggagagccggcggctacagccggaagtacgccagcaaagccaagaatctggcagacgatatggtgagaaacaccgctagagatctgctgtactacgccgtgacccaggatgccatgctgatcttcgccaacctgagccggggcttcggccggcagggcaagcggaccttcatggccgagagacagtacacacggatggaggactggctgaccgccaagctggcctacgagggcctgagcaagacctacctgtccaagacactggcccagtacacctccaagacatgcagcaactgtgggtttaccatcaccagcgccgactacgacagggtgctggagaagctgaagaagacagcaacaggctggatgaccacaattaacggcaaggagctgaaggtggagggccagattacctactacaacagatacaagagacagaacgtagtcaaggacctgtccgtcgagctggatagactgagcgaagaatctgtgaacaacgacatctcctcctggacaaagggcagaagcggagaagctctgagcctcctgaagaaaagattctcccatagacccgtgcaggagaagttcgtgtgcctgaactgcggcttcgagacacacgcagccgagcaagccgccctgaacatcgccagatcctggctgttcctgcggagccaggagtacaagaaataccagacaaacaagacaaccggcaacaccgataagagagccttcgtcgagacctggcagtccttttaccggaagaagcttaaggaggtgtggaaacctgccgtgcggtctggcggatctggcggaggctccacaagcatggacatggcccaggagcccgtgaccttcagggacgtggccatctacttcagcagggaggagtgggcctgcctggagcccagccagagggccctgtacagggacgtgatgctggacaacttcagcagcgtggccgccctgggcttctgcagccccaggcccgacctggtgagcaggctggagcagtgggaggagccctgggtggaggactgggagaggcccgagctgcaggccgtgcagaggaccagccccaagaaaaagagaaaagtctaagctgccttctgcggggcttgccttctggccatgcccttcttctctcccttgcacctgtacctcttggtctttgaataaagcctgagtaggaaggctagcaaaaaaaaaaaaaaaaaaaaaaaaaaaaaaaaaaaaaaaaaaaaaaaaaaaaaaaaaaaaaaaaaaaaaaaaaaaaaaaa

SEQ ID NO: 3802 - RNA, 5419 nt, synthetic construct
  source 1..5419: mol_type = other RNA
aggaaataagagagaaaagaagagtaagaagaaatataagagccaccatggcccctaagaagaagcgtaaagtgagccgggtgaacggcagcggcagcggcggcggcatgaaccacgaccaggagttcgacccccctaaggtgtaccctcccgtccccgccgagaagagaaagcccatccgggtcctgagcctgttcgatggcatcgccaccggtctgctggtgctgaaggacctgggcatccaggtggataggtacattgcctccgaggtgtgcgaggactccatcaccgtgggaatggtgcgtcatcagggcaagatcatgtacgtgggcgacgtgcggagcgtgacacagaagcatatccaggagtggggccctttcgacctggtgatcggcggcagcccttgcaatgacctgagcatcgtgaacccagcccggaagggcctgtacgagggaaccggcagactgttcttcgagttttacagactgctgcacgacgcccggcctaaggaaggcgacgaccggcccttcttttggctgttcgagaatgtggtggccatgggagtcagcgacaagcgggatattagccggttcctggagagcaaccccgtgatgatcgatgccaaggaagtgagcgccgcccaccgggccagatacttctggggcaatctgcctggcatgaacagacccctggccagcaccgtgaacgacaagctggagctgcaggagtgcctggagcacggccggatcgccaagttcagcaaggtgagaaccatcaccacccgaagcaacagcatcaaacaaggcaaggaccagcactttcctgtgttcatgaacgagaaggaggacatcctgtggtgtaccgagatggagagagtgttcgggttcccagtccactacacagatgtcagcaacatgtctagactggccagacagagactgctgggaagaagctggtccgtccctgtgatcagacacctgttcgcccctctgaaggagtacttcgcctgcgtgagcagcggcaacagcaacgccaacagccggggccccagcttctctagcggcctggtgccactgtccctgagagggagccacatgggccccatggagatctacaaaaccgtgagcgcctggaagcggcagcctgtgcgcgtgctgagcctgtttcggaatatcgataaagtcctgaaaagcctgggattcctggagagcggctctggctccggcggtggcaccctgaagtacgtggaggatgtgacaaacgtggtcagacgggatgtggagaagtggggccccttcgatctggtgtacggcagcacccaacccctgggcagctcttgtgaccggtgccctggctggtacatgtttcagttccaccggatcctgcagtacgccctgccgagacaggagtcccagcggccattcttttggattttcatggacaacttgctgctgaccgaggatgaccaggaaactaccactcggttcctgcagaccgaagccgtgaccctgcaggacgtgagaggccgggactaccagaacgccatgcgggtgtggtccaacatccctggactgaaaagcaagcacgcacctctgacccctaaagaagaggagtacctgcaggcccaggtgcggagcagaagcaagctggacgcccctaaggtggatctgctggtgaagaattgcctcctgcccctgagagagtacttcaagtatttcagccagaatagtctgcccctgggcggcccaagcagcggcgcccctcctcccagcggcggcagcccagccggctccccaacctctaccgaggagggcacctctgagtccgccacccccgagagcggccctggcacctccaccgagcccagcgagggcagcgcacccggcagccctgccggcagccccacctccacagaggagggaaccagcaccgagcccagcgaaggcagcgccccaggcaccagcaccgagcctagtgagggcggctctggcggcggcagcgcccaggagattaaacggatcaacaagatcagaagaagacttgtgaaagacagcaacaccaagaaggccggcaagacaggccccatgaaaaccctgctggttagagtgatgacacccgatctgagagagcggctggaaaacctgagaaagaagcctgaaaatatcccccagcccatcagcaatacatctagagccaacctgaataagctgctgaccgattacaccgaaatgaagaaggcgatcctgcatgtgtactgggaagagttccagaaggaccctgtgggcctgatgagccgggtggcccagcctgccagcaagaagatcgatcagaacaagctgaaacctgagatggacgagaagggcaacctgaccaccgccggctttgcctgctctcagtgtggccagcccctgttcgtgtacaagctggagcaggtgtctgagaagggcaaggcttacaccaactacttcggacggtgcaatgtggccgagcacgaaaagctgatcctgctggcccagctgaagcccgagaaggatagcgacgaagccgtgacatatagcctgggaaagtttgggcagagggccctggatttctacagcattcatgtgaccaaggagtccacccaccccgtgaagcccctggcccagatcgccggaaacagatacgcctccggacctgtgggaaaggccctgagcgacgcatgtatgggcacaatcgcctccttcctgtctaagtaccaggacatcatcatcgaacaccagaaggtggtgaagggcaaccagaagagactggagagcctgcgggagctggccggcaaggaaaacctggaataccctagcgtgaccctgccacctcagcctcacaccaaggagggcgttgatgcctacaacgaagtgatcgcccgggtgcgaatgtgggtgaacctgaacctgtggcagaagctgaagctaagcagagatgatgccaagcctctgctgagactgaagggattcccttcctttcctctggtcgagagacaggccaacgaagtggactggtgggacatggtgtgtaacgtgaagaagctgatcaacgagaaaaaggaggatggcaaggtgttttggcagaatctggctggctacaagagacaggaagccctgagaccatacctgagcagcgaggaagatcggaagaagggaaagaaattcgctcggtaccagctgggcgacctgctgctgcacctggaaaagaagcacggcgaggactggggaaaggtgtacgacgaggcctgggagcggattgacaagaaagtggaaggcctgagcaagcacatcaagctggaagaggaacggagaagcgaggacgcccagagcaaggccgccctgaccgactggctgcgggctaaggccagcttcgtgatcgagggcctgaaggaggccgacaaggacgagttctgcagatgcgagctgaagctgcagaagtggtacggggacctgcggggaaagcccttcgccatcgaagccgagaacagcatcctggacatcagcggcttcagcaagcagtacaactgtgccttcatctggcagaaggacggcgtgaagaagctgaacctgtacctgatcatcaactacttcaagggcggcaagctgcggttcaagaagatcaaacctgaagccttcgaagccaacagattctacaccgtgatcaacaaaaagagcggcgagatcgtgcccatggaggtgaacttcaacttcgacgaccccaacctgatcatcctgcctctggcctttggcaagagacagggcagagaattcatctggaacgacctgctgtccctggaaaccggcagcctgaagctggccaacggaagagtgatcgagaagacactgtacaacagaagaacccggcaggatgagcctgccctgttcgtggccctgaccttcgagcggcgggaggtcctggactcctccaatatcaaaccaatgaacctgatcggcgtggcaagaggcgaaaacatccccgccgtgatcgccctgaccgaccccgagggctgcccactgagccggtttaaggatagcctgggaaacccaacccacatcctgagaatcggcgagagctataaggagaagcagcggaccatccaggccaagaaggaggtggagcagcggagagccggcggctacagccggaagtacgccagcaaagccaagaatctggcagacgatatggtgagaaacaccgctagagatctgctgtactacgccgtgacccaggatgccatgctgatcttcgccaacctgagccggggcttcggccggcagggcaagcggaccttcatggccgagagacagtacacacggatggaggactggctgaccgccaagctggcctacgagggcctgagcaagacctacctgtccaagacactggcccagtacacctccaagacatgcagcaactgtgggtttaccatcaccagcgccgactacgacagggtgctggagaagctgaagaagacagcaacaggctggatgaccacaattaacggcaaggagctgaaggtggagggccagattacctactacaacagatacaagagacagaacgtagtcaaggacctgtccgtcgagctggatagactgagcgaagaatctgtgaacaacgacatctcctcctggacaaagggcagaagcggagaagctctgagcctcctgaagaaaagattctcccatagacccgtgcaggagaagttcgtgtgcctgaactgcggcttcgagacacacgcagccgagcaagccgccctgaacatcgccagatcctggctgttcctgcggagccaggagtacaagaaataccagacaaacaagacaaccggcaacaccgataagagagccttcgtcgagacctggcagtccttttaccggaagaagcttaaggaggtgtggaaacctgccgtgcggtctggcggatctggcggaggctccacaagcatgggcctgctgaccttcagggacgtggccatcgagttcagcctggaggagtggcagtgcctggacaccgcccagaagaacctgtacaggaacgtgatgctggagaactacaggaacctggccttcctgggcgtggccgtgagcaagcccgacctgatcatctgcctggagaaggacaaggagccctggaacatgaagaggcacgagatggtggacgagccccccggcctgaccgtgagcaacaccagccccaagaaaaagagaaaagtctaagctgccttctgcggggcttgccttctggccatgcccttcttctctcccttgcacctgtacctcttggtctttgaataaagcctgagtaggaaggctagcaaaaaaaaaaaaaaaaaaaaaaaaaaaaaaaaaaaaaaaaaaaaaaaaaaaaaaaaaaaaaaaaaaaaaaaaaaaaaaaa

SEQ ID NO: 3803 - RNA, 5419 nt, synthetic construct
  source 1..5419: mol_type = other RNA
aggaaataagagagaaaagaagagtaagaagaaatataagagccaccatggcccctaagaagaagcgtaaagtgagccgggtgaacggcagcggcagcggcggcggcatgaaccacgaccaggagttcgacccccctaaggtgtaccctcccgtccccgccgagaagagaaagcccatccgggtcctgagcctgttcgatggcatcgccaccggtctgctggtgctgaaggacctgggcatccaggtggataggtacattgcctccgaggtgtgcgaggactccatcaccgtgggaatggtgcgtcatcagggcaagatcatgtacgtgggcgacgtgcggagcgtgacacagaagcatatccaggagtggggccctttcgacctggtgatcggcggcagcccttgcaatgacctgagcatcgtgaacccagcccggaagggcctgtacgagggaaccggcagactgttcttcgagttttacagactgctgcacgacgcccggcctaaggaaggcgacgaccggcccttcttttggctgttcgagaatgtggtggccatgggagtcagcgacaagcgggatattagccggttcctggagagcaaccccgtgatgatcgatgccaaggaagtgagcgccgcccaccgggccagatacttctggggcaatctgcctggcatgaacagacccctggccagcaccgtgaacgacaagctggagctgcaggagtgcctggagcacggccggatcgccaagttcagcaaggtgagaaccatcaccacccgaagcaacagcatcaaacaaggcaaggaccagcactttcctgtgttcatgaacgagaaggaggacatcctgtggtgtaccgagatggagagagtgttcgggttcccagtccactacacagatgtcagcaacatgtctagactggccagacagagactgctgggaagaagctggtccgtccctgtgatcagacacctgttcgcccctctgaaggagtacttcgcctgcgtgagcagcggcaacagcaacgccaacagccggggccccagcttctctagcggcctggtgccactgtccctgagagggagccacatgggccccatggagatctacaaaaccgtgagcgcctggaagcggcagcctgtgcgcgtgctgagcctgtttcggaatatcgataaagtcctgaaaagcctgggattcctggagagcggctctggctccggcggtggcaccctgaagtacgtggaggatgtgacaaacgtggtcagacgggatgtggagaagtggggccccttcgatctggtgtacggcagcacccaacccctgggcagctcttgtgaccggtgccctggctggtacatgtttcagttccaccggatcctgcagtacgccctgccgagacaggagtcccagcggccattcttttggattttcatggacaacttgctgctgaccgaggatgaccaggaaactaccactcggttcctgcagaccgaagccgtgaccctgcaggacgtgagaggccgggactaccagaacgccatgcgggtgtggtccaacatccctggactgaaaagcaagcacgcacctctgacccctaaagaagaggagtacctgcaggcccaggtgcggagcagaagcaagctggacgcccctaaggtggatctgctggtgaagaattgcctcctgcccctgagagagtacttcaagtatttcagccagaatagtctgcccctgggcggcccaagcagcggcgcccctcctcccagcggcggcagcccagccggctccccaacctctaccgaggagggcacctctgagtccgccacccccgagagcggccctggcacctccaccgagcccagcgagggcagcgcacccggcagccctgccggcagccccacctccacagaggagggaaccagcaccgagcccagcgaaggcagcgccccaggcaccagcaccgagcctagtgagggcggctctggcggcggcagcgcccaggagattaaacggatcaacaagatcagaagaagacttgtgaaagacagcaacaccaagaaggccggcaagacaggccccatgaaaaccctgctggttagagtgatgacacccgatctgagagagcggctggaaaacctgagaaagaagcctgaaaatatcccccagcccatcagcaatacatctagagccaacctgaataagctgctgaccgattacaccgaaatgaagaaggcgatcctgcatgtgtactgggaagagttccagaaggaccctgtgggcctgatgagccgggtggcccagcctgccagcaagaagatcgatcagaacaagctgaaacctgagatggacgagaagggcaacctgaccaccgccggctttgcctgctctcagtgtggccagcccctgttcgtgtacaagctggagcaggtgtctgagaagggcaaggcttacaccaactacttcggacggtgcaatgtggccgagcacgaaaagctgatcctgctggcccagctgaagcccgagaaggatagcgacgaagccgtgacatatagcctgggaaagtttgggcagagggccctggatttctacagcattcatgtgaccaaggagtccacccaccccgtgaagcccctggcccagatcgccggaaacagatacgcctccggacctgtgggaaaggccctgagcgacgcatgtatgggcacaatcgcctccttcctgtctaagtaccaggacatcatcatcgaacaccagaaggtggtgaagggcaaccagaagagactggagagcctgcgggagctggccggcaaggaaaacctggaataccctagcgtgaccctgccacctcagcctcacaccaaggagggcgttgatgcctacaacgaagtgatcgcccgggtgcgaatgtgggtgaacctgaacctgtggcagaagctgaagctaagcagagatgatgccaagcctctgctgagactgaagggattcccttcctttcctctggtcgagagacaggccaacgaagtggactggtgggacatggtgtgtaacgtgaagaagctgatcaacgagaaaaaggaggatggcaaggtgttttggcagaatctggctggctacaagagacaggaagccctgagaccatacctgagcagcgaggaagatcggaagaagggaaagaaattcgctcggtaccagctgggcgacctgctgctgcacctggaaaagaagcacggcgaggactggggaaaggtgtacgacgaggcctgggagcggattgacaagaaagtggaaggcctgagcaagcacatcaagctggaagaggaacggagaagcgaggacgcccagagcaaggccgccctgaccgactggctgcgggctaaggccagcttcgtgatcgagggcctgaaggaggccgacaaggacgagttctgcagatgcgagctgaagctgcagaagtggtacggggacctgcggggaaagcccttcgccatcgaagccgagaacagcatcctggacatcagcggcttcagcaagcagtacaactgtgccttcatctggcagaaggacggcgtgaagaagctgaacctgtacctgatcatcaactacttcaagggcggcaagctgcggttcaagaagatcaaacctgaagccttcgaagccaacagattctacaccgtgatcaacaaaaagagcggcgagatcgtgcccatggaggtgaacttcaacttcgacgaccccaacctgatcatcctgcctctggcctttggcaagagacagggcagagaattcatctggaacgacctgctgtccctggaaaccggcagcctgaagctggccaacggaagagtgatcgagaagacactgtacaacagaagaacccggcaggatgagcctgccctgttcgtggccctgaccttcgagcggcgggaggtcctggactcctccaatatcaaaccaatgaacctgatcggcgtggcaagaggcgaaaacatccccgccgtgatcgccctgaccgaccccgagggctgcccactgagccggtttaaggatagcctgggaaacccaacccacatcctgagaatcggcgagagctataaggagaagcagcggaccatccaggccaagaaggaggtggagcagcggagagccggcggctacagccggaagtacgccagcaaagccaagaatctggcagacgatatggtgagaaacaccgctagagatctgctgtactacgccgtgacccaggatgccatgctgatcttcgccaacctgagccggggcttcggccggcagggcaagcggaccttcatggccgagagacagtacacacggatggaggactggctgaccgccaagctggcctacgagggcctgagcaagacctacctgtccaagacactggcccagtacacctccaagacatgcagcaactgtgggtttaccatcaccagcgccgactacgacagggtgctggagaagctgaagaagacagcaacaggctggatgaccacaattaacggcaaggagctgaaggtggagggccagattacctactacaacagatacaagagacagaacgtagtcaaggacctgtccgtcgagctggatagactgagcgaagaatctgtgaacaacgacatctcctcctggacaaagggcagaagcggagaagctctgagcctcctgaagaaaagattctcccatagacccgtgcaggagaagttcgtgtgcctgaactgcggcttcgagacacacgcagccgagcaagccgccctgaacatcgccagatcctggctgttcctgcggagccaggagtacaagaaataccagacaaacaagacaaccggcaacaccgataagagagccttcgtcgagacctggcagtccttttaccggaagaagcttaaggaggtgtggaaacctgccgtgcggtctggcggatctggcggaggctccacaagcagccccggcctgctgaccttcagggacgtggtgatcgagttcagcctggaggagtggcagtgcctggaccacgcccagcagaacctgtacagggacgtgatgctggagaactacaggaacctggtgagcctgggcatcgccgtgagcaagcccgacctgatcacctgcctggagcagaacaaggacccctggaacatcaagaggaacgagatggtgaccaagcaccccgtgatgtgcagccacaccagccccaagaaaaagagaaaagtctaagctgccttctgcggggcttgccttctggccatgcccttcttctctcccttgcacctgtacctcttggtctttgaataaagcctgagtaggaaggctagcaaaaaaaaaaaaaaaaaaaaaaaaaaaaaaaaaaaaaaaaaaaaaaaaaaaaaaaaaaaaaaaaaaaaaaaaaaaaaaaa

SEQ ID NO: 3804 - RNA, 5419 nt, synthetic construct
  source 1..5419: mol_type = other RNA
aggaaataagagagaaaagaagagtaagaagaaatataagagccaccatggcccctaagaagaagcgtaaagtgagccgggtgaacggcagcggcagcggcggcggcatgaaccacgaccaggagttcgacccccctaaggtgtaccctcccgtccccgccgagaagagaaagcccatccgggtcctgagcctgttcgatggcatcgccaccggtctgctggtgctgaaggacctgggcatccaggtggataggtacattgcctccgaggtgtgcgaggactccatcaccgtgggaatggtgcgtcatcagggcaagatcatgtacgtgggcgacgtgcggagcgtgacacagaagcatatccaggagtggggccctttcgacctggtgatcggcggcagcccttgcaatgacctgagcatcgtgaacccagcccggaagggcctgtacgagggaaccggcagactgttcttcgagttttacagactgctgcacgacgcccggcctaaggaaggcgacgaccggcccttcttttggctgttcgagaatgtggtggccatgggagtcagcgacaagcgggatattagccggttcctggagagcaaccccgtgatgatcgatgccaaggaagtgagcgccgcccaccgggccagatacttctggggcaatctgcctggcatgaacagacccctggccagcaccgtgaacgacaagctggagctgcaggagtgcctggagcacggccggatcgccaagttcagcaaggtgagaaccatcaccacccgaagcaacagcatcaaacaaggcaaggaccagcactttcctgtgttcatgaacgagaaggaggacatcctgtggtgtaccgagatggagagagtgttcgggttcccagtccactacacagatgtcagcaacatgtctagactggccagacagagactgctgggaagaagctggtccgtccctgtgatcagacacctgttcgcccctctgaaggagtacttcgcctgcgtgagcagcggcaacagcaacgccaacagccggggccccagcttctctagcggcctggtgccactgtccctgagagggagccacatgggccccatggagatctacaaaaccgtgagcgcctggaagcggcagcctgtgcgcgtgctgagcctgtttcggaatatcgataaagtcctgaaaagcctgggattcctggagagcggctctggctccggcggtggcaccctgaagtacgtggaggatgtgacaaacgtggtcagacgggatgtggagaagtggggccccttcgatctggtgtacggcagcacccaacccctgggcagctcttgtgaccggtgccctggctggtacatgtttcagttccaccggatcctgcagtacgccctgccgagacaggagtcccagcggccattcttttggattttcatggacaacttgctgctgaccgaggatgaccaggaaactaccactcggttcctgcagaccgaagccgtgaccctgcaggacgtgagaggccgggactaccagaacgccatgcgggtgtggtccaacatccctggactgaaaagcaagcacgcacctctgacccctaaagaagaggagtacctgcaggcccaggtgcggagcagaagcaagctggacgcccctaaggtggatctgctggtgaagaattgcctcctgcccctgagagagtacttcaagtatttcagccagaatagtctgcccctgggcggcccaagcagcggcgcccctcctcccagcggcggcagcccagccggctccccaacctctaccgaggagggcacctctgagtccgccacccccgagagcggccctggcacctccaccgagcccagcgagggcagcgcacccggcagccctgccggcagccccacctccacagaggagggaaccagcaccgagcccagcgaaggcagcgccccaggcaccagcaccgagcctagtgagggcggctctggcggcggcagcgcccaggagattaaacggatcaacaagatcagaagaagacttgtgaaagacagcaacaccaagaaggccggcaagacaggccccatgaaaaccctgctggttagagtgatgacacccgatctgagagagcggctggaaaacctgagaaagaagcctgaaaatatcccccagcccatcagcaatacatctagagccaacctgaataagctgctgaccgattacaccgaaatgaagaaggcgatcctgcatgtgtactgggaagagttccagaaggaccctgtgggcctgatgagccgggtggcccagcctgccagcaagaagatcgatcagaacaagctgaaacctgagatggacgagaagggcaacctgaccaccgccggctttgcctgctctcagtgtggccagcccctgttcgtgtacaagctggagcaggtgtctgagaagggcaaggcttacaccaactacttcggacggtgcaatgtggccgagcacgaaaagctgatcctgctggcccagctgaagcccgagaaggatagcgacgaagccgtgacatatagcctgggaaagtttgggcagagggccctggatttctacagcattcatgtgaccaaggagtccacccaccccgtgaagcccctggcccagatcgccggaaacagatacgcctccggacctgtgggaaaggccctgagcgacgcatgtatgggcacaatcgcctccttcctgtctaagtaccaggacatcatcatcgaacaccagaaggtggtgaagggcaaccagaagagactggagagcctgcgggagctggccggcaaggaaaacctggaataccctagcgtgaccctgccacctcagcctcacaccaaggagggcgttgatgcctacaacgaagtgatcgcccgggtgcgaatgtgggtgaacctgaacctgtggcagaagctgaagctaagcagagatgatgccaagcctctgctgagactgaagggattcccttcctttcctctggtcgagagacaggccaacgaagtggactggtgggacatggtgtgtaacgtgaagaagctgatcaacgagaaaaaggaggatggcaaggtgttttggcagaatctggctggctacaagagacaggaagccctgagaccatacctgagcagcgaggaagatcggaagaagggaaagaaattcgctcggtaccagctgggcgacctgctgctgcacctggaaaagaagcacggcgaggactggggaaaggtgtacgacgaggcctgggagcggattgacaagaaagtggaaggcctgagcaagcacatcaagctggaagaggaacggagaagcgaggacgcccagagcaaggccgccctgaccgactggctgcgggctaaggccagcttcgtgatcgagggcctgaaggaggccgacaaggacgagttctgcagatgcgagctgaagctgcagaagtggtacggggacctgcggggaaagcccttcgccatcgaagccgagaacagcatcctggacatcagcggcttcagcaagcagtacaactgtgccttcatctggcagaaggacggcgtgaagaagctgaacctgtacctgatcatcaactacttcaagggcggcaagctgcggttcaagaagatcaaacctgaagccttcgaagccaacagattctacaccgtgatcaacaaaaagagcggcgagatcgtgcccatggaggtgaacttcaacttcgacgaccccaacctgatcatcctgcctctggcctttggcaagagacagggcagagaattcatctggaacgacctgctgtccctggaaaccggcagcctgaagctggccaacggaagagtgatcgagaagacactgtacaacagaagaacccggcaggatgagcctgccctgttcgtggccctgaccttcgagcggcgggaggtcctggactcctccaatatcaaaccaatgaacctgatcggcgtggcaagaggcgaaaacatccccgccgtgatcgccctgaccgaccccgagggctgcccactgagccggtttaaggatagcctgggaaacccaacccacatcctgagaatcggcgagagctataaggagaagcagcggaccatccaggccaagaaggaggtggagcagcggagagccggcggctacagccggaagtacgccagcaaagccaagaatctggcagacgatatggtgagaaacaccgctagagatctgctgtactacgccgtgacccaggatgccatgctgatcttcgccaacctgagccggggcttcggccggcagggcaagcggaccttcatggccgagagacagtacacacggatggaggactggctgaccgccaagctggcctacgagggcctgagcaagacctacctgtccaagacactggcccagtacacctccaagacatgcagcaactgtgggtttaccatcaccagcgccgactacgacagggtgctggagaagctgaagaagacagcaacaggctggatgaccacaattaacggcaaggagctgaaggtggagggccagattacctactacaacagatacaagagacagaacgtagtcaaggacctgtccgtcgagctggatagactgagcgaagaatctgtgaacaacgacatctcctcctggacaaagggcagaagcggagaagctctgagcctcctgaagaaaagattctcccatagacccgtgcaggagaagttcgtgtgcctgaactgcggcttcgagacacacgcagccgagcaagccgccctgaacatcgccagatcctggctgttcctgcggagccaggagtacaagaaataccagacaaacaagacaaccggcaacaccgataagagagccttcgtcgagacctggcagtccttttaccggaagaagcttaaggaggtgtggaaacctgccgtgcggtctggcggatctggcggaggctccacaagcagccagggcctggtgaccttcagggacgtggccctggacttcagccaggaggagtgggagtggctggaccccagccagaaggacctgtacagggacgtgatgctggagaactacaggaacctggtgtggctgggcctgagcatcagcaagcccaacatgatcagcctgctggagcagggcaaggagccctggatggtggagaaggagatgagcgacggccagtgcgccgactgggagagctggaccagccccaagaaaaagagaaaagtctaagctgccttctgcggggcttgccttctggccatgcccttcttctctcccttgcacctgtacctcttggtctttgaataaagcctgagtaggaaggctagcaaaaaaaaaaaaaaaaaaaaaaaaaaaaaaaaaaaaaaaaaaaaaaaaaaaaaaaaaaaaaaaaaaaaaaaaaaaaaaaa

SEQ ID NO: 3805 - RNA, 5419 nt, synthetic construct
  source 1..5419: mol_type = other RNA
aggaaataagagagaaaagaagagtaagaagaaatataagagccaccatggcccctaagaagaagcgtaaagtgagccgggtgaacggcagcggcagcggcggcggcatgaaccacgaccaggagttcgacccccctaaggtgtaccctcccgtccccgccgagaagagaaagcccatccgggtcctgagcctgttcgatggcatcgccaccggtctgctggtgctgaaggacctgggcatccaggtggataggtacattgcctccgaggtgtgcgaggactccatcaccgtgggaatggtgcgtcatcagggcaagatcatgtacgtgggcgacgtgcggagcgtgacacagaagcatatccaggagtggggccctttcgacctggtgatcggcggcagcccttgcaatgacctgagcatcgtgaacccagcccggaagggcctgtacgagggaaccggcagactgttcttcgagttttacagactgctgcacgacgcccggcctaaggaaggcgacgaccggcccttcttttggctgttcgagaatgtggtggccatgggagtcagcgacaagcgggatattagccggttcctggagagcaaccccgtgatgatcgatgccaaggaagtgagcgccgcccaccgggccagatacttctggggcaatctgcctggcatgaacagacccctggccagcaccgtgaacgacaagctggagctgcaggagtgcctggagcacggccggatcgccaagttcagcaaggtgagaaccatcaccacccgaagcaacagcatcaaacaaggcaaggaccagcactttcctgtgttcatgaacgagaaggaggacatcctgtggtgtaccgagatggagagagtgttcgggttcccagtccactacacagatgtcagcaacatgtctagactggccagacagagactgctgggaagaagctggtccgtccctgtgatcagacacctgttcgcccctctgaaggagtacttcgcctgcgtgagcagcggcaacagcaacgccaacagccggggccccagcttctctagcggcctggtgccactgtccctgagagggagccacatgggccccatggagatctacaaaaccgtgagcgcctggaagcggcagcctgtgcgcgtgctgagcctgtttcggaatatcgataaagtcctgaaaagcctgggattcctggagagcggctctggctccggcggtggcaccctgaagtacgtggaggatgtgacaaacgtggtcagacgggatgtggagaagtggggccccttcgatctggtgtacggcagcacccaacccctgggcagctcttgtgaccggtgccctggctggtacatgtttcagttccaccggatcctgcagtacgccctgccgagacaggagtcccagcggccattcttttggattttcatggacaacttgctgctgaccgaggatgaccaggaaactaccactcggttcctgcagaccgaagccgtgaccctgcaggacgtgagaggccgggactaccagaacgccatgcgggtgtggtccaacatccctggactgaaaagcaagcacgcacctctgacccctaaagaagaggagtacctgcaggcccaggtgcggagcagaagcaagctggacgcccctaaggtggatctgctggtgaagaattgcctcctgcccctgagagagtacttcaagtatttcagccagaatagtctgcccctgggcggcccaagcagcggcgcccctcctcccagcggcggcagcccagccggctccccaacctctaccgaggagggcacctctgagtccgccacccccgagagcggccctggcacctccaccgagcccagcgagggcagcgcacccggcagccctgccggcagccccacctccacagaggagggaaccagcaccgagcccagcgaaggcagcgccccaggcaccagcaccgagcctagtgagggcggctctggcggcggcagcgcccaggagattaaacggatcaacaagatcagaagaagacttgtgaaagacagcaacaccaagaaggccggcaagacaggccccatgaaaaccctgctggttagagtgatgacacccgatctgagagagcggctggaaaacctgagaaagaagcctgaaaatatcccccagcccatcagcaatacatctagagccaacctgaataagctgctgaccgattacaccgaaatgaagaaggcgatcctgcatgtgtactgggaagagttccagaaggaccctgtgggcctgatgagccgggtggcccagcctgccagcaagaagatcgatcagaacaagctgaaacctgagatggacgagaagggcaacctgaccaccgccggctttgcctgctctcagtgtggccagcccctgttcgtgtacaagctggagcaggtgtctgagaagggcaaggcttacaccaactacttcggacggtgcaatgtggccgagcacgaaaagctgatcctgctggcccagctgaagcccgagaaggatagcgacgaagccgtgacatatagcctgggaaagtttgggcagagggccctggatttctacagcattcatgtgaccaaggagtccacccaccccgtgaagcccctggcccagatcgccggaaacagatacgcctccggacctgtgggaaaggccctgagcgacgcatgtatgggcacaatcgcctccttcctgtctaagtaccaggacatcatcatcgaacaccagaaggtggtgaagggcaaccagaagagactggagagcctgcgggagctggccggcaaggaaaacctggaataccctagcgtgaccctgccacctcagcctcacaccaaggagggcgttgatgcctacaacgaagtgatcgcccgggtgcgaatgtgggtgaacctgaacctgtggcagaagctgaagctaagcagagatgatgccaagcctctgctgagactgaagggattcccttcctttcctctggtcgagagacaggccaacgaagtggactggtgggacatggtgtgtaacgtgaagaagctgatcaacgagaaaaaggaggatggcaaggtgttttggcagaatctggctggctacaagagacaggaagccctgagaccatacctgagcagcgaggaagatcggaagaagggaaagaaattcgctcggtaccagctgggcgacctgctgctgcacctggaaaagaagcacggcgaggactggggaaaggtgtacgacgaggcctgggagcggattgacaagaaagtggaaggcctgagcaagcacatcaagctggaagaggaacggagaagcgaggacgcccagagcaaggccgccctgaccgactggctgcgggctaaggccagcttcgtgatcgagggcctgaaggaggccgacaaggacgagttctgcagatgcgagctgaagctgcagaagtggtacggggacctgcggggaaagcccttcgccatcgaagccgagaacagcatcctggacatcagcggcttcagcaagcagtacaactgtgccttcatctggcagaaggacggcgtgaagaagctgaacctgtacctgatcatcaactacttcaagggcggcaagctgcggttcaagaagatcaaacctgaagccttcgaagccaacagattctacaccgtgatcaacaaaaagagcggcgagatcgtgcccatggaggtgaacttcaacttcgacgaccccaacctgatcatcctgcctctggcctttggcaagagacagggcagagaattcatctggaacgacctgctgtccctggaaaccggcagcctgaagctggccaacggaagagtgatcgagaagacactgtacaacagaagaacccggcaggatgagcctgccctgttcgtggccctgaccttcgagcggcgggaggtcctggactcctccaatatcaaaccaatgaacctgatcggcgtggcaagaggcgaaaacatccccgccgtgatcgccctgaccgaccccgagggctgcccactgagccggtttaaggatagcctgggaaacccaacccacatcctgagaatcggcgagagctataaggagaagcagcggaccatccaggccaagaaggaggtggagcagcggagagccggcggctacagccggaagtacgccagcaaagccaagaatctggcagacgatatggtgagaaacaccgctagagatctgctgtactacgccgtgacccaggatgccatgctgatcttcgccaacctgagccggggcttcggccggcagggcaagcggaccttcatggccgagagacagtacacacggatggaggactggctgaccgccaagctggcctacgagggcctgagcaagacctacctgtccaagacactggcccagtacacctccaagacatgcagcaactgtgggtttaccatcaccagcgccgactacgacagggtgctggagaagctgaagaagacagcaacaggctggatgaccacaattaacggcaaggagctgaaggtggagggccagattacctactacaacagatacaagagacagaacgtagtcaaggacctgtccgtcgagctggatagactgagcgaagaatctgtgaacaacgacatctcctcctggacaaagggcagaagcggagaagctctgagcctcctgaagaaaagattctcccatagacccgtgcaggagaagttcgtgtgcctgaactgcggcttcgagacacacgcagccgagcaagccgccctgaacatcgccagatcctggctgttcctgcggagccaggagtacaagaaataccagacaaacaagacaaccggcaacaccgataagagagccttcgtcgagacctggcagtccttttaccggaagaagcttaaggaggtgtggaaacctgccgtgcggtctggcggatctggcggaggctccacaagcatcggcagcgacctgttcagggacgtggccgtggtgttcagcagggaggagtgggagcagctgacccccgcccagagggacctgtacagggacgtgatgctggagatctacagcatcctgctgagcctgggccccgacctggccgtgagcaagcccgacgtgatcagcttcctggagcagggcaaggagccctggagggtggaggaggccgtgaccggcggcctgtgccccgtgctggagagcaccagccccaagaaaaagagaaaagtctaagctgccttctgcggggcttgccttctggccatgcccttcttctctcccttgcacctgtacctcttggtctttgaataaagcctgagtaggaaggctagcaaaaaaaaaaaaaaaaaaaaaaaaaaaaaaaaaaaaaaaaaaaaaaaaaaaaaaaaaaaaaaaaaaaaaaaaaaaaaaaa

SEQ ID NO: 3806 - RNA, 5419 nt, synthetic construct
  source 1..5419: mol_type = other RNA
aggaaataagagagaaaagaagagtaagaagaaatataagagccaccatggcccctaagaagaagcgtaaagtgagccgggtgaacggcagcggcagcggcggcggcatgaaccacgaccaggagttcgacccccctaaggtgtaccctcccgtccccgccgagaagagaaagcccatccgggtcctgagcctgttcgatggcatcgccaccggtctgctggtgctgaaggacctgggcatccaggtggataggtacattgcctccgaggtgtgcgaggactccatcaccgtgggaatggtgcgtcatcagggcaagatcatgtacgtgggcgacgtgcggagcgtgacacagaagcatatccaggagtggggccctttcgacctggtgatcggcggcagcccttgcaatgacctgagcatcgtgaacccagcccggaagggcctgtacgagggaaccggcagactgttcttcgagttttacagactgctgcacgacgcccggcctaaggaaggcgacgaccggcccttcttttggctgttcgagaatgtggtggccatgggagtcagcgacaagcgggatattagccggttcctggagagcaaccccgtgatgatcgatgccaaggaagtgagcgccgcccaccgggccagatacttctggggcaatctgcctggcatgaacagacccctggccagcaccgtgaacgacaagctggagctgcaggagtgcctggagcacggccggatcgccaagttcagcaaggtgagaaccatcaccacccgaagcaacagcatcaaacaaggcaaggaccagcactttcctgtgttcatgaacgagaaggaggacatcctgtggtgtaccgagatggagagagtgttcgggttcccagtccactacacagatgtcagcaacatgtctagactggccagacagagactgctgggaagaagctggtccgtccctgtgatcagacacctgttcgcccctctgaaggagtacttcgcctgcgtgagcagcggcaacagcaacgccaacagccggggccccagcttctctagcggcctggtgccactgtccctgagagggagccacatgggccccatggagatctacaaaaccgtgagcgcctggaagcggcagcctgtgcgcgtgctgagcctgtttcggaatatcgataaagtcctgaaaagcctgggattcctggagagcggctctggctccggcggtggcaccctgaagtacgtggaggatgtgacaaacgtggtcagacgggatgtggagaagtggggccccttcgatctggtgtacggcagcacccaacccctgggcagctcttgtgaccggtgccctggctggtacatgtttcagttccaccggatcctgcagtacgccctgccgagacaggagtcccagcggccattcttttggattttcatggacaacttgctgctgaccgaggatgaccaggaaactaccactcggttcctgcagaccgaagccgtgaccctgcaggacgtgagaggccgggactaccagaacgccatgcgggtgtggtccaacatccctggactgaaaagcaagcacgcacctctgacccctaaagaagaggagtacctgcaggcccaggtgcggagcagaagcaagctggacgcccctaaggtggatctgctggtgaagaattgcctcctgcccctgagagagtacttcaagtatttcagccagaatagtctgcccctgggcggcccaagcagcggcgcccctcctcccagcggcggcagcccagccggctccccaacctctaccgaggagggcacctctgagtccgccacccccgagagcggccctggcacctccaccgagcccagcgagggcagcgcacccggcagccctgccggcagccccacctccacagaggagggaaccagcaccgagcccagcgaaggcagcgccccaggcaccagcaccgagcctagtgagggcggctctggcggcggcagcgcccaggagattaaacggatcaacaagatcagaagaagacttgtgaaagacagcaacaccaagaaggccggcaagacaggccccatgaaaaccctgctggttagagtgatgacacccgatctgagagagcggctggaaaacctgagaaagaagcctgaaaatatcccccagcccatcagcaatacatctagagccaacctgaataagctgctgaccgattacaccgaaatgaagaaggcgatcctgcatgtgtactgggaagagttccagaaggaccctgtgggcctgatgagccgggtggcccagcctgccagcaagaagatcgatcagaacaagctgaaacctgagatggacgagaagggcaacctgaccaccgccggctttgcctgctctcagtgtggccagcccctgttcgtgtacaagctggagcaggtgtctgagaagggcaaggcttacaccaactacttcggacggtgcaatgtggccgagcacgaaaagctgatcctgctggcccagctgaagcccgagaaggatagcgacgaagccgtgacatatagcctgggaaagtttgggcagagggccctggatttctacagcattcatgtgaccaaggagtccacccaccccgtgaagcccctggcccagatcgccggaaacagatacgcctccggacctgtgggaaaggccctgagcgacgcatgtatgggcacaatcgcctccttcctgtctaagtaccaggacatcatcatcgaacaccagaaggtggtgaagggcaaccagaagagactggagagcctgcgggagctggccggcaaggaaaacctggaataccctagcgtgaccctgccacctcagcctcacaccaaggagggcgttgatgcctacaacgaagtgatcgcccgggtgcgaatgtgggtgaacctgaacctgtggcagaagctgaagctaagcagagatgatgccaagcctctgctgagactgaagggattcccttcctttcctctggtcgagagacaggccaacgaagtggactggtgggacatggtgtgtaacgtgaagaagctgatcaacgagaaaaaggaggatggcaaggtgttttggcagaatctggctggctacaagagacaggaagccctgagaccatacctgagcagcgaggaagatcggaagaagggaaagaaattcgctcggtaccagctgggcgacctgctgctgcacctggaaaagaagcacggcgaggactggggaaaggtgtacgacgaggcctgggagcggattgacaagaaagtggaaggcctgagcaagcacatcaagctggaagaggaacggagaagcgaggacgcccagagcaaggccgccctgaccgactggctgcgggctaaggccagcttcgtgatcgagggcctgaaggaggccgacaaggacgagttctgcagatgcgagctgaagctgcagaagtggtacggggacctgcggggaaagcccttcgccatcgaagccgagaacagcatcctggacatcagcggcttcagcaagcagtacaactgtgccttcatctggcagaaggacggcgtgaagaagctgaacctgtacctgatcatcaactacttcaagggcggcaagctgcggttcaagaagatcaaacctgaagccttcgaagccaacagattctacaccgtgatcaacaaaaagagcggcgagatcgtgcccatggaggtgaacttcaacttcgacgaccccaacctgatcatcctgcctctggcctttggcaagagacagggcagagaattcatctggaacgacctgctgtccctggaaaccggcagcctgaagctggccaacggaagagtgatcgagaagacactgtacaacagaagaacccggcaggatgagcctgccctgttcgtggccctgaccttcgagcggcgggaggtcctggactcctccaatatcaaaccaatgaacctgatcggcgtggcaagaggcgaaaacatccccgccgtgatcgccctgaccgaccccgagggctgcccactgagccggtttaaggatagcctgggaaacccaacccacatcctgagaatcggcgagagctataaggagaagcagcggaccatccaggccaagaaggaggtggagcagcggagagccggcggctacagccggaagtacgccagcaaagccaagaatctggcagacgatatggtgagaaacaccgctagagatctgctgtactacgccgtgacccaggatgccatgctgatcttcgccaacctgagccggggcttcggccggcagggcaagcggaccttcatggccgagagacagtacacacggatggaggactggctgaccgccaagctggcctacgagggcctgagcaagacctacctgtccaagacactggcccagtacacctccaagacatgcagcaactgtgggtttaccatcaccagcgccgactacgacagggtgctggagaagctgaagaagacagcaacaggctggatgaccacaattaacggcaaggagctgaaggtggagggccagattacctactacaacagatacaagagacagaacgtagtcaaggacctgtccgtcgagctggatagactgagcgaagaatctgtgaacaacgacatctcctcctggacaaagggcagaagcggagaagctctgagcctcctgaagaaaagattctcccatagacccgtgcaggagaagttcgtgtgcctgaactgcggcttcgagacacacgcagccgagcaagccgccctgaacatcgccagatcctggctgttcctgcggagccaggagtacaagaaataccagacaaacaagacaaccggcaacaccgataagagagccttcgtcgagacctggcagtccttttaccggaagaagcttaaggaggtgtggaaacctgccgtgcggtctggcggatctggcggaggctccacaagcatgatcaagagccaggagagcctgaccctggaggacgtggccgtggagttcacctgggaggagtggcagctgctgggccccgcccagaaggacctgtacagggacgtgatgctggagaactacagcaacctggtgagcgtgggctaccaggccagcaagcccgacgccctgttcaagctggagcagggcgagccctggaccgtggagaacgacagccacatctgccccgagatcaagaaggtgaccagccccaagaaaaagagaaaagtctaagctgccttctgcggggcttgccttctggccatgcccttcttctctcccttgcacctgtacctcttggtctttgaataaagcctgagtaggaaggctagcaaaaaaaaaaaaaaaaaaaaaaaaaaaaaaaaaaaaaaaaaaaaaaaaaaaaaaaaaaaaaaaaaaaaaaaaaaaaaaaa

SEQ ID NO: 3807 - RNA, 5419 nt, synthetic construct
  source 1..5419: mol_type = other RNA
aggaaataagagagaaaagaagagtaagaagaaatataagagccaccatggcccctaagaagaagcgtaaagtgagccgggtgaacggcagcggcagcggcggcggcatgaaccacgaccaggagttcgacccccctaaggtgtaccctcccgtccccgccgagaagagaaagcccatccgggtcctgagcctgttcgatggcatcgccaccggtctgctggtgctgaaggacctgggcatccaggtggataggtacattgcctccgaggtgtgcgaggactccatcaccgtgggaatggtgcgtcatcagggcaagatcatgtacgtgggcgacgtgcggagcgtgacacagaagcatatccaggagtggggccctttcgacctggtgatcggcggcagcccttgcaatgacctgagcatcgtgaacccagcccggaagggcctgtacgagggaaccggcagactgttcttcgagttttacagactgctgcacgacgcccggcctaaggaaggcgacgaccggcccttcttttggctgttcgagaatgtggtggccatgggagtcagcgacaagcgggatattagccggttcctggagagcaaccccgtgatgatcgatgccaaggaagtgagcgccgcccaccgggccagatacttctggggcaatctgcctggcatgaacagacccctggccagcaccgtgaacgacaagctggagctgcaggagtgcctggagcacggccggatcgccaagttcagcaaggtgagaaccatcaccacccgaagcaacagcatcaaacaaggcaaggaccagcactttcctgtgttcatgaacgagaaggaggacatcctgtggtgtaccgagatggagagagtgttcgggttcccagtccactacacagatgtcagcaacatgtctagactggccagacagagactgctgggaagaagctggtccgtccctgtgatcagacacctgttcgcccctctgaaggagtacttcgcctgcgtgagcagcggcaacagcaacgccaacagccggggccccagcttctctagcggcctggtgccactgtccctgagagggagccacatgggccccatggagatctacaaaaccgtgagcgcctggaagcggcagcctgtgcgcgtgctgagcctgtttcggaatatcgataaagtcctgaaaagcctgggattcctggagagcggctctggctccggcggtggcaccctgaagtacgtggaggatgtgacaaacgtggtcagacgggatgtggagaagtggggccccttcgatctggtgtacggcagcacccaacccctgggcagctcttgtgaccggtgccctggctggtacatgtttcagttccaccggatcctgcagtacgccctgccgagacaggagtcccagcggccattcttttggattttcatggacaacttgctgctgaccgaggatgaccaggaaactaccactcggttcctgcagaccgaagccgtgaccctgcaggacgtgagaggccgggactaccagaacgccatgcgggtgtggtccaacatccctggactgaaaagcaagcacgcacctctgacccctaaagaagaggagtacctgcaggcccaggtgcggagcagaagcaagctggacgcccctaaggtggatctgctggtgaagaattgcctcctgcccctgagagagtacttcaagtatttcagccagaatagtctgcccctgggcggcccaagcagcggcgcccctcctcccagcggcggcagcccagccggctccccaacctctaccgaggagggcacctctgagtccgccacccccgagagcggccctggcacctccaccgagcccagcgagggcagcgcacccggcagccctgccggcagccccacctccacagaggagggaaccagcaccgagcccagcgaaggcagcgccccaggcaccagcaccgagcctagtgagggcggctctggcggcggcagcgcccaggagattaaacggatcaacaagatcagaagaagacttgtgaaagacagcaacaccaagaaggccggcaagacaggccccatgaaaaccctgctggttagagtgatgacacccgatctgagagagcggctggaaaacctgagaaagaagcctgaaaatatcccccagcccatcagcaatacatctagagccaacctgaataagctgctgaccgattacaccgaaatgaagaaggcgatcctgcatgtgtactgggaagagttccagaaggaccctgtgggcctgatgagccgggtggcccagcctgccagcaagaagatcgatcagaacaagctgaaacctgagatggacgagaagggcaacctgaccaccgccggctttgcctgctctcagtgtggccagcccctgttcgtgtacaagctggagcaggtgtctgagaagggcaaggcttacaccaactacttcggacggtgcaatgtggccgagcacgaaaagctgatcctgctggcccagctgaagcccgagaaggatagcgacgaagccgtgacatatagcctgggaaagtttgggcagagggccctggatttctacagcattcatgtgaccaaggagtccacccaccccgtgaagcccctggcccagatcgccggaaacagatacgcctccggacctgtgggaaaggccctgagcgacgcatgtatgggcacaatcgcctccttcctgtctaagtaccaggacatcatcatcgaacaccagaaggtggtgaagggcaaccagaagagactggagagcctgcgggagctggccggcaaggaaaacctggaataccctagcgtgaccctgccacctcagcctcacaccaaggagggcgttgatgcctacaacgaagtgatcgcccgggtgcgaatgtgggtgaacctgaacctgtggcagaagctgaagctaagcagagatgatgccaagcctctgctgagactgaagggattcccttcctttcctctggtcgagagacaggccaacgaagtggactggtgggacatggtgtgtaacgtgaagaagctgatcaacgagaaaaaggaggatggcaaggtgttttggcagaatctggctggctacaagagacaggaagccctgagaccatacctgagcagcgaggaagatcggaagaagggaaagaaattcgctcggtaccagctgggcgacctgctgctgcacctggaaaagaagcacggcgaggactggggaaaggtgtacgacgaggcctgggagcggattgacaagaaagtggaaggcctgagcaagcacatcaagctggaagaggaacggagaagcgaggacgcccagagcaaggccgccctgaccgactggctgcgggctaaggccagcttcgtgatcgagggcctgaaggaggccgacaaggacgagttctgcagatgcgagctgaagctgcagaagtggtacggggacctgcggggaaagcccttcgccatcgaagccgagaacagcatcctggacatcagcggcttcagcaagcagtacaactgtgccttcatctggcagaaggacggcgtgaagaagctgaacctgtacctgatcatcaactacttcaagggcggcaagctgcggttcaagaagatcaaacctgaagccttcgaagccaacagattctacaccgtgatcaacaaaaagagcggcgagatcgtgcccatggaggtgaacttcaacttcgacgaccccaacctgatcatcctgcctctggcctttggcaagagacagggcagagaattcatctggaacgacctgctgtccctggaaaccggcagcctgaagctggccaacggaagagtgatcgagaagacactgtacaacagaagaacccggcaggatgagcctgccctgttcgtggccctgaccttcgagcggcgggaggtcctggactcctccaatatcaaaccaatgaacctgatcggcgtggcaagaggcgaaaacatccccgccgtgatcgccctgaccgaccccgagggctgcccactgagccggtttaaggatagcctgggaaacccaacccacatcctgagaatcggcgagagctataaggagaagcagcggaccatccaggccaagaaggaggtggagcagcggagagccggcggctacagccggaagtacgccagcaaagccaagaatctggcagacgatatggtgagaaacaccgctagagatctgctgtactacgccgtgacccaggatgccatgctgatcttcgccaacctgagccggggcttcggccggcagggcaagcggaccttcatggccgagagacagtacacacggatggaggactggctgaccgccaagctggcctacgagggcctgagcaagacctacctgtccaagacactggcccagtacacctccaagacatgcagcaactgtgggtttaccatcaccagcgccgactacgacagggtgctggagaagctgaagaagacagcaacaggctggatgaccacaattaacggcaaggagctgaaggtggagggccagattacctactacaacagatacaagagacagaacgtagtcaaggacctgtccgtcgagctggatagactgagcgaagaatctgtgaacaacgacatctcctcctggacaaagggcagaagcggagaagctctgagcctcctgaagaaaagattctcccatagacccgtgcaggagaagttcgtgtgcctgaactgcggcttcgagacacacgcagccgagcaagccgccctgaacatcgccagatcctggctgttcctgcggagccaggagtacaagaaataccagacaaacaagacaaccggcaacaccgataagagagccttcgtcgagacctggcagtccttttaccggaagaagcttaaggaggtgtggaaacctgccgtgcggtctggcggatctggcggaggctccacaagcatgttccaggtgaccttcagcgacgtggccatcgacttcagccacgaggagtggggctggctggacagcgcccagagggacctgtacaaggacgtgatggtgcagaactacgagaacctggtgagcctgggcctgagcatccccaagcccaacgtgatcgccctgctggaggagggcaaggacccctggatggtggagaggaagctgagcaccggcatgttccccgactgggacagcaggtggaccagccccaagaaaaagagaaaagtctaagctgccttctgcggggcttgccttctggccatgcccttcttctctcccttgcacctgtacctcttggtctttgaataaagcctgagtaggaaggctagcaaaaaaaaaaaaaaaaaaaaaaaaaaaaaaaaaaaaaaaaaaaaaaaaaaaaaaaaaaaaaaaaaaaaaaaaaaaaaaaa

SEQ ID NO: 3808 - RNA, 5419 nt, synthetic construct
  source 1..5419: mol_type = other RNA
aggaaataagagagaaaagaagagtaagaagaaatataagagccaccatggcccctaagaagaagcgtaaagtgagccgggtgaacggcagcggcagcggcggcggcatgaaccacgaccaggagttcgacccccctaaggtgtaccctcccgtccccgccgagaagagaaagcccatccgggtcctgagcctgttcgatggcatcgccaccggtctgctggtgctgaaggacctgggcatccaggtggataggtacattgcctccgaggtgtgcgaggactccatcaccgtgggaatggtgcgtcatcagggcaagatcatgtacgtgggcgacgtgcggagcgtgacacagaagcatatccaggagtggggccctttcgacctggtgatcggcggcagcccttgcaatgacctgagcatcgtgaacccagcccggaagggcctgtacgagggaaccggcagactgttcttcgagttttacagactgctgcacgacgcccggcctaaggaaggcgacgaccggcccttcttttggctgttcgagaatgtggtggccatgggagtcagcgacaagcgggatattagccggttcctggagagcaaccccgtgatgatcgatgccaaggaagtgagcgccgcccaccgggccagatacttctggggcaatctgcctggcatgaacagacccctggccagcaccgtgaacgacaagctggagctgcaggagtgcctggagcacggccggatcgccaagttcagcaaggtgagaaccatcaccacccgaagcaacagcatcaaacaaggcaaggaccagcactttcctgtgttcatgaacgagaaggaggacatcctgtggtgtaccgagatggagagagtgttcgggttcccagtccactacacagatgtcagcaacatgtctagactggccagacagagactgctgggaagaagctggtccgtccctgtgatcagacacctgttcgcccctctgaaggagtacttcgcctgcgtgagcagcggcaacagcaacgccaacagccggggccccagcttctctagcggcctggtgccactgtccctgagagggagccacatgggccccatggagatctacaaaaccgtgagcgcctggaagcggcagcctgtgcgcgtgctgagcctgtttcggaatatcgataaagtcctgaaaagcctgggattcctggagagcggctctggctccggcggtggcaccctgaagtacgtggaggatgtgacaaacgtggtcagacgggatgtggagaagtggggccccttcgatctggtgtacggcagcacccaacccctgggcagctcttgtgaccggtgccctggctggtacatgtttcagttccaccggatcctgcagtacgccctgccgagacaggagtcccagcggccattcttttggattttcatggacaacttgctgctgaccgaggatgaccaggaaactaccactcggttcctgcagaccgaagccgtgaccctgcaggacgtgagaggccgggactaccagaacgccatgcgggtgtggtccaacatccctggactgaaaagcaagcacgcacctctgacccctaaagaagaggagtacctgcaggcccaggtgcggagcagaagcaagctggacgcccctaaggtggatctgctggtgaagaattgcctcctgcccctgagagagtacttcaagtatttcagccagaatagtctgcccctgggcggcccaagcagcggcgcccctcctcccagcggcggcagcccagccggctccccaacctctaccgaggagggcacctctgagtccgccacccccgagagcggccctggcacctccaccgagcccagcgagggcagcgcacccggcagccctgccggcagccccacctccacagaggagggaaccagcaccgagcccagcgaaggcagcgccccaggcaccagcaccgagcctagtgagggcggctctggcggcggcagcgcccaggagattaaacggatcaacaagatcagaagaagacttgtgaaagacagcaacaccaagaaggccggcaagacaggccccatgaaaaccctgctggttagagtgatgacacccgatctgagagagcggctggaaaacctgagaaagaagcctgaaaatatcccccagcccatcagcaatacatctagagccaacctgaataagctgctgaccgattacaccgaaatgaagaaggcgatcctgcatgtgtactgggaagagttccagaaggaccctgtgggcctgatgagccgggtggcccagcctgccagcaagaagatcgatcagaacaagctgaaacctgagatggacgagaagggcaacctgaccaccgccggctttgcctgctctcagtgtggccagcccctgttcgtgtacaagctggagcaggtgtctgagaagggcaaggcttacaccaactacttcggacggtgcaatgtggccgagcacgaaaagctgatcctgctggcccagctgaagcccgagaaggatagcgacgaagccgtgacatatagcctgggaaagtttgggcagagggccctggatttctacagcattcatgtgaccaaggagtccacccaccccgtgaagcccctggcccagatcgccggaaacagatacgcctccggacctgtgggaaaggccctgagcgacgcatgtatgggcacaatcgcctccttcctgtctaagtaccaggacatcatcatcgaacaccagaaggtggtgaagggcaaccagaagagactggagagcctgcgggagctggccggcaaggaaaacctggaataccctagcgtgaccctgccacctcagcctcacaccaaggagggcgttgatgcctacaacgaagtgatcgcccgggtgcgaatgtgggtgaacctgaacctgtggcagaagctgaagctaagcagagatgatgccaagcctctgctgagactgaagggattcccttcctttcctctggtcgagagacaggccaacgaagtggactggtgggacatggtgtgtaacgtgaagaagctgatcaacgagaaaaaggaggatggcaaggtgttttggcagaatctggctggctacaagagacaggaagccctgagaccatacctgagcagcgaggaagatcggaagaagggaaagaaattcgctcggtaccagctgggcgacctgctgctgcacctggaaaagaagcacggcgaggactggggaaaggtgtacgacgaggcctgggagcggattgacaagaaagtggaaggcctgagcaagcacatcaagctggaagaggaacggagaagcgaggacgcccagagcaaggccgccctgaccgactggctgcgggctaaggccagcttcgtgatcgagggcctgaaggaggccgacaaggacgagttctgcagatgcgagctgaagctgcagaagtggtacggggacctgcggggaaagcccttcgccatcgaagccgagaacagcatcctggacatcagcggcttcagcaagcagtacaactgtgccttcatctggcagaaggacggcgtgaagaagctgaacctgtacctgatcatcaactacttcaagggcggcaagctgcggttcaagaagatcaaacctgaagccttcgaagccaacagattctacaccgtgatcaacaaaaagagcggcgagatcgtgcccatggaggtgaacttcaacttcgacgaccccaacctgatcatcctgcctctggcctttggcaagagacagggcagagaattcatctggaacgacctgctgtccctggaaaccggcagcctgaagctggccaacggaagagtgatcgagaagacactgtacaacagaagaacccggcaggatgagcctgccctgttcgtggccctgaccttcgagcggcgggaggtcctggactcctccaatatcaaaccaatgaacctgatcggcgtggcaagaggcgaaaacatccccgccgtgatcgccctgaccgaccccgagggctgcccactgagccggtttaaggatagcctgggaaacccaacccacatcctgagaatcggcgagagctataaggagaagcagcggaccatccaggccaagaaggaggtggagcagcggagagccggcggctacagccggaagtacgccagcaaagccaagaatctggcagacgatatggtgagaaacaccgctagagatctgctgtactacgccgtgacccaggatgccatgctgatcttcgccaacctgagccggggcttcggccggcagggcaagcggaccttcatggccgagagacagtacacacggatggaggactggctgaccgccaagctggcctacgagggcctgagcaagacctacctgtccaagacactggcccagtacacctccaagacatgcagcaactgtgggtttaccatcaccagcgccgactacgacagggtgctggagaagctgaagaagacagcaacaggctggatgaccacaattaacggcaaggagctgaaggtggagggccagattacctactacaacagatacaagagacagaacgtagtcaaggacctgtccgtcgagctggatagactgagcgaagaatctgtgaacaacgacatctcctcctggacaaagggcagaagcggagaagctctgagcctcctgaagaaaagattctcccatagacccgtgcaggagaagttcgtgtgcctgaactgcggcttcgagacacacgcagccgagcaagccgccctgaacatcgccagatcctggctgttcctgcggagccaggagtacaagaaataccagacaaacaagacaaccggcaacaccgataagagagccttcgtcgagacctggcagtccttttaccggaagaagcttaaggaggtgtggaaacctgccgtgcggtctggcggatctggcggaggctccacaagcccccaggagcccgtgaccttcgccgacgtggccgtgctgttcacccccgaggagtggctgttcctggacagcagccagaagagcctgtacagggacgtgatgctggagaactacaggaacgtggccagcgtgggcgaccagctgtgcaagaccaggatgagcagccacctggagcagagggaggagctgtgcgtgaccgagaggggcatcttccccggcgcccacctgggcccccacctgcagaccagccccaagaaaaagagaaaagtctaagctgccttctgcggggcttgccttctggccatgcccttcttctctcccttgcacctgtacctcttggtctttgaataaagcctgagtaggaaggctagcaaaaaaaaaaaaaaaaaaaaaaaaaaaaaaaaaaaaaaaaaaaaaaaaaaaaaaaaaaaaaaaaaaaaaaaaaaaaaaaa

SEQ ID NO: 3809 - RNA, 5419 nt, synthetic construct
  source 1..5419: mol_type = other RNA
aggaaataagagagaaaagaagagtaagaagaaatataagagccaccatggcccctaagaagaagcgtaaagtgagccgggtgaacggcagcggcagcggcggcggcatgaaccacgaccaggagttcgacccccctaaggtgtaccctcccgtccccgccgagaagagaaagcccatccgggtcctgagcctgttcgatggcatcgccaccggtctgctggtgctgaaggacctgggcatccaggtggataggtacattgcctccgaggtgtgcgaggactccatcaccgtgggaatggtgcgtcatcagggcaagatcatgtacgtgggcgacgtgcggagcgtgacacagaagcatatccaggagtggggccctttcgacctggtgatcggcggcagcccttgcaatgacctgagcatcgtgaacccagcccggaagggcctgtacgagggaaccggcagactgttcttcgagttttacagactgctgcacgacgcccggcctaaggaaggcgacgaccggcccttcttttggctgttcgagaatgtggtggccatgggagtcagcgacaagcgggatattagccggttcctggagagcaaccccgtgatgatcgatgccaaggaagtgagcgccgcccaccgggccagatacttctggggcaatctgcctggcatgaacagacccctggccagcaccgtgaacgacaagctggagctgcaggagtgcctggagcacggccggatcgccaagttcagcaaggtgagaaccatcaccacccgaagcaacagcatcaaacaaggcaaggaccagcactttcctgtgttcatgaacgagaaggaggacatcctgtggtgtaccgagatggagagagtgttcgggttcccagtccactacacagatgtcagcaacatgtctagactggccagacagagactgctgggaagaagctggtccgtccctgtgatcagacacctgttcgcccctctgaaggagtacttcgcctgcgtgagcagcggcaacagcaacgccaacagccggggccccagcttctctagcggcctggtgccactgtccctgagagggagccacatgggccccatggagatctacaaaaccgtgagcgcctggaagcggcagcctgtgcgcgtgctgagcctgtttcggaatatcgataaagtcctgaaaagcctgggattcctggagagcggctctggctccggcggtggcaccctgaagtacgtggaggatgtgacaaacgtggtcagacgggatgtggagaagtggggccccttcgatctggtgtacggcagcacccaacccctgggcagctcttgtgaccggtgccctggctggtacatgtttcagttccaccggatcctgcagtacgccctgccgagacaggagtcccagcggccattcttttggattttcatggacaacttgctgctgaccgaggatgaccaggaaactaccactcggttcctgcagaccgaagccgtgaccctgcaggacgtgagaggccgggactaccagaacgccatgcgggtgtggtccaacatccctggactgaaaagcaagcacgcacctctgacccctaaagaagaggagtacctgcaggcccaggtgcggagcagaagcaagctggacgcccctaaggtggatctgctggtgaagaattgcctcctgcccctgagagagtacttcaagtatttcagccagaatagtctgcccctgggcggcccaagcagcggcgcccctcctcccagcggcggcagcccagccggctccccaacctctaccgaggagggcacctctgagtccgccacccccgagagcggccctggcacctccaccgagcccagcgagggcagcgcacccggcagccctgccggcagccccacctccacagaggagggaaccagcaccgagcccagcgaaggcagcgccccaggcaccagcaccgagcctagtgagggcggctctggcggcggcagcgcccaggagattaaacggatcaacaagatcagaagaagacttgtgaaagacagcaacaccaagaaggccggcaagacaggccccatgaaaaccctgctggttagagtgatgacacccgatctgagagagcggctggaaaacctgagaaagaagcctgaaaatatcccccagcccatcagcaatacatctagagccaacctgaataagctgctgaccgattacaccgaaatgaagaaggcgatcctgcatgtgtactgggaagagttccagaaggaccctgtgggcctgatgagccgggtggcccagcctgccagcaagaagatcgatcagaacaagctgaaacctgagatggacgagaagggcaacctgaccaccgccggctttgcctgctctcagtgtggccagcccctgttcgtgtacaagctggagcaggtgtctgagaagggcaaggcttacaccaactacttcggacggtgcaatgtggccgagcacgaaaagctgatcctgctggcccagctgaagcccgagaaggatagcgacgaagccgtgacatatagcctgggaaagtttgggcagagggccctggatttctacagcattcatgtgaccaaggagtccacccaccccgtgaagcccctggcccagatcgccggaaacagatacgcctccggacctgtgggaaaggccctgagcgacgcatgtatgggcacaatcgcctccttcctgtctaagtaccaggacatcatcatcgaacaccagaaggtggtgaagggcaaccagaagagactggagagcctgcgggagctggccggcaaggaaaacctggaataccctagcgtgaccctgccacctcagcctcacaccaaggagggcgttgatgcctacaacgaagtgatcgcccgggtgcgaatgtgggtgaacctgaacctgtggcagaagctgaagctaagcagagatgatgccaagcctctgctgagactgaagggattcccttcctttcctctggtcgagagacaggccaacgaagtggactggtgggacatggtgtgtaacgtgaagaagctgatcaacgagaaaaaggaggatggcaaggtgttttggcagaatctggctggctacaagagacaggaagccctgagaccatacctgagcagcgaggaagatcggaagaagggaaagaaattcgctcggtaccagctgggcgacctgctgctgcacctggaaaagaagcacggcgaggactggggaaaggtgtacgacgaggcctgggagcggattgacaagaaagtggaaggcctgagcaagcacatcaagctggaagaggaacggagaagcgaggacgcccagagcaaggccgccctgaccgactggctgcgggctaaggccagcttcgtgatcgagggcctgaaggaggccgacaaggacgagttctgcagatgcgagctgaagctgcagaagtggtacggggacctgcggggaaagcccttcgccatcgaagccgagaacagcatcctggacatcagcggcttcagcaagcagtacaactgtgccttcatctggcagaaggacggcgtgaagaagctgaacctgtacctgatcatcaactacttcaagggcggcaagctgcggttcaagaagatcaaacctgaagccttcgaagccaacagattctacaccgtgatcaacaaaaagagcggcgagatcgtgcccatggaggtgaacttcaacttcgacgaccccaacctgatcatcctgcctctggcctttggcaagagacagggcagagaattcatctggaacgacctgctgtccctggaaaccggcagcctgaagctggccaacggaagagtgatcgagaagacactgtacaacagaagaacccggcaggatgagcctgccctgttcgtggccctgaccttcgagcggcgggaggtcctggactcctccaatatcaaaccaatgaacctgatcggcgtggcaagaggcgaaaacatccccgccgtgatcgccctgaccgaccccgagggctgcccactgagccggtttaaggatagcctgggaaacccaacccacatcctgagaatcggcgagagctataaggagaagcagcggaccatccaggccaagaaggaggtggagcagcggagagccggcggctacagccggaagtacgccagcaaagccaagaatctggcagacgatatggtgagaaacaccgctagagatctgctgtactacgccgtgacccaggatgccatgctgatcttcgccaacctgagccggggcttcggccggcagggcaagcggaccttcatggccgagagacagtacacacggatggaggactggctgaccgccaagctggcctacgagggcctgagcaagacctacctgtccaagacactggcccagtacacctccaagacatgcagcaactgtgggtttaccatcaccagcgccgactacgacagggtgctggagaagctgaagaagacagcaacaggctggatgaccacaattaacggcaaggagctgaaggtggagggccagattacctactacaacagatacaagagacagaacgtagtcaaggacctgtccgtcgagctggatagactgagcgaagaatctgtgaacaacgacatctcctcctggacaaagggcagaagcggagaagctctgagcctcctgaagaaaagattctcccatagacccgtgcaggagaagttcgtgtgcctgaactgcggcttcgagacacacgcagccgagcaagccgccctgaacatcgccagatcctggctgttcctgcggagccaggagtacaagaaataccagacaaacaagacaaccggcaacaccgataagagagccttcgtcgagacctggcagtccttttaccggaagaagcttaaggaggtgtggaaacctgccgtgcggtctggcggatctggcggaggctccacaagcatgatcaacgcccaggagctgctgaccctggaggacgtgaccgtggagttcacctgggaggagtggcagctgctggaccccttccagaaggacctgtacagggacgtgaccctggagatctacagcaacctggtgagcatgggctaccaggtgagcaagcccgacgccctgagcaagctggagcagggcgaggagccctggaccatggaggacgagaggcacagcaggatctgccccggcaccaccagccccaagaaaaagagaaaagtctaagctgccttctgcggggcttgccttctggccatgcccttcttctctcccttgcacctgtacctcttggtctttgaataaagcctgagtaggaaggctagcaaaaaaaaaaaaaaaaaaaaaaaaaaaaaaaaaaaaaaaaaaaaaaaaaaaaaaaaaaaaaaaaaaaaaaaaaaaaaaaa

SEQ ID NO: 3810 - RNA, 5419 nt, synthetic construct
  source 1..5419: mol_type = other RNA
aggaaataagagagaaaagaagagtaagaagaaatataagagccaccatggcccctaagaagaagcgtaaagtgagccgggtgaacggcagcggcagcggcggcggcatgaaccacgaccaggagttcgacccccctaaggtgtaccctcccgtccccgccgagaagagaaagcccatccgggtcctgagcctgttcgatggcatcgccaccggtctgctggtgctgaaggacctgggcatccaggtggataggtacattgcctccgaggtgtgcgaggactccatcaccgtgggaatggtgcgtcatcagggcaagatcatgtacgtgggcgacgtgcggagcgtgacacagaagcatatccaggagtggggccctttcgacctggtgatcggcggcagcccttgcaatgacctgagcatcgtgaacccagcccggaagggcctgtacgagggaaccggcagactgttcttcgagttttacagactgctgcacgacgcccggcctaaggaaggcgacgaccggcccttcttttggctgttcgagaatgtggtggccatgggagtcagcgacaagcgggatattagccggttcctggagagcaaccccgtgatgatcgatgccaaggaagtgagcgccgcccaccgggccagatacttctggggcaatctgcctggcatgaacagacccctggccagcaccgtgaacgacaagctggagctgcaggagtgcctggagcacggccggatcgccaagttcagcaaggtgagaaccatcaccacccgaagcaacagcatcaaacaaggcaaggaccagcactttcctgtgttcatgaacgagaaggaggacatcctgtggtgtaccgagatggagagagtgttcgggttcccagtccactacacagatgtcagcaacatgtctagactggccagacagagactgctgggaagaagctggtccgtccctgtgatcagacacctgttcgcccctctgaaggagtacttcgcctgcgtgagcagcggcaacagcaacgccaacagccggggccccagcttctctagcggcctggtgccactgtccctgagagggagccacatgggccccatggagatctacaaaaccgtgagcgcctggaagcggcagcctgtgcgcgtgctgagcctgtttcggaatatcgataaagtcctgaaaagcctgggattcctggagagcggctctggctccggcggtggcaccctgaagtacgtggaggatgtgacaaacgtggtcagacgggatgtggagaagtggggccccttcgatctggtgtacggcagcacccaacccctgggcagctcttgtgaccggtgccctggctggtacatgtttcagttccaccggatcctgcagtacgccctgccgagacaggagtcccagcggccattcttttggattttcatggacaacttgctgctgaccgaggatgaccaggaaactaccactcggttcctgcagaccgaagccgtgaccctgcaggacgtgagaggccgggactaccagaacgccatgcgggtgtggtccaacatccctggactgaaaagcaagcacgcacctctgacccctaaagaagaggagtacctgcaggcccaggtgcggagcagaagcaagctggacgcccctaaggtggatctgctggtgaagaattgcctcctgcccctgagagagtacttcaagtatttcagccagaatagtctgcccctgggcggcccaagcagcggcgcccctcctcccagcggcggcagcccagccggctccccaacctctaccgaggagggcacctctgagtccgccacccccgagagcggccctggcacctccaccgagcccagcgagggcagcgcacccggcagccctgccggcagccccacctccacagaggagggaaccagcaccgagcccagcgaaggcagcgccccaggcaccagcaccgagcctagtgagggcggctctggcggcggcagcgcccaggagattaaacggatcaacaagatcagaagaagacttgtgaaagacagcaacaccaagaaggccggcaagacaggccccatgaaaaccctgctggttagagtgatgacacccgatctgagagagcggctggaaaacctgagaaagaagcctgaaaatatcccccagcccatcagcaatacatctagagccaacctgaataagctgctgaccgattacaccgaaatgaagaaggcgatcctgcatgtgtactgggaagagttccagaaggaccctgtgggcctgatgagccgggtggcccagcctgccagcaagaagatcgatcagaacaagctgaaacctgagatggacgagaagggcaacctgaccaccgccggctttgcctgctctcagtgtggccagcccctgttcgtgtacaagctggagcaggtgtctgagaagggcaaggcttacaccaactacttcggacggtgcaatgtggccgagcacgaaaagctgatcctgctggcccagctgaagcccgagaaggatagcgacgaagccgtgacatatagcctgggaaagtttgggcagagggccctggatttctacagcattcatgtgaccaaggagtccacccaccccgtgaagcccctggcccagatcgccggaaacagatacgcctccggacctgtgggaaaggccctgagcgacgcatgtatgggcacaatcgcctccttcctgtctaagtaccaggacatcatcatcgaacaccagaaggtggtgaagggcaaccagaagagactggagagcctgcgggagctggccggcaaggaaaacctggaataccctagcgtgaccctgccacctcagcctcacaccaaggagggcgttgatgcctacaacgaagtgatcgcccgggtgcgaatgtgggtgaacctgaacctgtggcagaagctgaagctaagcagagatgatgccaagcctctgctgagactgaagggattcccttcctttcctctggtcgagagacaggccaacgaagtggactggtgggacatggtgtgtaacgtgaagaagctgatcaacgagaaaaaggaggatggcaaggtgttttggcagaatctggctggctacaagagacaggaagccctgagaccatacctgagcagcgaggaagatcggaagaagggaaagaaattcgctcggtaccagctgggcgacctgctgctgcacctggaaaagaagcacggcgaggactggggaaaggtgtacgacgaggcctgggagcggattgacaagaaagtggaaggcctgagcaagcacatcaagctggaagaggaacggagaagcgaggacgcccagagcaaggccgccctgaccgactggctgcgggctaaggccagcttcgtgatcgagggcctgaaggaggccgacaaggacgagttctgcagatgcgagctgaagctgcagaagtggtacggggacctgcggggaaagcccttcgccatcgaagccgagaacagcatcctggacatcagcggcttcagcaagcagtacaactgtgccttcatctggcagaaggacggcgtgaagaagctgaacctgtacctgatcatcaactacttcaagggcggcaagctgcggttcaagaagatcaaacctgaagccttcgaagccaacagattctacaccgtgatcaacaaaaagagcggcgagatcgtgcccatggaggtgaacttcaacttcgacgaccccaacctgatcatcctgcctctggcctttggcaagagacagggcagagaattcatctggaacgacctgctgtccctggaaaccggcagcctgaagctggccaacggaagagtgatcgagaagacactgtacaacagaagaacccggcaggatgagcctgccctgttcgtggccctgaccttcgagcggcgggaggtcctggactcctccaatatcaaaccaatgaacctgatcggcgtggcaagaggcgaaaacatccccgccgtgatcgccctgaccgaccccgagggctgcccactgagccggtttaaggatagcctgggaaacccaacccacatcctgagaatcggcgagagctataaggagaagcagcggaccatccaggccaagaaggaggtggagcagcggagagccggcggctacagccggaagtacgccagcaaagccaagaatctggcagacgatatggtgagaaacaccgctagagatctgctgtactacgccgtgacccaggatgccatgctgatcttcgccaacctgagccggggcttcggccggcagggcaagcggaccttcatggccgagagacagtacacacggatggaggactggctgaccgccaagctggcctacgagggcctgagcaagacctacctgtccaagacactggcccagtacacctccaagacatgcagcaactgtgggtttaccatcaccagcgccgactacgacagggtgctggagaagctgaagaagacagcaacaggctggatgaccacaattaacggcaaggagctgaaggtggagggccagattacctactacaacagatacaagagacagaacgtagtcaaggacctgtccgtcgagctggatagactgagcgaagaatctgtgaacaacgacatctcctcctggacaaagggcagaagcggagaagctctgagcctcctgaagaaaagattctcccatagacccgtgcaggagaagttcgtgtgcctgaactgcggcttcgagacacacgcagccgagcaagccgccctgaacatcgccagatcctggctgttcctgcggagccaggagtacaagaaataccagacaaacaagacaaccggcaacaccgataagagagccttcgtcgagacctggcagtccttttaccggaagaagcttaaggaggtgtggaaacctgccgtgcggtctggcggatctggcggaggctccacaagcccccagggcctggtgaccttcagggacgtggccgtggacttcaccagggaggagtggaggctgctgagccccaggcagaaggagctgtacaaggaggtgatgctggagaacgccggcaacctgctgagcctgggcctgcccgtgcccagggaggacgtgatcagctacttcgagcagaaggacgtgccctggatgctggagcagaaggccctgaggagcttctgccccggcggccccgtgaagaccagccccaagaaaaagagaaaagtctaagctgccttctgcggggcttgccttctggccatgcccttcttctctcccttgcacctgtacctcttggtctttgaataaagcctgagtaggaaggctagcaaaaaaaaaaaaaaaaaaaaaaaaaaaaaaaaaaaaaaaaaaaaaaaaaaaaaaaaaaaaaaaaaaaaaaaaaaaaaaaa

SEQ ID NO: 3811 - RNA, 5419 nt, synthetic construct
  source 1..5419: mol_type = other RNA
aggaaataagagagaaaagaagagtaagaagaaatataagagccaccatggcccctaagaagaagcgtaaagtgagccgggtgaacggcagcggcagcggcggcggcatgaaccacgaccaggagttcgacccccctaaggtgtaccctcccgtccccgccgagaagagaaagcccatccgggtcctgagcctgttcgatggcatcgccaccggtctgctggtgctgaaggacctgggcatccaggtggataggtacattgcctccgaggtgtgcgaggactccatcaccgtgggaatggtgcgtcatcagggcaagatcatgtacgtgggcgacgtgcggagcgtgacacagaagcatatccaggagtggggccctttcgacctggtgatcggcggcagcccttgcaatgacctgagcatcgtgaacccagcccggaagggcctgtacgagggaaccggcagactgttcttcgagttttacagactgctgcacgacgcccggcctaaggaaggcgacgaccggcccttcttttggctgttcgagaatgtggtggccatgggagtcagcgacaagcgggatattagccggttcctggagagcaaccccgtgatgatcgatgccaaggaagtgagcgccgcccaccgggccagatacttctggggcaatctgcctggcatgaacagacccctggccagcaccgtgaacgacaagctggagctgcaggagtgcctggagcacggccggatcgccaagttcagcaaggtgagaaccatcaccacccgaagcaacagcatcaaacaaggcaaggaccagcactttcctgtgttcatgaacgagaaggaggacatcctgtggtgtaccgagatggagagagtgttcgggttcccagtccactacacagatgtcagcaacatgtctagactggccagacagagactgctgggaagaagctggtccgtccctgtgatcagacacctgttcgcccctctgaaggagtacttcgcctgcgtgagcagcggcaacagcaacgccaacagccggggccccagcttctctagcggcctggtgccactgtccctgagagggagccacatgggccccatggagatctacaaaaccgtgagcgcctggaagcggcagcctgtgcgcgtgctgagcctgtttcggaatatcgataaagtcctgaaaagcctgggattcctggagagcggctctggctccggcggtggcaccctgaagtacgtggaggatgtgacaaacgtggtcagacgggatgtggagaagtggggccccttcgatctggtgtacggcagcacccaacccctgggcagctcttgtgaccggtgccctggctggtacatgtttcagttccaccggatcctgcagtacgccctgccgagacaggagtcccagcggccattcttttggattttcatggacaacttgctgctgaccgaggatgaccaggaaactaccactcggttcctgcagaccgaagccgtgaccctgcaggacgtgagaggccgggactaccagaacgccatgcgggtgtggtccaacatccctggactgaaaagcaagcacgcacctctgacccctaaagaagaggagtacctgcaggcccaggtgcggagcagaagcaagctggacgcccctaaggtggatctgctggtgaagaattgcctcctgcccctgagagagtacttcaagtatttcagccagaatagtctgcccctgggcggcccaagcagcggcgcccctcctcccagcggcggcagcccagccggctccccaacctctaccgaggagggcacctctgagtccgccacccccgagagcggccctggcacctccaccgagcccagcgagggcagcgcacccggcagccctgccggcagccccacctccacagaggagggaaccagcaccgagcccagcgaaggcagcgccccaggcaccagcaccgagcctagtgagggcggctctggcggcggcagcgcccaggagattaaacggatcaacaagatcagaagaagacttgtgaaagacagcaacaccaagaaggccggcaagacaggccccatgaaaaccctgctggttagagtgatgacacccgatctgagagagcggctggaaaacctgagaaagaagcctgaaaatatcccccagcccatcagcaatacatctagagccaacctgaataagctgctgaccgattacaccgaaatgaagaaggcgatcctgcatgtgtactgggaagagttccagaaggaccctgtgggcctgatgagccgggtggcccagcctgccagcaagaagatcgatcagaacaagctgaaacctgagatggacgagaagggcaacctgaccaccgccggctttgcctgctctcagtgtggccagcccctgttcgtgtacaagctggagcaggtgtctgagaagggcaaggcttacaccaactacttcggacggtgcaatgtggccgagcacgaaaagctgatcctgctggcccagctgaagcccgagaaggatagcgacgaagccgtgacatatagcctgggaaagtttgggcagagggccctggatttctacagcattcatgtgaccaaggagtccacccaccccgtgaagcccctggcccagatcgccggaaacagatacgcctccggacctgtgggaaaggccctgagcgacgcatgtatgggcacaatcgcctccttcctgtctaagtaccaggacatcatcatcgaacaccagaaggtggtgaagggcaaccagaagagactggagagcctgcgggagctggccggcaaggaaaacctggaataccctagcgtgaccctgccacctcagcctcacaccaaggagggcgttgatgcctacaacgaagtgatcgcccgggtgcgaatgtgggtgaacctgaacctgtggcagaagctgaagctaagcagagatgatgccaagcctctgctgagactgaagggattcccttcctttcctctggtcgagagacaggccaacgaagtggactggtgggacatggtgtgtaacgtgaagaagctgatcaacgagaaaaaggaggatggcaaggtgttttggcagaatctggctggctacaagagacaggaagccctgagaccatacctgagcagcgaggaagatcggaagaagggaaagaaattcgctcggtaccagctgggcgacctgctgctgcacctggaaaagaagcacggcgaggactggggaaaggtgtacgacgaggcctgggagcggattgacaagaaagtggaaggcctgagcaagcacatcaagctggaagaggaacggagaagcgaggacgcccagagcaaggccgccctgaccgactggctgcgggctaaggccagcttcgtgatcgagggcctgaaggaggccgacaaggacgagttctgcagatgcgagctgaagctgcagaagtggtacggggacctgcggggaaagcccttcgccatcgaagccgagaacagcatcctggacatcagcggcttcagcaagcagtacaactgtgccttcatctggcagaaggacggcgtgaagaagctgaacctgtacctgatcatcaactacttcaagggcggcaagctgcggttcaagaagatcaaacctgaagccttcgaagccaacagattctacaccgtgatcaacaaaaagagcggcgagatcgtgcccatggaggtgaacttcaacttcgacgaccccaacctgatcatcctgcctctggcctttggcaagagacagggcagagaattcatctggaacgacctgctgtccctggaaaccggcagcctgaagctggccaacggaagagtgatcgagaagacactgtacaacagaagaacccggcaggatgagcctgccctgttcgtggccctgaccttcgagcggcgggaggtcctggactcctccaatatcaaaccaatgaacctgatcggcgtggcaagaggcgaaaacatccccgccgtgatcgccctgaccgaccccgagggctgcccactgagccggtttaaggatagcctgggaaacccaacccacatcctgagaatcggcgagagctataaggagaagcagcggaccatccaggccaagaaggaggtggagcagcggagagccggcggctacagccggaagtacgccagcaaagccaagaatctggcagacgatatggtgagaaacaccgctagagatctgctgtactacgccgtgacccaggatgccatgctgatcttcgccaacctgagccggggcttcggccggcagggcaagcggaccttcatggccgagagacagtacacacggatggaggactggctgaccgccaagctggcctacgagggcctgagcaagacctacctgtccaagacactggcccagtacacctccaagacatgcagcaactgtgggtttaccatcaccagcgccgactacgacagggtgctggagaagctgaagaagacagcaacaggctggatgaccacaattaacggcaaggagctgaaggtggagggccagattacctactacaacagatacaagagacagaacgtagtcaaggacctgtccgtcgagctggatagactgagcgaagaatctgtgaacaacgacatctcctcctggacaaagggcagaagcggagaagctctgagcctcctgaagaaaagattctcccatagacccgtgcaggagaagttcgtgtgcctgaactgcggcttcgagacacacgcagccgagcaagccgccctgaacatcgccagatcctggctgttcctgcggagccaggagtacaagaaataccagacaaacaagacaaccggcaacaccgataagagagccttcgtcgagacctggcagtccttttaccggaagaagcttaaggaggtgtggaaacctgccgtgcggtctggcggatctggcggaggctccacaagcatgttccagaccgcctggaggcaggagcccgtgaccttcgaggacgtggccgtgtacttcacccagaacgagtgggccagcctggacagcgtgcagagggccctgtacagggaggtgatgctggagaactacgccaacgtggccagcctggccttccccttcaccacccccgtgctggtgagccagctggagcagggcgagctgccctggggcctggacccctgggagcccatgggcagggagaccagccccaagaaaaagagaaaagtctaagctgccttctgcggggcttgccttctggccatgcccttcttctctcccttgcacctgtacctcttggtctttgaataaagcctgagtaggaaggctagcaaaaaaaaaaaaaaaaaaaaaaaaaaaaaaaaaaaaaaaaaaaaaaaaaaaaaaaaaaaaaaaaaaaaaaaaaaaaaaaa

SEQ ID NO: 3812 - RNA, 5419 nt, synthetic construct
  source 1..5419: mol_type = other RNA
aggaaataagagagaaaagaagagtaagaagaaatataagagccaccatggcccctaagaagaagcgtaaagtgagccgggtgaacggcagcggcagcggcggcggcatgaaccacgaccaggagttcgacccccctaaggtgtaccctcccgtccccgccgagaagagaaagcccatccgggtcctgagcctgttcgatggcatcgccaccggtctgctggtgctgaaggacctgggcatccaggtggataggtacattgcctccgaggtgtgcgaggactccatcaccgtgggaatggtgcgtcatcagggcaagatcatgtacgtgggcgacgtgcggagcgtgacacagaagcatatccaggagtggggccctttcgacctggtgatcggcggcagcccttgcaatgacctgagcatcgtgaacccagcccggaagggcctgtacgagggaaccggcagactgttcttcgagttttacagactgctgcacgacgcccggcctaaggaaggcgacgaccggcccttcttttggctgttcgagaatgtggtggccatgggagtcagcgacaagcgggatattagccggttcctggagagcaaccccgtgatgatcgatgccaaggaagtgagcgccgcccaccgggccagatacttctggggcaatctgcctggcatgaacagacccctggccagcaccgtgaacgacaagctggagctgcaggagtgcctggagcacggccggatcgccaagttcagcaaggtgagaaccatcaccacccgaagcaacagcatcaaacaaggcaaggaccagcactttcctgtgttcatgaacgagaaggaggacatcctgtggtgtaccgagatggagagagtgttcgggttcccagtccactacacagatgtcagcaacatgtctagactggccagacagagactgctgggaagaagctggtccgtccctgtgatcagacacctgttcgcccctctgaaggagtacttcgcctgcgtgagcagcggcaacagcaacgccaacagccggggccccagcttctctagcggcctggtgccactgtccctgagagggagccacatgggccccatggagatctacaaaaccgtgagcgcctggaagcggcagcctgtgcgcgtgctgagcctgtttcggaatatcgataaagtcctgaaaagcctgggattcctggagagcggctctggctccggcggtggcaccctgaagtacgtggaggatgtgacaaacgtggtcagacgggatgtggagaagtggggccccttcgatctggtgtacggcagcacccaacccctgggcagctcttgtgaccggtgccctggctggtacatgtttcagttccaccggatcctgcagtacgccctgccgagacaggagtcccagcggccattcttttggattttcatggacaacttgctgctgaccgaggatgaccaggaaactaccactcggttcctgcagaccgaagccgtgaccctgcaggacgtgagaggccgggactaccagaacgccatgcgggtgtggtccaacatccctggactgaaaagcaagcacgcacctctgacccctaaagaagaggagtacctgcaggcccaggtgcggagcagaagcaagctggacgcccctaaggtggatctgctggtgaagaattgcctcctgcccctgagagagtacttcaagtatttcagccagaatagtctgcccctgggcggcccaagcagcggcgcccctcctcccagcggcggcagcccagccggctccccaacctctaccgaggagggcacctctgagtccgccacccccgagagcggccctggcacctccaccgagcccagcgagggcagcgcacccggcagccctgccggcagccccacctccacagaggagggaaccagcaccgagcccagcgaaggcagcgccccaggcaccagcaccgagcctagtgagggcggctctggcggcggcagcgcccaggagattaaacggatcaacaagatcagaagaagacttgtgaaagacagcaacaccaagaaggccggcaagacaggccccatgaaaaccctgctggttagagtgatgacacccgatctgagagagcggctggaaaacctgagaaagaagcctgaaaatatcccccagcccatcagcaatacatctagagccaacctgaataagctgctgaccgattacaccgaaatgaagaaggcgatcctgcatgtgtactgggaagagttccagaaggaccctgtgggcctgatgagccgggtggcccagcctgccagcaagaagatcgatcagaacaagctgaaacctgagatggacgagaagggcaacctgaccaccgccggctttgcctgctctcagtgtggccagcccctgttcgtgtacaagctggagcaggtgtctgagaagggcaaggcttacaccaactacttcggacggtgcaatgtggccgagcacgaaaagctgatcctgctggcccagctgaagcccgagaaggatagcgacgaagccgtgacatatagcctgggaaagtttgggcagagggccctggatttctacagcattcatgtgaccaaggagtccacccaccccgtgaagcccctggcccagatcgccggaaacagatacgcctccggacctgtgggaaaggccctgagcgacgcatgtatgggcacaatcgcctccttcctgtctaagtaccaggacatcatcatcgaacaccagaaggtggtgaagggcaaccagaagagactggagagcctgcgggagctggccggcaaggaaaacctggaataccctagcgtgaccctgccacctcagcctcacaccaaggagggcgttgatgcctacaacgaagtgatcgcccgggtgcgaatgtgggtgaacctgaacctgtggcagaagctgaagctaagcagagatgatgccaagcctctgctgagactgaagggattcccttcctttcctctggtcgagagacaggccaacgaagtggactggtgggacatggtgtgtaacgtgaagaagctgatcaacgagaaaaaggaggatggcaaggtgttttggcagaatctggctggctacaagagacaggaagccctgagaccatacctgagcagcgaggaagatcggaagaagggaaagaaattcgctcggtaccagctgggcgacctgctgctgcacctggaaaagaagcacggcgaggactggggaaaggtgtacgacgaggcctgggagcggattgacaagaaagtggaaggcctgagcaagcacatcaagctggaagaggaacggagaagcgaggacgcccagagcaaggccgccctgaccgactggctgcgggctaaggccagcttcgtgatcgagggcctgaaggaggccgacaaggacgagttctgcagatgcgagctgaagctgcagaagtggtacggggacctgcggggaaagcccttcgccatcgaagccgagaacagcatcctggacatcagcggcttcagcaagcagtacaactgtgccttcatctggcagaaggacggcgtgaagaagctgaacctgtacctgatcatcaactacttcaagggcggcaagctgcggttcaagaagatcaaacctgaagccttcgaagccaacagattctacaccgtgatcaacaaaaagagcggcgagatcgtgcccatggaggtgaacttcaacttcgacgaccccaacctgatcatcctgcctctggcctttggcaagagacagggcagagaattcatctggaacgacctgctgtccctggaaaccggcagcctgaagctggccaacggaagagtgatcgagaagacactgtacaacagaagaacccggcaggatgagcctgccctgttcgtggccctgaccttcgagcggcgggaggtcctggactcctccaatatcaaaccaatgaacctgatcggcgtggcaagaggcgaaaacatccccgccgtgatcgccctgaccgaccccgagggctgcccactgagccggtttaaggatagcctgggaaacccaacccacatcctgagaatcggcgagagctataaggagaagcagcggaccatccaggccaagaaggaggtggagcagcggagagccggcggctacagccggaagtacgccagcaaagccaagaatctggcagacgatatggtgagaaacaccgctagagatctgctgtactacgccgtgacccaggatgccatgctgatcttcgccaacctgagccggggcttcggccggcagggcaagcggaccttcatggccgagagacagtacacacggatggaggactggctgaccgccaagctggcctacgagggcctgagcaagacctacctgtccaagacactggcccagtacacctccaagacatgcagcaactgtgggtttaccatcaccagcgccgactacgacagggtgctggagaagctgaagaagacagcaacaggctggatgaccacaattaacggcaaggagctgaaggtggagggccagattacctactacaacagatacaagagacagaacgtagtcaaggacctgtccgtcgagctggatagactgagcgaagaatctgtgaacaacgacatctcctcctggacaaagggcagaagcggagaagctctgagcctcctgaagaaaagattctcccatagacccgtgcaggagaagttcgtgtgcctgaactgcggcttcgagacacacgcagccgagcaagccgccctgaacatcgccagatcctggctgttcctgcggagccaggagtacaagaaataccagacaaacaagacaaccggcaacaccgataagagagccttcgtcgagacctggcagtccttttaccggaagaagcttaaggaggtgtggaaacctgccgtgcggtctggcggatctggcggaggctccacaagcatgttccaggtgaccttcagcgacgtggccatcgacttcagccacgaggagtggggctggctggacagcgcccagagggacctgtacaaggacgtgatggtgcagaactacgagaacctggtgagcctgggcctgagcatccccaagcccaacgtgatcgccctgctggaggagggcaaggacccctggatggtggagaggaagctgagcaccgactgggacagcaggtgggagaacaaggagaccagccccaagaaaaagagaaaagtctaagctgccttctgcggggcttgccttctggccatgcccttcttctctcccttgcacctgtacctcttggtctttgaataaagcctgagtaggaaggctagcaaaaaaaaaaaaaaaaaaaaaaaaaaaaaaaaaaaaaaaaaaaaaaaaaaaaaaaaaaaaaaaaaaaaaaaaaaaaaaaa

SEQ ID NO: 3813 - RNA, 5419 nt, synthetic construct
  source 1..5419: mol_type = other RNA
aggaaataagagagaaaagaagagtaagaagaaatataagagccaccatggcccctaagaagaagcgtaaagtgagccgggtgaacggcagcggcagcggcggcggcatgaaccacgaccaggagttcgacccccctaaggtgtaccctcccgtccccgccgagaagagaaagcccatccgggtcctgagcctgttcgatggcatcgccaccggtctgctggtgctgaaggacctgggcatccaggtggataggtacattgcctccgaggtgtgcgaggactccatcaccgtgggaatggtgcgtcatcagggcaagatcatgtacgtgggcgacgtgcggagcgtgacacagaagcatatccaggagtggggccctttcgacctggtgatcggcggcagcccttgcaatgacctgagcatcgtgaacccagcccggaagggcctgtacgagggaaccggcagactgttcttcgagttttacagactgctgcacgacgcccggcctaaggaaggcgacgaccggcccttcttttggctgttcgagaatgtggtggccatgggagtcagcgacaagcgggatattagccggttcctggagagcaaccccgtgatgatcgatgccaaggaagtgagcgccgcccaccgggccagatacttctggggcaatctgcctggcatgaacagacccctggccagcaccgtgaacgacaagctggagctgcaggagtgcctggagcacggccggatcgccaagttcagcaaggtgagaaccatcaccacccgaagcaacagcatcaaacaaggcaaggaccagcactttcctgtgttcatgaacgagaaggaggacatcctgtggtgtaccgagatggagagagtgttcgggttcccagtccactacacagatgtcagcaacatgtctagactggccagacagagactgctgggaagaagctggtccgtccctgtgatcagacacctgttcgcccctctgaaggagtacttcgcctgcgtgagcagcggcaacagcaacgccaacagccggggccccagcttctctagcggcctggtgccactgtccctgagagggagccacatgggccccatggagatctacaaaaccgtgagcgcctggaagcggcagcctgtgcgcgtgctgagcctgtttcggaatatcgataaagtcctgaaaagcctgggattcctggagagcggctctggctccggcggtggcaccctgaagtacgtggaggatgtgacaaacgtggtcagacgggatgtggagaagtggggccccttcgatctggtgtacggcagcacccaacccctgggcagctcttgtgaccggtgccctggctggtacatgtttcagttccaccggatcctgcagtacgccctgccgagacaggagtcccagcggccattcttttggattttcatggacaacttgctgctgaccgaggatgaccaggaaactaccactcggttcctgcagaccgaagccgtgaccctgcaggacgtgagaggccgggactaccagaacgccatgcgggtgtggtccaacatccctggactgaaaagcaagcacgcacctctgacccctaaagaagaggagtacctgcaggcccaggtgcggagcagaagcaagctggacgcccctaaggtggatctgctggtgaagaattgcctcctgcccctgagagagtacttcaagtatttcagccagaatagtctgcccctgggcggcccaagcagcggcgcccctcctcccagcggcggcagcccagccggctccccaacctctaccgaggagggcacctctgagtccgccacccccgagagcggccctggcacctccaccgagcccagcgagggcagcgcacccggcagccctgccggcagccccacctccacagaggagggaaccagcaccgagcccagcgaaggcagcgccccaggcaccagcaccgagcctagtgagggcggctctggcggcggcagcgcccaggagattaaacggatcaacaagatcagaagaagacttgtgaaagacagcaacaccaagaaggccggcaagacaggccccatgaaaaccctgctggttagagtgatgacacccgatctgagagagcggctggaaaacctgagaaagaagcctgaaaatatcccccagcccatcagcaatacatctagagccaacctgaataagctgctgaccgattacaccgaaatgaagaaggcgatcctgcatgtgtactgggaagagttccagaaggaccctgtgggcctgatgagccgggtggcccagcctgccagcaagaagatcgatcagaacaagctgaaacctgagatggacgagaagggcaacctgaccaccgccggctttgcctgctctcagtgtggccagcccctgttcgtgtacaagctggagcaggtgtctgagaagggcaaggcttacaccaactacttcggacggtgcaatgtggccgagcacgaaaagctgatcctgctggcccagctgaagcccgagaaggatagcgacgaagccgtgacatatagcctgggaaagtttgggcagagggccctggatttctacagcattcatgtgaccaaggagtccacccaccccgtgaagcccctggcccagatcgccggaaacagatacgcctccggacctgtgggaaaggccctgagcgacgcatgtatgggcacaatcgcctccttcctgtctaagtaccaggacatcatcatcgaacaccagaaggtggtgaagggcaaccagaagagactggagagcctgcgggagctggccggcaaggaaaacctggaataccctagcgtgaccctgccacctcagcctcacaccaaggagggcgttgatgcctacaacgaagtgatcgcccgggtgcgaatgtgggtgaacctgaacctgtggcagaagctgaagctaagcagagatgatgccaagcctctgctgagactgaagggattcccttcctttcctctggtcgagagacaggccaacgaagtggactggtgggacatggtgtgtaacgtgaagaagctgatcaacgagaaaaaggaggatggcaaggtgttttggcagaatctggctggctacaagagacaggaagccctgagaccatacctgagcagcgaggaagatcggaagaagggaaagaaattcgctcggtaccagctgggcgacctgctgctgcacctggaaaagaagcacggcgaggactggggaaaggtgtacgacgaggcctgggagcggattgacaagaaagtggaaggcctgagcaagcacatcaagctggaagaggaacggagaagcgaggacgcccagagcaaggccgccctgaccgactggctgcgggctaaggccagcttcgtgatcgagggcctgaaggaggccgacaaggacgagttctgcagatgcgagctgaagctgcagaagtggtacggggacctgcggggaaagcccttcgccatcgaagccgagaacagcatcctggacatcagcggcttcagcaagcagtacaactgtgccttcatctggcagaaggacggcgtgaagaagctgaacctgtacctgatcatcaactacttcaagggcggcaagctgcggttcaagaagatcaaacctgaagccttcgaagccaacagattctacaccgtgatcaacaaaaagagcggcgagatcgtgcccatggaggtgaacttcaacttcgacgaccccaacctgatcatcctgcctctggcctttggcaagagacagggcagagaattcatctggaacgacctgctgtccctggaaaccggcagcctgaagctggccaacggaagagtgatcgagaagacactgtacaacagaagaacccggcaggatgagcctgccctgttcgtggccctgaccttcgagcggcgggaggtcctggactcctccaatatcaaaccaatgaacctgatcggcgtggcaagaggcgaaaacatccccgccgtgatcgccctgaccgaccccgagggctgcccactgagccggtttaaggatagcctgggaaacccaacccacatcctgagaatcggcgagagctataaggagaagcagcggaccatccaggccaagaaggaggtggagcagcggagagccggcggctacagccggaagtacgccagcaaagccaagaatctggcagacgatatggtgagaaacaccgctagagatctgctgtactacgccgtgacccaggatgccatgctgatcttcgccaacctgagccggggcttcggccggcagggcaagcggaccttcatggccgagagacagtacacacggatggaggactggctgaccgccaagctggcctacgagggcctgagcaagacctacctgtccaagacactggcccagtacacctccaagacatgcagcaactgtgggtttaccatcaccagcgccgactacgacagggtgctggagaagctgaagaagacagcaacaggctggatgaccacaattaacggcaaggagctgaaggtggagggccagattacctactacaacagatacaagagacagaacgtagtcaaggacctgtccgtcgagctggatagactgagcgaagaatctgtgaacaacgacatctcctcctggacaaagggcagaagcggagaagctctgagcctcctgaagaaaagattctcccatagacccgtgcaggagaagttcgtgtgcctgaactgcggcttcgagacacacgcagccgagcaagccgccctgaacatcgccagatcctggctgttcctgcggagccaggagtacaagaaataccagacaaacaagacaaccggcaacaccgataagagagccttcgtcgagacctggcagtccttttaccggaagaagcttaaggaggtgtggaaacctgccgtgcggtctggcggatctggcggaggctccacaagcatgatcaccgcccagggccccgtgagcttcagggacgtgaccgtgggcttcacccaggaggagtggcagcacctggaccccgcccagaggaccctgtacagggacgtgatgatcgagaactacagccacctggtgagcgtgggctactgcatccccaagcccgaggtgatcctgaagctggagaagggcgaggagccctggatcagcgaggagaagttccccagccagagccacctggagctgaccagccccaagaaaaagagaaaagtctaagctgccttctgcggggcttgccttctggccatgcccttcttctctcccttgcacctgtacctcttggtctttgaataaagcctgagtaggaaggctagcaaaaaaaaaaaaaaaaaaaaaaaaaaaaaaaaaaaaaaaaaaaaaaaaaaaaaaaaaaaaaaaaaaaaaaaaaaaaaaaa

SEQ ID NO: 3814 - RNA, 5419 nt, synthetic construct
  source 1..5419: mol_type = other RNA
aggaaataagagagaaaagaagagtaagaagaaatataagagccaccatggcccctaagaagaagcgtaaagtgagccgggtgaacggcagcggcagcggcggcggcatgaaccacgaccaggagttcgacccccctaaggtgtaccctcccgtccccgccgagaagagaaagcccatccgggtcctgagcctgttcgatggcatcgccaccggtctgctggtgctgaaggacctgggcatccaggtggataggtacattgcctccgaggtgtgcgaggactccatcaccgtgggaatggtgcgtcatcagggcaagatcatgtacgtgggcgacgtgcggagcgtgacacagaagcatatccaggagtggggccctttcgacctggtgatcggcggcagcccttgcaatgacctgagcatcgtgaacccagcccggaagggcctgtacgagggaaccggcagactgttcttcgagttttacagactgctgcacgacgcccggcctaaggaaggcgacgaccggcccttcttttggctgttcgagaatgtggtggccatgggagtcagcgacaagcgggatattagccggttcctggagagcaaccccgtgatgatcgatgccaaggaagtgagcgccgcccaccgggccagatacttctggggcaatctgcctggcatgaacagacccctggccagcaccgtgaacgacaagctggagctgcaggagtgcctggagcacggccggatcgccaagttcagcaaggtgagaaccatcaccacccgaagcaacagcatcaaacaaggcaaggaccagcactttcctgtgttcatgaacgagaaggaggacatcctgtggtgtaccgagatggagagagtgttcgggttcccagtccactacacagatgtcagcaacatgtctagactggccagacagagactgctgggaagaagctggtccgtccctgtgatcagacacctgttcgcccctctgaaggagtacttcgcctgcgtgagcagcggcaacagcaacgccaacagccggggccccagcttctctagcggcctggtgccactgtccctgagagggagccacatgggccccatggagatctacaaaaccgtgagcgcctggaagcggcagcctgtgcgcgtgctgagcctgtttcggaatatcgataaagtcctgaaaagcctgggattcctggagagcggctctggctccggcggtggcaccctgaagtacgtggaggatgtgacaaacgtggtcagacgggatgtggagaagtggggccccttcgatctggtgtacggcagcacccaacccctgggcagctcttgtgaccggtgccctggctggtacatgtttcagttccaccggatcctgcagtacgccctgccgagacaggagtcccagcggccattcttttggattttcatggacaacttgctgctgaccgaggatgaccaggaaactaccactcggttcctgcagaccgaagccgtgaccctgcaggacgtgagaggccgggactaccagaacgccatgcgggtgtggtccaacatccctggactgaaaagcaagcacgcacctctgacccctaaagaagaggagtacctgcaggcccaggtgcggagcagaagcaagctggacgcccctaaggtggatctgctggtgaagaattgcctcctgcccctgagagagtacttcaagtatttcagccagaatagtctgcccctgggcggcccaagcagcggcgcccctcctcccagcggcggcagcccagccggctccccaacctctaccgaggagggcacctctgagtccgccacccccgagagcggccctggcacctccaccgagcccagcgagggcagcgcacccggcagccctgccggcagccccacctccacagaggagggaaccagcaccgagcccagcgaaggcagcgccccaggcaccagcaccgagcctagtgagggcggctctggcggcggcagcgcccaggagattaaacggatcaacaagatcagaagaagacttgtgaaagacagcaacaccaagaaggccggcaagacaggccccatgaaaaccctgctggttagagtgatgacacccgatctgagagagcggctggaaaacctgagaaagaagcctgaaaatatcccccagcccatcagcaatacatctagagccaacctgaataagctgctgaccgattacaccgaaatgaagaaggcgatcctgcatgtgtactgggaagagttccagaaggaccctgtgggcctgatgagccgggtggcccagcctgccagcaagaagatcgatcagaacaagctgaaacctgagatggacgagaagggcaacctgaccaccgccggctttgcctgctctcagtgtggccagcccctgttcgtgtacaagctggagcaggtgtctgagaagggcaaggcttacaccaactacttcggacggtgcaatgtggccgagcacgaaaagctgatcctgctggcccagctgaagcccgagaaggatagcgacgaagccgtgacatatagcctgggaaagtttgggcagagggccctggatttctacagcattcatgtgaccaaggagtccacccaccccgtgaagcccctggcccagatcgccggaaacagatacgcctccggacctgtgggaaaggccctgagcgacgcatgtatgggcacaatcgcctccttcctgtctaagtaccaggacatcatcatcgaacaccagaaggtggtgaagggcaaccagaagagactggagagcctgcgggagctggccggcaaggaaaacctggaataccctagcgtgaccctgccacctcagcctcacaccaaggagggcgttgatgcctacaacgaagtgatcgcccgggtgcgaatgtgggtgaacctgaacctgtggcagaagctgaagctaagcagagatgatgccaagcctctgctgagactgaagggattcccttcctttcctctggtcgagagacaggccaacgaagtggactggtgggacatggtgtgtaacgtgaagaagctgatcaacgagaaaaaggaggatggcaaggtgttttggcagaatctggctggctacaagagacaggaagccctgagaccatacctgagcagcgaggaagatcggaagaagggaaagaaattcgctcggtaccagctgggcgacctgctgctgcacctggaaaagaagcacggcgaggactggggaaaggtgtacgacgaggcctgggagcggattgacaagaaagtggaaggcctgagcaagcacatcaagctggaagaggaacggagaagcgaggacgcccagagcaaggccgccctgaccgactggctgcgggctaaggccagcttcgtgatcgagggcctgaaggaggccgacaaggacgagttctgcagatgcgagctgaagctgcagaagtggtacggggacctgcggggaaagcccttcgccatcgaagccgagaacagcatcctggacatcagcggcttcagcaagcagtacaactgtgccttcatctggcagaaggacggcgtgaagaagctgaacctgtacctgatcatcaactacttcaagggcggcaagctgcggttcaagaagatcaaacctgaagccttcgaagccaacagattctacaccgtgatcaacaaaaagagcggcgagatcgtgcccatggaggtgaacttcaacttcgacgaccccaacctgatcatcctgcctctggcctttggcaagagacagggcagagaattcatctggaacgacctgctgtccctggaaaccggcagcctgaagctggccaacggaagagtgatcgagaagacactgtacaacagaagaacccggcaggatgagcctgccctgttcgtggccctgaccttcgagcggcgggaggtcctggactcctccaatatcaaaccaatgaacctgatcggcgtggcaagaggcgaaaacatccccgccgtgatcgccctgaccgaccccgagggctgcccactgagccggtttaaggatagcctgggaaacccaacccacatcctgagaatcggcgagagctataaggagaagcagcggaccatccaggccaagaaggaggtggagcagcggagagccggcggctacagccggaagtacgccagcaaagccaagaatctggcagacgatatggtgagaaacaccgctagagatctgctgtactacgccgtgacccaggatgccatgctgatcttcgccaacctgagccggggcttcggccggcagggcaagcggaccttcatggccgagagacagtacacacggatggaggactggctgaccgccaagctggcctacgagggcctgagcaagacctacctgtccaagacactggcccagtacacctccaagacatgcagcaactgtgggtttaccatcaccagcgccgactacgacagggtgctggagaagctgaagaagacagcaacaggctggatgaccacaattaacggcaaggagctgaaggtggagggccagattacctactacaacagatacaagagacagaacgtagtcaaggacctgtccgtcgagctggatagactgagcgaagaatctgtgaacaacgacatctcctcctggacaaagggcagaagcggagaagctctgagcctcctgaagaaaagattctcccatagacccgtgcaggagaagttcgtgtgcctgaactgcggcttcgagacacacgcagccgagcaagccgccctgaacatcgccagatcctggctgttcctgcggagccaggagtacaagaaataccagacaaacaagacaaccggcaacaccgataagagagccttcgtcgagacctggcagtccttttaccggaagaagcttaaggaggtgtggaaacctgccgtgcggtctggcggatctggcggaggctccacaagcccccaggacctgatgaccttcgaggacgtggccgtggagttcacctggtgggagtggggccagctggaccccgcccagaaggacctgtacagggaggtgatgctggagaacttcaagaacctggccagcctgggcttccccgtgagcaagccctacatgatctgccagctggaggagggcgaggagccctgcatcctggagagggagatcagcaccggcgtgcacagcgactgggagaggaggaccagccccaagaaaaagagaaaagtctaagctgccttctgcggggcttgccttctggccatgcccttcttctctcccttgcacctgtacctcttggtctttgaataaagcctgagtaggaaggctagcaaaaaaaaaaaaaaaaaaaaaaaaaaaaaaaaaaaaaaaaaaaaaaaaaaaaaaaaaaaaaaaaaaaaaaaaaaaaaaaa

SEQ ID NO: 3815 - RNA, 5419 nt, synthetic construct
  source 1..5419: mol_type = other RNA
aggaaataagagagaaaagaagagtaagaagaaatataagagccaccatggcccctaagaagaagcgtaaagtgagccgggtgaacggcagcggcagcggcggcggcatgaaccacgaccaggagttcgacccccctaaggtgtaccctcccgtccccgccgagaagagaaagcccatccgggtcctgagcctgttcgatggcatcgccaccggtctgctggtgctgaaggacctgggcatccaggtggataggtacattgcctccgaggtgtgcgaggactccatcaccgtgggaatggtgcgtcatcagggcaagatcatgtacgtgggcgacgtgcggagcgtgacacagaagcatatccaggagtggggccctttcgacctggtgatcggcggcagcccttgcaatgacctgagcatcgtgaacccagcccggaagggcctgtacgagggaaccggcagactgttcttcgagttttacagactgctgcacgacgcccggcctaaggaaggcgacgaccggcccttcttttggctgttcgagaatgtggtggccatgggagtcagcgacaagcgggatattagccggttcctggagagcaaccccgtgatgatcgatgccaaggaagtgagcgccgcccaccgggccagatacttctggggcaatctgcctggcatgaacagacccctggccagcaccgtgaacgacaagctggagctgcaggagtgcctggagcacggccggatcgccaagttcagcaaggtgagaaccatcaccacccgaagcaacagcatcaaacaaggcaaggaccagcactttcctgtgttcatgaacgagaaggaggacatcctgtggtgtaccgagatggagagagtgttcgggttcccagtccactacacagatgtcagcaacatgtctagactggccagacagagactgctgggaagaagctggtccgtccctgtgatcagacacctgttcgcccctctgaaggagtacttcgcctgcgtgagcagcggcaacagcaacgccaacagccggggccccagcttctctagcggcctggtgccactgtccctgagagggagccacatgggccccatggagatctacaaaaccgtgagcgcctggaagcggcagcctgtgcgcgtgctgagcctgtttcggaatatcgataaagtcctgaaaagcctgggattcctggagagcggctctggctccggcggtggcaccctgaagtacgtggaggatgtgacaaacgtggtcagacgggatgtggagaagtggggccccttcgatctggtgtacggcagcacccaacccctgggcagctcttgtgaccggtgccctggctggtacatgtttcagttccaccggatcctgcagtacgccctgccgagacaggagtcccagcggccattcttttggattttcatggacaacttgctgctgaccgaggatgaccaggaaactaccactcggttcctgcagaccgaagccgtgaccctgcaggacgtgagaggccgggactaccagaacgccatgcgggtgtggtccaacatccctggactgaaaagcaagcacgcacctctgacccctaaagaagaggagtacctgcaggcccaggtgcggagcagaagcaagctggacgcccctaaggtggatctgctggtgaagaattgcctcctgcccctgagagagtacttcaagtatttcagccagaatagtctgcccctgggcggcccaagcagcggcgcccctcctcccagcggcggcagcccagccggctccccaacctctaccgaggagggcacctctgagtccgccacccccgagagcggccctggcacctccaccgagcccagcgagggcagcgcacccggcagccctgccggcagccccacctccacagaggagggaaccagcaccgagcccagcgaaggcagcgccccaggcaccagcaccgagcctagtgagggcggctctggcggcggcagcgcccaggagattaaacggatcaacaagatcagaagaagacttgtgaaagacagcaacaccaagaaggccggcaagacaggccccatgaaaaccctgctggttagagtgatgacacccgatctgagagagcggctggaaaacctgagaaagaagcctgaaaatatcccccagcccatcagcaatacatctagagccaacctgaataagctgctgaccgattacaccgaaatgaagaaggcgatcctgcatgtgtactgggaagagttccagaaggaccctgtgggcctgatgagccgggtggcccagcctgccagcaagaagatcgatcagaacaagctgaaacctgagatggacgagaagggcaacctgaccaccgccggctttgcctgctctcagtgtggccagcccctgttcgtgtacaagctggagcaggtgtctgagaagggcaaggcttacaccaactacttcggacggtgcaatgtggccgagcacgaaaagctgatcctgctggcccagctgaagcccgagaaggatagcgacgaagccgtgacatatagcctgggaaagtttgggcagagggccctggatttctacagcattcatgtgaccaaggagtccacccaccccgtgaagcccctggcccagatcgccggaaacagatacgcctccggacctgtgggaaaggccctgagcgacgcatgtatgggcacaatcgcctccttcctgtctaagtaccaggacatcatcatcgaacaccagaaggtggtgaagggcaaccagaagagactggagagcctgcgggagctggccggcaaggaaaacctggaataccctagcgtgaccctgccacctcagcctcacaccaaggagggcgttgatgcctacaacgaagtgatcgcccgggtgcgaatgtgggtgaacctgaacctgtggcagaagctgaagctaagcagagatgatgccaagcctctgctgagactgaagggattcccttcctttcctctggtcgagagacaggccaacgaagtggactggtgggacatggtgtgtaacgtgaagaagctgatcaacgagaaaaaggaggatggcaaggtgttttggcagaatctggctggctacaagagacaggaagccctgagaccatacctgagcagcgaggaagatcggaagaagggaaagaaattcgctcggtaccagctgggcgacctgctgctgcacctggaaaagaagcacggcgaggactggggaaaggtgtacgacgaggcctgggagcggattgacaagaaagtggaaggcctgagcaagcacatcaagctggaagaggaacggagaagcgaggacgcccagagcaaggccgccctgaccgactggctgcgggctaaggccagcttcgtgatcgagggcctgaaggaggccgacaaggacgagttctgcagatgcgagctgaagctgcagaagtggtacggggacctgcggggaaagcccttcgccatcgaagccgagaacagcatcctggacatcagcggcttcagcaagcagtacaactgtgccttcatctggcagaaggacggcgtgaagaagctgaacctgtacctgatcatcaactacttcaagggcggcaagctgcggttcaagaagatcaaacctgaagccttcgaagccaacagattctacaccgtgatcaacaaaaagagcggcgagatcgtgcccatggaggtgaacttcaacttcgacgaccccaacctgatcatcctgcctctggcctttggcaagagacagggcagagaattcatctggaacgacctgctgtccctggaaaccggcagcctgaagctggccaacggaagagtgatcgagaagacactgtacaacagaagaacccggcaggatgagcctgccctgttcgtggccctgaccttcgagcggcgggaggtcctggactcctccaatatcaaaccaatgaacctgatcggcgtggcaagaggcgaaaacatccccgccgtgatcgccctgaccgaccccgagggctgcccactgagccggtttaaggatagcctgggaaacccaacccacatcctgagaatcggcgagagctataaggagaagcagcggaccatccaggccaagaaggaggtggagcagcggagagccggcggctacagccggaagtacgccagcaaagccaagaatctggcagacgatatggtgagaaacaccgctagagatctgctgtactacgccgtgacccaggatgccatgctgatcttcgccaacctgagccggggcttcggccggcagggcaagcggaccttcatggccgagagacagtacacacggatggaggactggctgaccgccaagctggcctacgagggcctgagcaagacctacctgtccaagacactggcccagtacacctccaagacatgcagcaactgtgggtttaccatcaccagcgccgactacgacagggtgctggagaagctgaagaagacagcaacaggctggatgaccacaattaacggcaaggagctgaaggtggagggccagattacctactacaacagatacaagagacagaacgtagtcaaggacctgtccgtcgagctggatagactgagcgaagaatctgtgaacaacgacatctcctcctggacaaagggcagaagcggagaagctctgagcctcctgaagaaaagattctcccatagacccgtgcaggagaagttcgtgtgcctgaactgcggcttcgagacacacgcagccgagcaagccgccctgaacatcgccagatcctggctgttcctgcggagccaggagtacaagaaataccagacaaacaagacaaccggcaacaccgataagagagccttcgtcgagacctggcagtccttttaccggaagaagcttaaggaggtgtggaaacctgccgtgcggtctggcggatctggcggaggctccacaagcatggtgaccttcgaggacgtggccgtgcacttcaccaagaccgagtggaccggcctgagccccgcccagagggccctgtacaggagcgtgatgctggagaacttcggcaacctgaccgccctgggctaccccgtgcccaagcccgccctgatcagcctgctggagggcggcgacatggcctggggcctggaggcccaggacgaccccctggccgagaggaccaagaacatctgcaagggcgtgaccagccccaagaaaaagagaaaagtctaagctgccttctgcggggcttgccttctggccatgcccttcttctctcccttgcacctgtacctcttggtctttgaataaagcctgagtaggaaggctagcaaaaaaaaaaaaaaaaaaaaaaaaaaaaaaaaaaaaaaaaaaaaaaaaaaaaaaaaaaaaaaaaaaaaaaaaaaaaaaaa

SEQ ID NO: 3816 - RNA, 5419 nt, synthetic construct
  source 1..5419: mol_type = other RNA
aggaaataagagagaaaagaagagtaagaagaaatataagagccaccatggcccctaagaagaagcgtaaagtgagccgggtgaacggcagcggcagcggcggcggcatgaaccacgaccaggagttcgacccccctaaggtgtaccctcccgtccccgccgagaagagaaagcccatccgggtcctgagcctgttcgatggcatcgccaccggtctgctggtgctgaaggacctgggcatccaggtggataggtacattgcctccgaggtgtgcgaggactccatcaccgtgggaatggtgcgtcatcagggcaagatcatgtacgtgggcgacgtgcggagcgtgacacagaagcatatccaggagtggggccctttcgacctggtgatcggcggcagcccttgcaatgacctgagcatcgtgaacccagcccggaagggcctgtacgagggaaccggcagactgttcttcgagttttacagactgctgcacgacgcccggcctaaggaaggcgacgaccggcccttcttttggctgttcgagaatgtggtggccatgggagtcagcgacaagcgggatattagccggttcctggagagcaaccccgtgatgatcgatgccaaggaagtgagcgccgcccaccgggccagatacttctggggcaatctgcctggcatgaacagacccctggccagcaccgtgaacgacaagctggagctgcaggagtgcctggagcacggccggatcgccaagttcagcaaggtgagaaccatcaccacccgaagcaacagcatcaaacaaggcaaggaccagcactttcctgtgttcatgaacgagaaggaggacatcctgtggtgtaccgagatggagagagtgttcgggttcccagtccactacacagatgtcagcaacatgtctagactggccagacagagactgctgggaagaagctggtccgtccctgtgatcagacacctgttcgcccctctgaaggagtacttcgcctgcgtgagcagcggcaacagcaacgccaacagccggggccccagcttctctagcggcctggtgccactgtccctgagagggagccacatgggccccatggagatctacaaaaccgtgagcgcctggaagcggcagcctgtgcgcgtgctgagcctgtttcggaatatcgataaagtcctgaaaagcctgggattcctggagagcggctctggctccggcggtggcaccctgaagtacgtggaggatgtgacaaacgtggtcagacgggatgtggagaagtggggccccttcgatctggtgtacggcagcacccaacccctgggcagctcttgtgaccggtgccctggctggtacatgtttcagttccaccggatcctgcagtacgccctgccgagacaggagtcccagcggccattcttttggattttcatggacaacttgctgctgaccgaggatgaccaggaaactaccactcggttcctgcagaccgaagccgtgaccctgcaggacgtgagaggccgggactaccagaacgccatgcgggtgtggtccaacatccctggactgaaaagcaagcacgcacctctgacccctaaagaagaggagtacctgcaggcccaggtgcggagcagaagcaagctggacgcccctaaggtggatctgctggtgaagaattgcctcctgcccctgagagagtacttcaagtatttcagccagaatagtctgcccctgggcggcccaagcagcggcgcccctcctcccagcggcggcagcccagccggctccccaacctctaccgaggagggcacctctgagtccgccacccccgagagcggccctggcacctccaccgagcccagcgagggcagcgcacccggcagccctgccggcagccccacctccacagaggagggaaccagcaccgagcccagcgaaggcagcgccccaggcaccagcaccgagcctagtgagggcggctctggcggcggcagcgcccaggagattaaacggatcaacaagatcagaagaagacttgtgaaagacagcaacaccaagaaggccggcaagacaggccccatgaaaaccctgctggttagagtgatgacacccgatctgagagagcggctggaaaacctgagaaagaagcctgaaaatatcccccagcccatcagcaatacatctagagccaacctgaataagctgctgaccgattacaccgaaatgaagaaggcgatcctgcatgtgtactgggaagagttccagaaggaccctgtgggcctgatgagccgggtggcccagcctgccagcaagaagatcgatcagaacaagctgaaacctgagatggacgagaagggcaacctgaccaccgccggctttgcctgctctcagtgtggccagcccctgttcgtgtacaagctggagcaggtgtctgagaagggcaaggcttacaccaactacttcggacggtgcaatgtggccgagcacgaaaagctgatcctgctggcccagctgaagcccgagaaggatagcgacgaagccgtgacatatagcctgggaaagtttgggcagagggccctggatttctacagcattcatgtgaccaaggagtccacccaccccgtgaagcccctggcccagatcgccggaaacagatacgcctccggacctgtgggaaaggccctgagcgacgcatgtatgggcacaatcgcctccttcctgtctaagtaccaggacatcatcatcgaacaccagaaggtggtgaagggcaaccagaagagactggagagcctgcgggagctggccggcaaggaaaacctggaataccctagcgtgaccctgccacctcagcctcacaccaaggagggcgttgatgcctacaacgaagtgatcgcccgggtgcgaatgtgggtgaacctgaacctgtggcagaagctgaagctaagcagagatgatgccaagcctctgctgagactgaagggattcccttcctttcctctggtcgagagacaggccaacgaagtggactggtgggacatggtgtgtaacgtgaagaagctgatcaacgagaaaaaggaggatggcaaggtgttttggcagaatctggctggctacaagagacaggaagccctgagaccatacctgagcagcgaggaagatcggaagaagggaaagaaattcgctcggtaccagctgggcgacctgctgctgcacctggaaaagaagcacggcgaggactggggaaaggtgtacgacgaggcctgggagcggattgacaagaaagtggaaggcctgagcaagcacatcaagctggaagaggaacggagaagcgaggacgcccagagcaaggccgccctgaccgactggctgcgggctaaggccagcttcgtgatcgagggcctgaaggaggccgacaaggacgagttctgcagatgcgagctgaagctgcagaagtggtacggggacctgcggggaaagcccttcgccatcgaagccgagaacagcatcctggacatcagcggcttcagcaagcagtacaactgtgccttcatctggcagaaggacggcgtgaagaagctgaacctgtacctgatcatcaactacttcaagggcggcaagctgcggttcaagaagatcaaacctgaagccttcgaagccaacagattctacaccgtgatcaacaaaaagagcggcgagatcgtgcccatggaggtgaacttcaacttcgacgaccccaacctgatcatcctgcctctggcctttggcaagagacagggcagagaattcatctggaacgacctgctgtccctggaaaccggcagcctgaagctggccaacggaagagtgatcgagaagacactgtacaacagaagaacccggcaggatgagcctgccctgttcgtggccctgaccttcgagcggcgggaggtcctggactcctccaatatcaaaccaatgaacctgatcggcgtggcaagaggcgaaaacatccccgccgtgatcgccctgaccgaccccgagggctgcccactgagccggtttaaggatagcctgggaaacccaacccacatcctgagaatcggcgagagctataaggagaagcagcggaccatccaggccaagaaggaggtggagcagcggagagccggcggctacagccggaagtacgccagcaaagccaagaatctggcagacgatatggtgagaaacaccgctagagatctgctgtactacgccgtgacccaggatgccatgctgatcttcgccaacctgagccggggcttcggccggcagggcaagcggaccttcatggccgagagacagtacacacggatggaggactggctgaccgccaagctggcctacgagggcctgagcaagacctacctgtccaagacactggcccagtacacctccaagacatgcagcaactgtgggtttaccatcaccagcgccgactacgacagggtgctggagaagctgaagaagacagcaacaggctggatgaccacaattaacggcaaggagctgaaggtggagggccagattacctactacaacagatacaagagacagaacgtagtcaaggacctgtccgtcgagctggatagactgagcgaagaatctgtgaacaacgacatctcctcctggacaaagggcagaagcggagaagctctgagcctcctgaagaaaagattctcccatagacccgtgcaggagaagttcgtgtgcctgaactgcggcttcgagacacacgcagccgagcaagccgccctgaacatcgccagatcctggctgttcctgcggagccaggagtacaagaaataccagacaaacaagacaaccggcaacaccgataagagagccttcgtcgagacctggcagtccttttaccggaagaagcttaaggaggtgtggaaacctgccgtgcggtctggcggatctggcggaggctccacaagccccgcccagggccccggcaaggccaggcccagcaggaagaggggcaggaggcccagggccctgaagttcgtggacgtggccgtgtacttcagccccgaggagtggggctgcctgaggcccgcccagagggccctgtacagggacgtgatgagggagacctacggccacctgggcgccctgggctgcgccggccccaagcccgccctgatcagctggctggagaggaacaccgacgactgggagaccagccccaagaaaaagagaaaagtctaagctgccttctgcggggcttgccttctggccatgcccttcttctctcccttgcacctgtacctcttggtctttgaataaagcctgagtaggaaggctagcaaaaaaaaaaaaaaaaaaaaaaaaaaaaaaaaaaaaaaaaaaaaaaaaaaaaaaaaaaaaaaaaaaaaaaaaaaaaaaaa

SEQ ID NO: 3817 - RNA, 5419 nt, synthetic construct
  source 1..5419: mol_type = other RNA
aggaaataagagagaaaagaagagtaagaagaaatataagagccaccatggcccctaagaagaagcgtaaagtgagccgggtgaacggcagcggcagcggcggcggcatgaaccacgaccaggagttcgacccccctaaggtgtaccctcccgtccccgccgagaagagaaagcccatccgggtcctgagcctgttcgatggcatcgccaccggtctgctggtgctgaaggacctgggcatccaggtggataggtacattgcctccgaggtgtgcgaggactccatcaccgtgggaatggtgcgtcatcagggcaagatcatgtacgtgggcgacgtgcggagcgtgacacagaagcatatccaggagtggggccctttcgacctggtgatcggcggcagcccttgcaatgacctgagcatcgtgaacccagcccggaagggcctgtacgagggaaccggcagactgttcttcgagttttacagactgctgcacgacgcccggcctaaggaaggcgacgaccggcccttcttttggctgttcgagaatgtggtggccatgggagtcagcgacaagcgggatattagccggttcctggagagcaaccccgtgatgatcgatgccaaggaagtgagcgccgcccaccgggccagatacttctggggcaatctgcctggcatgaacagacccctggccagcaccgtgaacgacaagctggagctgcaggagtgcctggagcacggccggatcgccaagttcagcaaggtgagaaccatcaccacccgaagcaacagcatcaaacaaggcaaggaccagcactttcctgtgttcatgaacgagaaggaggacatcctgtggtgtaccgagatggagagagtgttcgggttcccagtccactacacagatgtcagcaacatgtctagactggccagacagagactgctgggaagaagctggtccgtccctgtgatcagacacctgttcgcccctctgaaggagtacttcgcctgcgtgagcagcggcaacagcaacgccaacagccggggccccagcttctctagcggcctggtgccactgtccctgagagggagccacatgggccccatggagatctacaaaaccgtgagcgcctggaagcggcagcctgtgcgcgtgctgagcctgtttcggaatatcgataaagtcctgaaaagcctgggattcctggagagcggctctggctccggcggtggcaccctgaagtacgtggaggatgtgacaaacgtggtcagacgggatgtggagaagtggggccccttcgatctggtgtacggcagcacccaacccctgggcagctcttgtgaccggtgccctggctggtacatgtttcagttccaccggatcctgcagtacgccctgccgagacaggagtcccagcggccattcttttggattttcatggacaacttgctgctgaccgaggatgaccaggaaactaccactcggttcctgcagaccgaagccgtgaccctgcaggacgtgagaggccgggactaccagaacgccatgcgggtgtggtccaacatccctggactgaaaagcaagcacgcacctctgacccctaaagaagaggagtacctgcaggcccaggtgcggagcagaagcaagctggacgcccctaaggtggatctgctggtgaagaattgcctcctgcccctgagagagtacttcaagtatttcagccagaatagtctgcccctgggcggcccaagcagcggcgcccctcctcccagcggcggcagcccagccggctccccaacctctaccgaggagggcacctctgagtccgccacccccgagagcggccctggcacctccaccgagcccagcgagggcagcgcacccggcagccctgccggcagccccacctccacagaggagggaaccagcaccgagcccagcgaaggcagcgccccaggcaccagcaccgagcctagtgagggcggctctggcggcggcagcgcccaggagattaaacggatcaacaagatcagaagaagacttgtgaaagacagcaacaccaagaaggccggcaagacaggccccatgaaaaccctgctggttagagtgatgacacccgatctgagagagcggctggaaaacctgagaaagaagcctgaaaatatcccccagcccatcagcaatacatctagagccaacctgaataagctgctgaccgattacaccgaaatgaagaaggcgatcctgcatgtgtactgggaagagttccagaaggaccctgtgggcctgatgagccgggtggcccagcctgccagcaagaagatcgatcagaacaagctgaaacctgagatggacgagaagggcaacctgaccaccgccggctttgcctgctctcagtgtggccagcccctgttcgtgtacaagctggagcaggtgtctgagaagggcaaggcttacaccaactacttcggacggtgcaatgtggccgagcacgaaaagctgatcctgctggcccagctgaagcccgagaaggatagcgacgaagccgtgacatatagcctgggaaagtttgggcagagggccctggatttctacagcattcatgtgaccaaggagtccacccaccccgtgaagcccctggcccagatcgccggaaacagatacgcctccggacctgtgggaaaggccctgagcgacgcatgtatgggcacaatcgcctccttcctgtctaagtaccaggacatcatcatcgaacaccagaaggtggtgaagggcaaccagaagagactggagagcctgcgggagctggccggcaaggaaaacctggaataccctagcgtgaccctgccacctcagcctcacaccaaggagggcgttgatgcctacaacgaagtgatcgcccgggtgcgaatgtgggtgaacctgaacctgtggcagaagctgaagctaagcagagatgatgccaagcctctgctgagactgaagggattcccttcctttcctctggtcgagagacaggccaacgaagtggactggtgggacatggtgtgtaacgtgaagaagctgatcaacgagaaaaaggaggatggcaaggtgttttggcagaatctggctggctacaagagacaggaagccctgagaccatacctgagcagcgaggaagatcggaagaagggaaagaaattcgctcggtaccagctgggcgacctgctgctgcacctggaaaagaagcacggcgaggactggggaaaggtgtacgacgaggcctgggagcggattgacaagaaagtggaaggcctgagcaagcacatcaagctggaagaggaacggagaagcgaggacgcccagagcaaggccgccctgaccgactggctgcgggctaaggccagcttcgtgatcgagggcctgaaggaggccgacaaggacgagttctgcagatgcgagctgaagctgcagaagtggtacggggacctgcggggaaagcccttcgccatcgaagccgagaacagcatcctggacatcagcggcttcagcaagcagtacaactgtgccttcatctggcagaaggacggcgtgaagaagctgaacctgtacctgatcatcaactacttcaagggcggcaagctgcggttcaagaagatcaaacctgaagccttcgaagccaacagattctacaccgtgatcaacaaaaagagcggcgagatcgtgcccatggaggtgaacttcaacttcgacgaccccaacctgatcatcctgcctctggcctttggcaagagacagggcagagaattcatctggaacgacctgctgtccctggaaaccggcagcctgaagctggccaacggaagagtgatcgagaagacactgtacaacagaagaacccggcaggatgagcctgccctgttcgtggccctgaccttcgagcggcgggaggtcctggactcctccaatatcaaaccaatgaacctgatcggcgtggcaagaggcgaaaacatccccgccgtgatcgccctgaccgaccccgagggctgcccactgagccggtttaaggatagcctgggaaacccaacccacatcctgagaatcggcgagagctataaggagaagcagcggaccatccaggccaagaaggaggtggagcagcggagagccggcggctacagccggaagtacgccagcaaagccaagaatctggcagacgatatggtgagaaacaccgctagagatctgctgtactacgccgtgacccaggatgccatgctgatcttcgccaacctgagccggggcttcggccggcagggcaagcggaccttcatggccgagagacagtacacacggatggaggactggctgaccgccaagctggcctacgagggcctgagcaagacctacctgtccaagacactggcccagtacacctccaagacatgcagcaactgtgggtttaccatcaccagcgccgactacgacagggtgctggagaagctgaagaagacagcaacaggctggatgaccacaattaacggcaaggagctgaaggtggagggccagattacctactacaacagatacaagagacagaacgtagtcaaggacctgtccgtcgagctggatagactgagcgaagaatctgtgaacaacgacatctcctcctggacaaagggcagaagcggagaagctctgagcctcctgaagaaaagattctcccatagacccgtgcaggagaagttcgtgtgcctgaactgcggcttcgagacacacgcagccgagcaagccgccctgaacatcgccagatcctggctgttcctgcggagccaggagtacaagaaataccagacaaacaagacaaccggcaacaccgataagagagccttcgtcgagacctggcagtccttttaccggaagaagcttaaggaggtgtggaaacctgccgtgcggtctggcggatctggcggaggctccacaagcttccaggtgctggtgagcttcgaggaggtggccgtgctgctgagccaggaggagtggggccacctgggccccgcccagaagaggctgtacagggacgtgatgctggagacctacggcaacctggtgagcctgggcctgcagggcagcaagcccgacgtgatcagcaagctggagcagggcgaggagccctggaccccccacagccccaggatcgagggcagctggatcaggaggaggaggcccaccagccccaagaaaaagagaaaagtctaagctgccttctgcggggcttgccttctggccatgcccttcttctctcccttgcacctgtacctcttggtctttgaataaagcctgagtaggaaggctagcaaaaaaaaaaaaaaaaaaaaaaaaaaaaaaaaaaaaaaaaaaaaaaaaaaaaaaaaaaaaaaaaaaaaaaaaaaaaaaaa

SEQ ID NO: 3818 - RNA, 5419 nt, synthetic construct
  source 1..5419: mol_type = other RNA
aggaaataagagagaaaagaagagtaagaagaaatataagagccaccatggcccctaagaagaagcgtaaagtgagccgggtgaacggcagcggcagcggcggcggcatgaaccacgaccaggagttcgacccccctaaggtgtaccctcccgtccccgccgagaagagaaagcccatccgggtcctgagcctgttcgatggcatcgccaccggtctgctggtgctgaaggacctgggcatccaggtggataggtacattgcctccgaggtgtgcgaggactccatcaccgtgggaatggtgcgtcatcagggcaagatcatgtacgtgggcgacgtgcggagcgtgacacagaagcatatccaggagtggggccctttcgacctggtgatcggcggcagcccttgcaatgacctgagcatcgtgaacccagcccggaagggcctgtacgagggaaccggcagactgttcttcgagttttacagactgctgcacgacgcccggcctaaggaaggcgacgaccggcccttcttttggctgttcgagaatgtggtggccatgggagtcagcgacaagcgggatattagccggttcctggagagcaaccccgtgatgatcgatgccaaggaagtgagcgccgcccaccgggccagatacttctggggcaatctgcctggcatgaacagacccctggccagcaccgtgaacgacaagctggagctgcaggagtgcctggagcacggccggatcgccaagttcagcaaggtgagaaccatcaccacccgaagcaacagcatcaaacaaggcaaggaccagcactttcctgtgttcatgaacgagaaggaggacatcctgtggtgtaccgagatggagagagtgttcgggttcccagtccactacacagatgtcagcaacatgtctagactggccagacagagactgctgggaagaagctggtccgtccctgtgatcagacacctgttcgcccctctgaaggagtacttcgcctgcgtgagcagcggcaacagcaacgccaacagccggggccccagcttctctagcggcctggtgccactgtccctgagagggagccacatgggccccatggagatctacaaaaccgtgagcgcctggaagcggcagcctgtgcgcgtgctgagcctgtttcggaatatcgataaagtcctgaaaagcctgggattcctggagagcggctctggctccggcggtggcaccctgaagtacgtggaggatgtgacaaacgtggtcagacgggatgtggagaagtggggccccttcgatctggtgtacggcagcacccaacccctgggcagctcttgtgaccggtgccctggctggtacatgtttcagttccaccggatcctgcagtacgccctgccgagacaggagtcccagcggccattcttttggattttcatggacaacttgctgctgaccgaggatgaccaggaaactaccactcggttcctgcagaccgaagccgtgaccctgcaggacgtgagaggccgggactaccagaacgccatgcgggtgtggtccaacatccctggactgaaaagcaagcacgcacctctgacccctaaagaagaggagtacctgcaggcccaggtgcggagcagaagcaagctggacgcccctaaggtggatctgctggtgaagaattgcctcctgcccctgagagagtacttcaagtatttcagccagaatagtctgcccctgggcggcccaagcagcggcgcccctcctcccagcggcggcagcccagccggctccccaacctctaccgaggagggcacctctgagtccgccacccccgagagcggccctggcacctccaccgagcccagcgagggcagcgcacccggcagccctgccggcagccccacctccacagaggagggaaccagcaccgagcccagcgaaggcagcgccccaggcaccagcaccgagcctagtgagggcggctctggcggcggcagcgcccaggagattaaacggatcaacaagatcagaagaagacttgtgaaagacagcaacaccaagaaggccggcaagacaggccccatgaaaaccctgctggttagagtgatgacacccgatctgagagagcggctggaaaacctgagaaagaagcctgaaaatatcccccagcccatcagcaatacatctagagccaacctgaataagctgctgaccgattacaccgaaatgaagaaggcgatcctgcatgtgtactgggaagagttccagaaggaccctgtgggcctgatgagccgggtggcccagcctgccagcaagaagatcgatcagaacaagctgaaacctgagatggacgagaagggcaacctgaccaccgccggctttgcctgctctcagtgtggccagcccctgttcgtgtacaagctggagcaggtgtctgagaagggcaaggcttacaccaactacttcggacggtgcaatgtggccgagcacgaaaagctgatcctgctggcccagctgaagcccgagaaggatagcgacgaagccgtgacatatagcctgggaaagtttgggcagagggccctggatttctacagcattcatgtgaccaaggagtccacccaccccgtgaagcccctggcccagatcgccggaaacagatacgcctccggacctgtgggaaaggccctgagcgacgcatgtatgggcacaatcgcctccttcctgtctaagtaccaggacatcatcatcgaacaccagaaggtggtgaagggcaaccagaagagactggagagcctgcgggagctggccggcaaggaaaacctggaataccctagcgtgaccctgccacctcagcctcacaccaaggagggcgttgatgcctacaacgaagtgatcgcccgggtgcgaatgtgggtgaacctgaacctgtggcagaagctgaagctaagcagagatgatgccaagcctctgctgagactgaagggattcccttcctttcctctggtcgagagacaggccaacgaagtggactggtgggacatggtgtgtaacgtgaagaagctgatcaacgagaaaaaggaggatggcaaggtgttttggcagaatctggctggctacaagagacaggaagccctgagaccatacctgagcagcgaggaagatcggaagaagggaaagaaattcgctcggtaccagctgggcgacctgctgctgcacctggaaaagaagcacggcgaggactggggaaaggtgtacgacgaggcctgggagcggattgacaagaaagtggaaggcctgagcaagcacatcaagctggaagaggaacggagaagcgaggacgcccagagcaaggccgccctgaccgactggctgcgggctaaggccagcttcgtgatcgagggcctgaaggaggccgacaaggacgagttctgcagatgcgagctgaagctgcagaagtggtacggggacctgcggggaaagcccttcgccatcgaagccgagaacagcatcctggacatcagcggcttcagcaagcagtacaactgtgccttcatctggcagaaggacggcgtgaagaagctgaacctgtacctgatcatcaactacttcaagggcggcaagctgcggttcaagaagatcaaacctgaagccttcgaagccaacagattctacaccgtgatcaacaaaaagagcggcgagatcgtgcccatggaggtgaacttcaacttcgacgaccccaacctgatcatcctgcctctggcctttggcaagagacagggcagagaattcatctggaacgacctgctgtccctggaaaccggcagcctgaagctggccaacggaagagtgatcgagaagacactgtacaacagaagaacccggcaggatgagcctgccctgttcgtggccctgaccttcgagcggcgggaggtcctggactcctccaatatcaaaccaatgaacctgatcggcgtggcaagaggcgaaaacatccccgccgtgatcgccctgaccgaccccgagggctgcccactgagccggtttaaggatagcctgggaaacccaacccacatcctgagaatcggcgagagctataaggagaagcagcggaccatccaggccaagaaggaggtggagcagcggagagccggcggctacagccggaagtacgccagcaaagccaagaatctggcagacgatatggtgagaaacaccgctagagatctgctgtactacgccgtgacccaggatgccatgctgatcttcgccaacctgagccggggcttcggccggcagggcaagcggaccttcatggccgagagacagtacacacggatggaggactggctgaccgccaagctggcctacgagggcctgagcaagacctacctgtccaagacactggcccagtacacctccaagacatgcagcaactgtgggtttaccatcaccagcgccgactacgacagggtgctggagaagctgaagaagacagcaacaggctggatgaccacaattaacggcaaggagctgaaggtggagggccagattacctactacaacagatacaagagacagaacgtagtcaaggacctgtccgtcgagctggatagactgagcgaagaatctgtgaacaacgacatctcctcctggacaaagggcagaagcggagaagctctgagcctcctgaagaaaagattctcccatagacccgtgcaggagaagttcgtgtgcctgaactgcggcttcgagacacacgcagccgagcaagccgccctgaacatcgccagatcctggctgttcctgcggagccaggagtacaagaaataccagacaaacaagacaaccggcaacaccgataagagagccttcgtcgagacctggcagtccttttaccggaagaagcttaaggaggtgtggaaacctgccgtgcggtctggcggatctggcggaggctccacaagcatccaggagcccgtgaccttcaaggacgtggccgtggacttcacccaggaggagtggggccagctggacagcgtgcagaggaccctgtacagggacgtgatgctggagacctacggccacctgctgagcgtgggcaaccacatcgccaagcccgaggtgatcagcctgctggagcagggcgaggagccctggagcgtggagcaggcctacccccagagcacctgccccgagtggatgaggaacaccagccccaagaaaaagagaaaagtctaagctgccttctgcggggcttgccttctggccatgcccttcttctctcccttgcacctgtacctcttggtctttgaataaagcctgagtaggaaggctagcaaaaaaaaaaaaaaaaaaaaaaaaaaaaaaaaaaaaaaaaaaaaaaaaaaaaaaaaaaaaaaaaaaaaaaaaaaaaaaaa

SEQ ID NO: 3819 - RNA, 5419 nt, synthetic construct
  source 1..5419: mol_type = other RNA
aggaaataagagagaaaagaagagtaagaagaaatataagagccaccatggcccctaagaagaagcgtaaagtgagccgggtgaacggcagcggcagcggcggcggcatgaaccacgaccaggagttcgacccccctaaggtgtaccctcccgtccccgccgagaagagaaagcccatccgggtcctgagcctgttcgatggcatcgccaccggtctgctggtgctgaaggacctgggcatccaggtggataggtacattgcctccgaggtgtgcgaggactccatcaccgtgggaatggtgcgtcatcagggcaagatcatgtacgtgggcgacgtgcggagcgtgacacagaagcatatccaggagtggggccctttcgacctggtgatcggcggcagcccttgcaatgacctgagcatcgtgaacccagcccggaagggcctgtacgagggaaccggcagactgttcttcgagttttacagactgctgcacgacgcccggcctaaggaaggcgacgaccggcccttcttttggctgttcgagaatgtggtggccatgggagtcagcgacaagcgggatattagccggttcctggagagcaaccccgtgatgatcgatgccaaggaagtgagcgccgcccaccgggccagatacttctggggcaatctgcctggcatgaacagacccctggccagcaccgtgaacgacaagctggagctgcaggagtgcctggagcacggccggatcgccaagttcagcaaggtgagaaccatcaccacccgaagcaacagcatcaaacaaggcaaggaccagcactttcctgtgttcatgaacgagaaggaggacatcctgtggtgtaccgagatggagagagtgttcgggttcccagtccactacacagatgtcagcaacatgtctagactggccagacagagactgctgggaagaagctggtccgtccctgtgatcagacacctgttcgcccctctgaaggagtacttcgcctgcgtgagcagcggcaacagcaacgccaacagccggggccccagcttctctagcggcctggtgccactgtccctgagagggagccacatgggccccatggagatctacaaaaccgtgagcgcctggaagcggcagcctgtgcgcgtgctgagcctgtttcggaatatcgataaagtcctgaaaagcctgggattcctggagagcggctctggctccggcggtggcaccctgaagtacgtggaggatgtgacaaacgtggtcagacgggatgtggagaagtggggccccttcgatctggtgtacggcagcacccaacccctgggcagctcttgtgaccggtgccctggctggtacatgtttcagttccaccggatcctgcagtacgccctgccgagacaggagtcccagcggccattcttttggattttcatggacaacttgctgctgaccgaggatgaccaggaaactaccactcggttcctgcagaccgaagccgtgaccctgcaggacgtgagaggccgggactaccagaacgccatgcgggtgtggtccaacatccctggactgaaaagcaagcacgcacctctgacccctaaagaagaggagtacctgcaggcccaggtgcggagcagaagcaagctggacgcccctaaggtggatctgctggtgaagaattgcctcctgcccctgagagagtacttcaagtatttcagccagaatagtctgcccctgggcggcccaagcagcggcgcccctcctcccagcggcggcagcccagccggctccccaacctctaccgaggagggcacctctgagtccgccacccccgagagcggccctggcacctccaccgagcccagcgagggcagcgcacccggcagccctgccggcagccccacctccacagaggagggaaccagcaccgagcccagcgaaggcagcgccccaggcaccagcaccgagcctagtgagggcggctctggcggcggcagcgcccaggagattaaacggatcaacaagatcagaagaagacttgtgaaagacagcaacaccaagaaggccggcaagacaggccccatgaaaaccctgctggttagagtgatgacacccgatctgagagagcggctggaaaacctgagaaagaagcctgaaaatatcccccagcccatcagcaatacatctagagccaacctgaataagctgctgaccgattacaccgaaatgaagaaggcgatcctgcatgtgtactgggaagagttccagaaggaccctgtgggcctgatgagccgggtggcccagcctgccagcaagaagatcgatcagaacaagctgaaacctgagatggacgagaagggcaacctgaccaccgccggctttgcctgctctcagtgtggccagcccctgttcgtgtacaagctggagcaggtgtctgagaagggcaaggcttacaccaactacttcggacggtgcaatgtggccgagcacgaaaagctgatcctgctggcccagctgaagcccgagaaggatagcgacgaagccgtgacatatagcctgggaaagtttgggcagagggccctggatttctacagcattcatgtgaccaaggagtccacccaccccgtgaagcccctggcccagatcgccggaaacagatacgcctccggacctgtgggaaaggccctgagcgacgcatgtatgggcacaatcgcctccttcctgtctaagtaccaggacatcatcatcgaacaccagaaggtggtgaagggcaaccagaagagactggagagcctgcgggagctggccggcaaggaaaacctggaataccctagcgtgaccctgccacctcagcctcacaccaaggagggcgttgatgcctacaacgaagtgatcgcccgggtgcgaatgtgggtgaacctgaacctgtggcagaagctgaagctaagcagagatgatgccaagcctctgctgagactgaagggattcccttcctttcctctggtcgagagacaggccaacgaagtggactggtgggacatggtgtgtaacgtgaagaagctgatcaacgagaaaaaggaggatggcaaggtgttttggcagaatctggctggctacaagagacaggaagccctgagaccatacctgagcagcgaggaagatcggaagaagggaaagaaattcgctcggtaccagctgggcgacctgctgctgcacctggaaaagaagcacggcgaggactggggaaaggtgtacgacgaggcctgggagcggattgacaagaaagtggaaggcctgagcaagcacatcaagctggaagaggaacggagaagcgaggacgcccagagcaaggccgccctgaccgactggctgcgggctaaggccagcttcgtgatcgagggcctgaaggaggccgacaaggacgagttctgcagatgcgagctgaagctgcagaagtggtacggggacctgcggggaaagcccttcgccatcgaagccgagaacagcatcctggacatcagcggcttcagcaagcagtacaactgtgccttcatctggcagaaggacggcgtgaagaagctgaacctgtacctgatcatcaactacttcaagggcggcaagctgcggttcaagaagatcaaacctgaagccttcgaagccaacagattctacaccgtgatcaacaaaaagagcggcgagatcgtgcccatggaggtgaacttcaacttcgacgaccccaacctgatcatcctgcctctggcctttggcaagagacagggcagagaattcatctggaacgacctgctgtccctggaaaccggcagcctgaagctggccaacggaagagtgatcgagaagacactgtacaacagaagaacccggcaggatgagcctgccctgttcgtggccctgaccttcgagcggcgggaggtcctggactcctccaatatcaaaccaatgaacctgatcggcgtggcaagaggcgaaaacatccccgccgtgatcgccctgaccgaccccgagggctgcccactgagccggtttaaggatagcctgggaaacccaacccacatcctgagaatcggcgagagctataaggagaagcagcggaccatccaggccaagaaggaggtggagcagcggagagccggcggctacagccggaagtacgccagcaaagccaagaatctggcagacgatatggtgagaaacaccgctagagatctgctgtactacgccgtgacccaggatgccatgctgatcttcgccaacctgagccggggcttcggccggcagggcaagcggaccttcatggccgagagacagtacacacggatggaggactggctgaccgccaagctggcctacgagggcctgagcaagacctacctgtccaagacactggcccagtacacctccaagacatgcagcaactgtgggtttaccatcaccagcgccgactacgacagggtgctggagaagctgaagaagacagcaacaggctggatgaccacaattaacggcaaggagctgaaggtggagggccagattacctactacaacagatacaagagacagaacgtagtcaaggacctgtccgtcgagctggatagactgagcgaagaatctgtgaacaacgacatctcctcctggacaaagggcagaagcggagaagctctgagcctcctgaagaaaagattctcccatagacccgtgcaggagaagttcgtgtgcctgaactgcggcttcgagacacacgcagccgagcaagccgccctgaacatcgccagatcctggctgttcctgcggagccaggagtacaagaaataccagacaaacaagacaaccggcaacaccgataagagagccttcgtcgagacctggcagtccttttaccggaagaagcttaaggaggtgtggaaacctgccgtgcggtctggcggatctggcggaggctccacaagccacaagaagagcatggtgttcagcgacgtgagcctggacttcagccaggaggagtgggagtgcctgggccccgcccagaaggacctgtacagggacgtgatgctggagaactacagccacctgctgagcgtggccggcctgcacatccccaagccccaggtgatcagcctgctggagcagggcaaggagccctggatgatcggcaaggagctgaccaggggcctgtgcagcgccctggagagcaccagccccaagaaaaagagaaaagtctaagctgccttctgcggggcttgccttctggccatgcccttcttctctcccttgcacctgtacctcttggtctttgaataaagcctgagtaggaaggctagcaaaaaaaaaaaaaaaaaaaaaaaaaaaaaaaaaaaaaaaaaaaaaaaaaaaaaaaaaaaaaaaaaaaaaaaaaaaaaaaa

SEQ ID NO: 3820 - RNA, 5419 nt, synthetic construct
  source 1..5419: mol_type = other RNA
aggaaataagagagaaaagaagagtaagaagaaatataagagccaccatggcccctaagaagaagcgtaaagtgagccgggtgaacggcagcggcagcggcggcggcatgaaccacgaccaggagttcgacccccctaaggtgtaccctcccgtccccgccgagaagagaaagcccatccgggtcctgagcctgttcgatggcatcgccaccggtctgctggtgctgaaggacctgggcatccaggtggataggtacattgcctccgaggtgtgcgaggactccatcaccgtgggaatggtgcgtcatcagggcaagatcatgtacgtgggcgacgtgcggagcgtgacacagaagcatatccaggagtggggccctttcgacctggtgatcggcggcagcccttgcaatgacctgagcatcgtgaacccagcccggaagggcctgtacgagggaaccggcagactgttcttcgagttttacagactgctgcacgacgcccggcctaaggaaggcgacgaccggcccttcttttggctgttcgagaatgtggtggccatgggagtcagcgacaagcgggatattagccggttcctggagagcaaccccgtgatgatcgatgccaaggaagtgagcgccgcccaccgggccagatacttctggggcaatctgcctggcatgaacagacccctggccagcaccgtgaacgacaagctggagctgcaggagtgcctggagcacggccggatcgccaagttcagcaaggtgagaaccatcaccacccgaagcaacagcatcaaacaaggcaaggaccagcactttcctgtgttcatgaacgagaaggaggacatcctgtggtgtaccgagatggagagagtgttcgggttcccagtccactacacagatgtcagcaacatgtctagactggccagacagagactgctgggaagaagctggtccgtccctgtgatcagacacctgttcgcccctctgaaggagtacttcgcctgcgtgagcagcggcaacagcaacgccaacagccggggccccagcttctctagcggcctggtgccactgtccctgagagggagccacatgggccccatggagatctacaaaaccgtgagcgcctggaagcggcagcctgtgcgcgtgctgagcctgtttcggaatatcgataaagtcctgaaaagcctgggattcctggagagcggctctggctccggcggtggcaccctgaagtacgtggaggatgtgacaaacgtggtcagacgggatgtggagaagtggggccccttcgatctggtgtacggcagcacccaacccctgggcagctcttgtgaccggtgccctggctggtacatgtttcagttccaccggatcctgcagtacgccctgccgagacaggagtcccagcggccattcttttggattttcatggacaacttgctgctgaccgaggatgaccaggaaactaccactcggttcctgcagaccgaagccgtgaccctgcaggacgtgagaggccgggactaccagaacgccatgcgggtgtggtccaacatccctggactgaaaagcaagcacgcacctctgacccctaaagaagaggagtacctgcaggcccaggtgcggagcagaagcaagctggacgcccctaaggtggatctgctggtgaagaattgcctcctgcccctgagagagtacttcaagtatttcagccagaatagtctgcccctgggcggcccaagcagcggcgcccctcctcccagcggcggcagcccagccggctccccaacctctaccgaggagggcacctctgagtccgccacccccgagagcggccctggcacctccaccgagcccagcgagggcagcgcacccggcagccctgccggcagccccacctccacagaggagggaaccagcaccgagcccagcgaaggcagcgccccaggcaccagcaccgagcctagtgagggcggctctggcggcggcagcgcccaggagattaaacggatcaacaagatcagaagaagacttgtgaaagacagcaacaccaagaaggccggcaagacaggccccatgaaaaccctgctggttagagtgatgacacccgatctgagagagcggctggaaaacctgagaaagaagcctgaaaatatcccccagcccatcagcaatacatctagagccaacctgaataagctgctgaccgattacaccgaaatgaagaaggcgatcctgcatgtgtactgggaagagttccagaaggaccctgtgggcctgatgagccgggtggcccagcctgccagcaagaagatcgatcagaacaagctgaaacctgagatggacgagaagggcaacctgaccaccgccggctttgcctgctctcagtgtggccagcccctgttcgtgtacaagctggagcaggtgtctgagaagggcaaggcttacaccaactacttcggacggtgcaatgtggccgagcacgaaaagctgatcctgctggcccagctgaagcccgagaaggatagcgacgaagccgtgacatatagcctgggaaagtttgggcagagggccctggatttctacagcattcatgtgaccaaggagtccacccaccccgtgaagcccctggcccagatcgccggaaacagatacgcctccggacctgtgggaaaggccctgagcgacgcatgtatgggcacaatcgcctccttcctgtctaagtaccaggacatcatcatcgaacaccagaaggtggtgaagggcaaccagaagagactggagagcctgcgggagctggccggcaaggaaaacctggaataccctagcgtgaccctgccacctcagcctcacaccaaggagggcgttgatgcctacaacgaagtgatcgcccgggtgcgaatgtgggtgaacctgaacctgtggcagaagctgaagctaagcagagatgatgccaagcctctgctgagactgaagggattcccttcctttcctctggtcgagagacaggccaacgaagtggactggtgggacatggtgtgtaacgtgaagaagctgatcaacgagaaaaaggaggatggcaaggtgttttggcagaatctggctggctacaagagacaggaagccctgagaccatacctgagcagcgaggaagatcggaagaagggaaagaaattcgctcggtaccagctgggcgacctgctgctgcacctggaaaagaagcacggcgaggactggggaaaggtgtacgacgaggcctgggagcggattgacaagaaagtggaaggcctgagcaagcacatcaagctggaagaggaacggagaagcgaggacgcccagagcaaggccgccctgaccgactggctgcgggctaaggccagcttcgtgatcgagggcctgaaggaggccgacaaggacgagttctgcagatgcgagctgaagctgcagaagtggtacggggacctgcggggaaagcccttcgccatcgaagccgagaacagcatcctggacatcagcggcttcagcaagcagtacaactgtgccttcatctggcagaaggacggcgtgaagaagctgaacctgtacctgatcatcaactacttcaagggcggcaagctgcggttcaagaagatcaaacctgaagccttcgaagccaacagattctacaccgtgatcaacaaaaagagcggcgagatcgtgcccatggaggtgaacttcaacttcgacgaccccaacctgatcatcctgcctctggcctttggcaagagacagggcagagaattcatctggaacgacctgctgtccctggaaaccggcagcctgaagctggccaacggaagagtgatcgagaagacactgtacaacagaagaacccggcaggatgagcctgccctgttcgtggccctgaccttcgagcggcgggaggtcctggactcctccaatatcaaaccaatgaacctgatcggcgtggcaagaggcgaaaacatccccgccgtgatcgccctgaccgaccccgagggctgcccactgagccggtttaaggatagcctgggaaacccaacccacatcctgagaatcggcgagagctataaggagaagcagcggaccatccaggccaagaaggaggtggagcagcggagagccggcggctacagccggaagtacgccagcaaagccaagaatctggcagacgatatggtgagaaacaccgctagagatctgctgtactacgccgtgacccaggatgccatgctgatcttcgccaacctgagccggggcttcggccggcagggcaagcggaccttcatggccgagagacagtacacacggatggaggactggctgaccgccaagctggcctacgagggcctgagcaagacctacctgtccaagacactggcccagtacacctccaagacatgcagcaactgtgggtttaccatcaccagcgccgactacgacagggtgctggagaagctgaagaagacagcaacaggctggatgaccacaattaacggcaaggagctgaaggtggagggccagattacctactacaacagatacaagagacagaacgtagtcaaggacctgtccgtcgagctggatagactgagcgaagaatctgtgaacaacgacatctcctcctggacaaagggcagaagcggagaagctctgagcctcctgaagaaaagattctcccatagacccgtgcaggagaagttcgtgtgcctgaactgcggcttcgagacacacgcagccgagcaagccgccctgaacatcgccagatcctggctgttcctgcggagccaggagtacaagaaataccagacaaacaagacaaccggcaacaccgataagagagccttcgtcgagacctggcagtccttttaccggaagaagcttaaggaggtgtggaaacctgccgtgcggtctggcggatctggcggaggctccacaagcttccagatccccgtgaccttcgaggaggtggccgtgtacttcacccagggccagggcgccctgctggaccccgcccagagggccctgtacagggacgtgatgcaggagaactacgagaccgtgaccagcctgggcttccccatccccaagcccgacctgatcgccaggctggagaggggcgaggagccctgggtgctggacctgcaggccagcgacgagagcgtgagcctgaggggcacctgcaccagccccaagaaaaagagaaaagtctaagctgccttctgcggggcttgccttctggccatgcccttcttctctcccttgcacctgtacctcttggtctttgaataaagcctgagtaggaaggctagcaaaaaaaaaaaaaaaaaaaaaaaaaaaaaaaaaaaaaaaaaaaaaaaaaaaaaaaaaaaaaaaaaaaaaaaaaaaaaaaa

SEQ ID NO: 3821 - RNA, 5419 nt, synthetic construct
  source 1..5419: mol_type = other RNA
aggaaataagagagaaaagaagagtaagaagaaatataagagccaccatggcccctaagaagaagcgtaaagtgagccgggtgaacggcagcggcagcggcggcggcatgaaccacgaccaggagttcgacccccctaaggtgtaccctcccgtccccgccgagaagagaaagcccatccgggtcctgagcctgttcgatggcatcgccaccggtctgctggtgctgaaggacctgggcatccaggtggataggtacattgcctccgaggtgtgcgaggactccatcaccgtgggaatggtgcgtcatcagggcaagatcatgtacgtgggcgacgtgcggagcgtgacacagaagcatatccaggagtggggccctttcgacctggtgatcggcggcagcccttgcaatgacctgagcatcgtgaacccagcccggaagggcctgtacgagggaaccggcagactgttcttcgagttttacagactgctgcacgacgcccggcctaaggaaggcgacgaccggcccttcttttggctgttcgagaatgtggtggccatgggagtcagcgacaagcgggatattagccggttcctggagagcaaccccgtgatgatcgatgccaaggaagtgagcgccgcccaccgggccagatacttctggggcaatctgcctggcatgaacagacccctggccagcaccgtgaacgacaagctggagctgcaggagtgcctggagcacggccggatcgccaagttcagcaaggtgagaaccatcaccacccgaagcaacagcatcaaacaaggcaaggaccagcactttcctgtgttcatgaacgagaaggaggacatcctgtggtgtaccgagatggagagagtgttcgggttcccagtccactacacagatgtcagcaacatgtctagactggccagacagagactgctgggaagaagctggtccgtccctgtgatcagacacctgttcgcccctctgaaggagtacttcgcctgcgtgagcagcggcaacagcaacgccaacagccggggccccagcttctctagcggcctggtgccactgtccctgagagggagccacatgggccccatggagatctacaaaaccgtgagcgcctggaagcggcagcctgtgcgcgtgctgagcctgtttcggaatatcgataaagtcctgaaaagcctgggattcctggagagcggctctggctccggcggtggcaccctgaagtacgtggaggatgtgacaaacgtggtcagacgggatgtggagaagtggggccccttcgatctggtgtacggcagcacccaacccctgggcagctcttgtgaccggtgccctggctggtacatgtttcagttccaccggatcctgcagtacgccctgccgagacaggagtcccagcggccattcttttggattttcatggacaacttgctgctgaccgaggatgaccaggaaactaccactcggttcctgcagaccgaagccgtgaccctgcaggacgtgagaggccgggactaccagaacgccatgcgggtgtggtccaacatccctggactgaaaagcaagcacgcacctctgacccctaaagaagaggagtacctgcaggcccaggtgcggagcagaagcaagctggacgcccctaaggtggatctgctggtgaagaattgcctcctgcccctgagagagtacttcaagtatttcagccagaatagtctgcccctgggcggcccaagcagcggcgcccctcctcccagcggcggcagcccagccggctccccaacctctaccgaggagggcacctctgagtccgccacccccgagagcggccctggcacctccaccgagcccagcgagggcagcgcacccggcagccctgccggcagccccacctccacagaggagggaaccagcaccgagcccagcgaaggcagcgccccaggcaccagcaccgagcctagtgagggcggctctggcggcggcagcgcccaggagattaaacggatcaacaagatcagaagaagacttgtgaaagacagcaacaccaagaaggccggcaagacaggccccatgaaaaccctgctggttagagtgatgacacccgatctgagagagcggctggaaaacctgagaaagaagcctgaaaatatcccccagcccatcagcaatacatctagagccaacctgaataagctgctgaccgattacaccgaaatgaagaaggcgatcctgcatgtgtactgggaagagttccagaaggaccctgtgggcctgatgagccgggtggcccagcctgccagcaagaagatcgatcagaacaagctgaaacctgagatggacgagaagggcaacctgaccaccgccggctttgcctgctctcagtgtggccagcccctgttcgtgtacaagctggagcaggtgtctgagaagggcaaggcttacaccaactacttcggacggtgcaatgtggccgagcacgaaaagctgatcctgctggcccagctgaagcccgagaaggatagcgacgaagccgtgacatatagcctgggaaagtttgggcagagggccctggatttctacagcattcatgtgaccaaggagtccacccaccccgtgaagcccctggcccagatcgccggaaacagatacgcctccggacctgtgggaaaggccctgagcgacgcatgtatgggcacaatcgcctccttcctgtctaagtaccaggacatcatcatcgaacaccagaaggtggtgaagggcaaccagaagagactggagagcctgcgggagctggccggcaaggaaaacctggaataccctagcgtgaccctgccacctcagcctcacaccaaggagggcgttgatgcctacaacgaagtgatcgcccgggtgcgaatgtgggtgaacctgaacctgtggcagaagctgaagctaagcagagatgatgccaagcctctgctgagactgaagggattcccttcctttcctctggtcgagagacaggccaacgaagtggactggtgggacatggtgtgtaacgtgaagaagctgatcaacgagaaaaaggaggatggcaaggtgttttggcagaatctggctggctacaagagacaggaagccctgagaccatacctgagcagcgaggaagatcggaagaagggaaagaaattcgctcggtaccagctgggcgacctgctgctgcacctggaaaagaagcacggcgaggactggggaaaggtgtacgacgaggcctgggagcggattgacaagaaagtggaaggcctgagcaagcacatcaagctggaagaggaacggagaagcgaggacgcccagagcaaggccgccctgaccgactggctgcgggctaaggccagcttcgtgatcgagggcctgaaggaggccgacaaggacgagttctgcagatgcgagctgaagctgcagaagtggtacggggacctgcggggaaagcccttcgccatcgaagccgagaacagcatcctggacatcagcggcttcagcaagcagtacaactgtgccttcatctggcagaaggacggcgtgaagaagctgaacctgtacctgatcatcaactacttcaagggcggcaagctgcggttcaagaagatcaaacctgaagccttcgaagccaacagattctacaccgtgatcaacaaaaagagcggcgagatcgtgcccatggaggtgaacttcaacttcgacgaccccaacctgatcatcctgcctctggcctttggcaagagacagggcagagaattcatctggaacgacctgctgtccctggaaaccggcagcctgaagctggccaacggaagagtgatcgagaagacactgtacaacagaagaacccggcaggatgagcctgccctgttcgtggccctgaccttcgagcggcgggaggtcctggactcctccaatatcaaaccaatgaacctgatcggcgtggcaagaggcgaaaacatccccgccgtgatcgccctgaccgaccccgagggctgcccactgagccggtttaaggatagcctgggaaacccaacccacatcctgagaatcggcgagagctataaggagaagcagcggaccatccaggccaagaaggaggtggagcagcggagagccggcggctacagccggaagtacgccagcaaagccaagaatctggcagacgatatggtgagaaacaccgctagagatctgctgtactacgccgtgacccaggatgccatgctgatcttcgccaacctgagccggggcttcggccggcagggcaagcggaccttcatggccgagagacagtacacacggatggaggactggctgaccgccaagctggcctacgagggcctgagcaagacctacctgtccaagacactggcccagtacacctccaagacatgcagcaactgtgggtttaccatcaccagcgccgactacgacagggtgctggagaagctgaagaagacagcaacaggctggatgaccacaattaacggcaaggagctgaaggtggagggccagattacctactacaacagatacaagagacagaacgtagtcaaggacctgtccgtcgagctggatagactgagcgaagaatctgtgaacaacgacatctcctcctggacaaagggcagaagcggagaagctctgagcctcctgaagaaaagattctcccatagacccgtgcaggagaagttcgtgtgcctgaactgcggcttcgagacacacgcagccgagcaagccgccctgaacatcgccagatcctggctgttcctgcggagccaggagtacaagaaataccagacaaacaagacaaccggcaacaccgataagagagccttcgtcgagacctggcagtccttttaccggaagaagcttaaggaggtgtggaaacctgccgtgcggtctggcggatctggcggaggctccacaagcatggccgtggacctgctgcccgcccaggagagcatgaccttcagggacgtggccgtgttcttcagccaggacgagtggctgcacctggacagcgcccagagggccctgtacagggaggtgatgctggagaactacagcaccctggtgagcctgggcatccccttcagcatgcccaaggtgatccaccagctgcagcagggccaggacccctgcatggtggagggcgaggtgcccagcgacatcaccagccccaagaaaaagagaaaagtctaagctgccttctgcggggcttgccttctggccatgcccttcttctctcccttgcacctgtacctcttggtctttgaataaagcctgagtaggaaggctagcaaaaaaaaaaaaaaaaaaaaaaaaaaaaaaaaaaaaaaaaaaaaaaaaaaaaaaaaaaaaaaaaaaaaaaaaaaaaaaaa

SEQ ID NO: 3822 - RNA, 5419 nt, synthetic construct
  source 1..5419: mol_type = other RNA
aggaaataagagagaaaagaagagtaagaagaaatataagagccaccatggcccctaagaagaagcgtaaagtgagccgggtgaacggcagcggcagcggcggcggcatgaaccacgaccaggagttcgacccccctaaggtgtaccctcccgtccccgccgagaagagaaagcccatccgggtcctgagcctgttcgatggcatcgccaccggtctgctggtgctgaaggacctgggcatccaggtggataggtacattgcctccgaggtgtgcgaggactccatcaccgtgggaatggtgcgtcatcagggcaagatcatgtacgtgggcgacgtgcggagcgtgacacagaagcatatccaggagtggggccctttcgacctggtgatcggcggcagcccttgcaatgacctgagcatcgtgaacccagcccggaagggcctgtacgagggaaccggcagactgttcttcgagttttacagactgctgcacgacgcccggcctaaggaaggcgacgaccggcccttcttttggctgttcgagaatgtggtggccatgggagtcagcgacaagcgggatattagccggttcctggagagcaaccccgtgatgatcgatgccaaggaagtgagcgccgcccaccgggccagatacttctggggcaatctgcctggcatgaacagacccctggccagcaccgtgaacgacaagctggagctgcaggagtgcctggagcacggccggatcgccaagttcagcaaggtgagaaccatcaccacccgaagcaacagcatcaaacaaggcaaggaccagcactttcctgtgttcatgaacgagaaggaggacatcctgtggtgtaccgagatggagagagtgttcgggttcccagtccactacacagatgtcagcaacatgtctagactggccagacagagactgctgggaagaagctggtccgtccctgtgatcagacacctgttcgcccctctgaaggagtacttcgcctgcgtgagcagcggcaacagcaacgccaacagccggggccccagcttctctagcggcctggtgccactgtccctgagagggagccacatgggccccatggagatctacaaaaccgtgagcgcctggaagcggcagcctgtgcgcgtgctgagcctgtttcggaatatcgataaagtcctgaaaagcctgggattcctggagagcggctctggctccggcggtggcaccctgaagtacgtggaggatgtgacaaacgtggtcagacgggatgtggagaagtggggccccttcgatctggtgtacggcagcacccaacccctgggcagctcttgtgaccggtgccctggctggtacatgtttcagttccaccggatcctgcagtacgccctgccgagacaggagtcccagcggccattcttttggattttcatggacaacttgctgctgaccgaggatgaccaggaaactaccactcggttcctgcagaccgaagccgtgaccctgcaggacgtgagaggccgggactaccagaacgccatgcgggtgtggtccaacatccctggactgaaaagcaagcacgcacctctgacccctaaagaagaggagtacctgcaggcccaggtgcggagcagaagcaagctggacgcccctaaggtggatctgctggtgaagaattgcctcctgcccctgagagagtacttcaagtatttcagccagaatagtctgcccctgggcggcccaagcagcggcgcccctcctcccagcggcggcagcccagccggctccccaacctctaccgaggagggcacctctgagtccgccacccccgagagcggccctggcacctccaccgagcccagcgagggcagcgcacccggcagccctgccggcagccccacctccacagaggagggaaccagcaccgagcccagcgaaggcagcgccccaggcaccagcaccgagcctagtgagggcggctctggcggcggcagcgcccaggagattaaacggatcaacaagatcagaagaagacttgtgaaagacagcaacaccaagaaggccggcaagacaggccccatgaaaaccctgctggttagagtgatgacacccgatctgagagagcggctggaaaacctgagaaagaagcctgaaaatatcccccagcccatcagcaatacatctagagccaacctgaataagctgctgaccgattacaccgaaatgaagaaggcgatcctgcatgtgtactgggaagagttccagaaggaccctgtgggcctgatgagccgggtggcccagcctgccagcaagaagatcgatcagaacaagctgaaacctgagatggacgagaagggcaacctgaccaccgccggctttgcctgctctcagtgtggccagcccctgttcgtgtacaagctggagcaggtgtctgagaagggcaaggcttacaccaactacttcggacggtgcaatgtggccgagcacgaaaagctgatcctgctggcccagctgaagcccgagaaggatagcgacgaagccgtgacatatagcctgggaaagtttgggcagagggccctggatttctacagcattcatgtgaccaaggagtccacccaccccgtgaagcccctggcccagatcgccggaaacagatacgcctccggacctgtgggaaaggccctgagcgacgcatgtatgggcacaatcgcctccttcctgtctaagtaccaggacatcatcatcgaacaccagaaggtggtgaagggcaaccagaagagactggagagcctgcgggagctggccggcaaggaaaacctggaataccctagcgtgaccctgccacctcagcctcacaccaaggagggcgttgatgcctacaacgaagtgatcgcccgggtgcgaatgtgggtgaacctgaacctgtggcagaagctgaagctaagcagagatgatgccaagcctctgctgagactgaagggattcccttcctttcctctggtcgagagacaggccaacgaagtggactggtgggacatggtgtgtaacgtgaagaagctgatcaacgagaaaaaggaggatggcaaggtgttttggcagaatctggctggctacaagagacaggaagccctgagaccatacctgagcagcgaggaagatcggaagaagggaaagaaattcgctcggtaccagctgggcgacctgctgctgcacctggaaaagaagcacggcgaggactggggaaaggtgtacgacgaggcctgggagcggattgacaagaaagtggaaggcctgagcaagcacatcaagctggaagaggaacggagaagcgaggacgcccagagcaaggccgccctgaccgactggctgcgggctaaggccagcttcgtgatcgagggcctgaaggaggccgacaaggacgagttctgcagatgcgagctgaagctgcagaagtggtacggggacctgcggggaaagcccttcgccatcgaagccgagaacagcatcctggacatcagcggcttcagcaagcagtacaactgtgccttcatctggcagaaggacggcgtgaagaagctgaacctgtacctgatcatcaactacttcaagggcggcaagctgcggttcaagaagatcaaacctgaagccttcgaagccaacagattctacaccgtgatcaacaaaaagagcggcgagatcgtgcccatggaggtgaacttcaacttcgacgaccccaacctgatcatcctgcctctggcctttggcaagagacagggcagagaattcatctggaacgacctgctgtccctggaaaccggcagcctgaagctggccaacggaagagtgatcgagaagacactgtacaacagaagaacccggcaggatgagcctgccctgttcgtggccctgaccttcgagcggcgggaggtcctggactcctccaatatcaaaccaatgaacctgatcggcgtggcaagaggcgaaaacatccccgccgtgatcgccctgaccgaccccgagggctgcccactgagccggtttaaggatagcctgggaaacccaacccacatcctgagaatcggcgagagctataaggagaagcagcggaccatccaggccaagaaggaggtggagcagcggagagccggcggctacagccggaagtacgccagcaaagccaagaatctggcagacgatatggtgagaaacaccgctagagatctgctgtactacgccgtgacccaggatgccatgctgatcttcgccaacctgagccggggcttcggccggcagggcaagcggaccttcatggccgagagacagtacacacggatggaggactggctgaccgccaagctggcctacgagggcctgagcaagacctacctgtccaagacactggcccagtacacctccaagacatgcagcaactgtgggtttaccatcaccagcgccgactacgacagggtgctggagaagctgaagaagacagcaacaggctggatgaccacaattaacggcaaggagctgaaggtggagggccagattacctactacaacagatacaagagacagaacgtagtcaaggacctgtccgtcgagctggatagactgagcgaagaatctgtgaacaacgacatctcctcctggacaaagggcagaagcggagaagctctgagcctcctgaagaaaagattctcccatagacccgtgcaggagaagttcgtgtgcctgaactgcggcttcgagacacacgcagccgagcaagccgccctgaacatcgccagatcctggctgttcctgcggagccaggagtacaagaaataccagacaaacaagacaaccggcaacaccgataagagagccttcgtcgagacctggcagtccttttaccggaagaagcttaaggaggtgtggaaacctgccgtgcggtctggcggatctggcggaggctccacaagcaagcccctggccgtgaggttcgccgacgtggccgtgtacttcagccccgaggagtggggctgcctgaggcccgcccagagggccctgtacagggacgtgatgcaggagacctacggccacctgggcgccctgggcttccccggccccaagcccgccctgatcagctggatggagcaggagagcgaggcctggagccccgccgcccaggaccccgaggagggcgagagcctgggcggcgccctgaccagccccaagaaaaagagaaaagtctaagctgccttctgcggggcttgccttctggccatgcccttcttctctcccttgcacctgtacctcttggtctttgaataaagcctgagtaggaaggctagcaaaaaaaaaaaaaaaaaaaaaaaaaaaaaaaaaaaaaaaaaaaaaaaaaaaaaaaaaaaaaaaaaaaaaaaaaaaaaaaa

SEQ ID NO: 3823 - RNA, 5419 nt, synthetic construct
  source 1..5419: mol_type = other RNA
aggaaataagagagaaaagaagagtaagaagaaatataagagccaccatggcccctaagaagaagcgtaaagtgagccgggtgaacggcagcggcagcggcggcggcatgaaccacgaccaggagttcgacccccctaaggtgtaccctcccgtccccgccgagaagagaaagcccatccgggtcctgagcctgttcgatggcatcgccaccggtctgctggtgctgaaggacctgggcatccaggtggataggtacattgcctccgaggtgtgcgaggactccatcaccgtgggaatggtgcgtcatcagggcaagatcatgtacgtgggcgacgtgcggagcgtgacacagaagcatatccaggagtggggccctttcgacctggtgatcggcggcagcccttgcaatgacctgagcatcgtgaacccagcccggaagggcctgtacgagggaaccggcagactgttcttcgagttttacagactgctgcacgacgcccggcctaaggaaggcgacgaccggcccttcttttggctgttcgagaatgtggtggccatgggagtcagcgacaagcgggatattagccggttcctggagagcaaccccgtgatgatcgatgccaaggaagtgagcgccgcccaccgggccagatacttctggggcaatctgcctggcatgaacagacccctggccagcaccgtgaacgacaagctggagctgcaggagtgcctggagcacggccggatcgccaagttcagcaaggtgagaaccatcaccacccgaagcaacagcatcaaacaaggcaaggaccagcactttcctgtgttcatgaacgagaaggaggacatcctgtggtgtaccgagatggagagagtgttcgggttcccagtccactacacagatgtcagcaacatgtctagactggccagacagagactgctgggaagaagctggtccgtccctgtgatcagacacctgttcgcccctctgaaggagtacttcgcctgcgtgagcagcggcaacagcaacgccaacagccggggccccagcttctctagcggcctggtgccactgtccctgagagggagccacatgggccccatggagatctacaaaaccgtgagcgcctggaagcggcagcctgtgcgcgtgctgagcctgtttcggaatatcgataaagtcctgaaaagcctgggattcctggagagcggctctggctccggcggtggcaccctgaagtacgtggaggatgtgacaaacgtggtcagacgggatgtggagaagtggggccccttcgatctggtgtacggcagcacccaacccctgggcagctcttgtgaccggtgccctggctggtacatgtttcagttccaccggatcctgcagtacgccctgccgagacaggagtcccagcggccattcttttggattttcatggacaacttgctgctgaccgaggatgaccaggaaactaccactcggttcctgcagaccgaagccgtgaccctgcaggacgtgagaggccgggactaccagaacgccatgcgggtgtggtccaacatccctggactgaaaagcaagcacgcacctctgacccctaaagaagaggagtacctgcaggcccaggtgcggagcagaagcaagctggacgcccctaaggtggatctgctggtgaagaattgcctcctgcccctgagagagtacttcaagtatttcagccagaatagtctgcccctgggcggcccaagcagcggcgcccctcctcccagcggcggcagcccagccggctccccaacctctaccgaggagggcacctctgagtccgccacccccgagagcggccctggcacctccaccgagcccagcgagggcagcgcacccggcagccctgccggcagccccacctccacagaggagggaaccagcaccgagcccagcgaaggcagcgccccaggcaccagcaccgagcctagtgagggcggctctggcggcggcagcgcccaggagattaaacggatcaacaagatcagaagaagacttgtgaaagacagcaacaccaagaaggccggcaagacaggccccatgaaaaccctgctggttagagtgatgacacccgatctgagagagcggctggaaaacctgagaaagaagcctgaaaatatcccccagcccatcagcaatacatctagagccaacctgaataagctgctgaccgattacaccgaaatgaagaaggcgatcctgcatgtgtactgggaagagttccagaaggaccctgtgggcctgatgagccgggtggcccagcctgccagcaagaagatcgatcagaacaagctgaaacctgagatggacgagaagggcaacctgaccaccgccggctttgcctgctctcagtgtggccagcccctgttcgtgtacaagctggagcaggtgtctgagaagggcaaggcttacaccaactacttcggacggtgcaatgtggccgagcacgaaaagctgatcctgctggcccagctgaagcccgagaaggatagcgacgaagccgtgacatatagcctgggaaagtttgggcagagggccctggatttctacagcattcatgtgaccaaggagtccacccaccccgtgaagcccctggcccagatcgccggaaacagatacgcctccggacctgtgggaaaggccctgagcgacgcatgtatgggcacaatcgcctccttcctgtctaagtaccaggacatcatcatcgaacaccagaaggtggtgaagggcaaccagaagagactggagagcctgcgggagctggccggcaaggaaaacctggaataccctagcgtgaccctgccacctcagcctcacaccaaggagggcgttgatgcctacaacgaagtgatcgcccgggtgcgaatgtgggtgaacctgaacctgtggcagaagctgaagctaagcagagatgatgccaagcctctgctgagactgaagggattcccttcctttcctctggtcgagagacaggccaacgaagtggactggtgggacatggtgtgtaacgtgaagaagctgatcaacgagaaaaaggaggatggcaaggtgttttggcagaatctggctggctacaagagacaggaagccctgagaccatacctgagcagcgaggaagatcggaagaagggaaagaaattcgctcggtaccagctgggcgacctgctgctgcacctggaaaagaagcacggcgaggactggggaaaggtgtacgacgaggcctgggagcggattgacaagaaagtggaaggcctgagcaagcacatcaagctggaagaggaacggagaagcgaggacgcccagagcaaggccgccctgaccgactggctgcgggctaaggccagcttcgtgatcgagggcctgaaggaggccgacaaggacgagttctgcagatgcgagctgaagctgcagaagtggtacggggacctgcggggaaagcccttcgccatcgaagccgagaacagcatcctggacatcagcggcttcagcaagcagtacaactgtgccttcatctggcagaaggacggcgtgaagaagctgaacctgtacctgatcatcaactacttcaagggcggcaagctgcggttcaagaagatcaaacctgaagccttcgaagccaacagattctacaccgtgatcaacaaaaagagcggcgagatcgtgcccatggaggtgaacttcaacttcgacgaccccaacctgatcatcctgcctctggcctttggcaagagacagggcagagaattcatctggaacgacctgctgtccctggaaaccggcagcctgaagctggccaacggaagagtgatcgagaagacactgtacaacagaagaacccggcaggatgagcctgccctgttcgtggccctgaccttcgagcggcgggaggtcctggactcctccaatatcaaaccaatgaacctgatcggcgtggcaagaggcgaaaacatccccgccgtgatcgccctgaccgaccccgagggctgcccactgagccggtttaaggatagcctgggaaacccaacccacatcctgagaatcggcgagagctataaggagaagcagcggaccatccaggccaagaaggaggtggagcagcggagagccggcggctacagccggaagtacgccagcaaagccaagaatctggcagacgatatggtgagaaacaccgctagagatctgctgtactacgccgtgacccaggatgccatgctgatcttcgccaacctgagccggggcttcggccggcagggcaagcggaccttcatggccgagagacagtacacacggatggaggactggctgaccgccaagctggcctacgagggcctgagcaagacctacctgtccaagacactggcccagtacacctccaagacatgcagcaactgtgggtttaccatcaccagcgccgactacgacagggtgctggagaagctgaagaagacagcaacaggctggatgaccacaattaacggcaaggagctgaaggtggagggccagattacctactacaacagatacaagagacagaacgtagtcaaggacctgtccgtcgagctggatagactgagcgaagaatctgtgaacaacgacatctcctcctggacaaagggcagaagcggagaagctctgagcctcctgaagaaaagattctcccatagacccgtgcaggagaagttcgtgtgcctgaactgcggcttcgagacacacgcagccgagcaagccgccctgaacatcgccagatcctggctgttcctgcggagccaggagtacaagaaataccagacaaacaagacaaccggcaacaccgataagagagccttcgtcgagacctggcagtccttttaccggaagaagcttaaggaggtgtggaaacctgccgtgcggtctggcggatctggcggaggctccacaagcatggcccacttccagggcagcgtgaccttcgaggacgtggccatcgccttcagccagcaggagtgggagagcctggacagcagccagaggggcctgtacagggacgtgatgctggagaactacaggaacctggtgagcatggccggccacagcctgagcaagccccacgtgatcgccctgctggagaggtggaaggagcccaaggtgaccgagaggaaggacggcaggaggtggtgcaccgacaccagccccaagaaaaagagaaaagtctaagctgccttctgcggggcttgccttctggccatgcccttcttctctcccttgcacctgtacctcttggtctttgaataaagcctgagtaggaaggctagcaaaaaaaaaaaaaaaaaaaaaaaaaaaaaaaaaaaaaaaaaaaaaaaaaaaaaaaaaaaaaaaaaaaaaaaaaaaaaaaa

SEQ ID NO: 3824 - RNA, 5419 nt, synthetic construct
  source 1..5419: mol_type = other RNA
aggaaataagagagaaaagaagagtaagaagaaatataagagccaccatggcccctaagaagaagcgtaaagtgagccgggtgaacggcagcggcagcggcggcggcatgaaccacgaccaggagttcgacccccctaaggtgtaccctcccgtccccgccgagaagagaaagcccatccgggtcctgagcctgttcgatggcatcgccaccggtctgctggtgctgaaggacctgggcatccaggtggataggtacattgcctccgaggtgtgcgaggactccatcaccgtgggaatggtgcgtcatcagggcaagatcatgtacgtgggcgacgtgcggagcgtgacacagaagcatatccaggagtggggccctttcgacctggtgatcggcggcagcccttgcaatgacctgagcatcgtgaacccagcccggaagggcctgtacgagggaaccggcagactgttcttcgagttttacagactgctgcacgacgcccggcctaaggaaggcgacgaccggcccttcttttggctgttcgagaatgtggtggccatgggagtcagcgacaagcgggatattagccggttcctggagagcaaccccgtgatgatcgatgccaaggaagtgagcgccgcccaccgggccagatacttctggggcaatctgcctggcatgaacagacccctggccagcaccgtgaacgacaagctggagctgcaggagtgcctggagcacggccggatcgccaagttcagcaaggtgagaaccatcaccacccgaagcaacagcatcaaacaaggcaaggaccagcactttcctgtgttcatgaacgagaaggaggacatcctgtggtgtaccgagatggagagagtgttcgggttcccagtccactacacagatgtcagcaacatgtctagactggccagacagagactgctgggaagaagctggtccgtccctgtgatcagacacctgttcgcccctctgaaggagtacttcgcctgcgtgagcagcggcaacagcaacgccaacagccggggccccagcttctctagcggcctggtgccactgtccctgagagggagccacatgggccccatggagatctacaaaaccgtgagcgcctggaagcggcagcctgtgcgcgtgctgagcctgtttcggaatatcgataaagtcctgaaaagcctgggattcctggagagcggctctggctccggcggtggcaccctgaagtacgtggaggatgtgacaaacgtggtcagacgggatgtggagaagtggggccccttcgatctggtgtacggcagcacccaacccctgggcagctcttgtgaccggtgccctggctggtacatgtttcagttccaccggatcctgcagtacgccctgccgagacaggagtcccagcggccattcttttggattttcatggacaacttgctgctgaccgaggatgaccaggaaactaccactcggttcctgcagaccgaagccgtgaccctgcaggacgtgagaggccgggactaccagaacgccatgcgggtgtggtccaacatccctggactgaaaagcaagcacgcacctctgacccctaaagaagaggagtacctgcaggcccaggtgcggagcagaagcaagctggacgcccctaaggtggatctgctggtgaagaattgcctcctgcccctgagagagtacttcaagtatttcagccagaatagtctgcccctgggcggcccaagcagcggcgcccctcctcccagcggcggcagcccagccggctccccaacctctaccgaggagggcacctctgagtccgccacccccgagagcggccctggcacctccaccgagcccagcgagggcagcgcacccggcagccctgccggcagccccacctccacagaggagggaaccagcaccgagcccagcgaaggcagcgccccaggcaccagcaccgagcctagtgagggcggctctggcggcggcagcgcccaggagattaaacggatcaacaagatcagaagaagacttgtgaaagacagcaacaccaagaaggccggcaagacaggccccatgaaaaccctgctggttagagtgatgacacccgatctgagagagcggctggaaaacctgagaaagaagcctgaaaatatcccccagcccatcagcaatacatctagagccaacctgaataagctgctgaccgattacaccgaaatgaagaaggcgatcctgcatgtgtactgggaagagttccagaaggaccctgtgggcctgatgagccgggtggcccagcctgccagcaagaagatcgatcagaacaagctgaaacctgagatggacgagaagggcaacctgaccaccgccggctttgcctgctctcagtgtggccagcccctgttcgtgtacaagctggagcaggtgtctgagaagggcaaggcttacaccaactacttcggacggtgcaatgtggccgagcacgaaaagctgatcctgctggcccagctgaagcccgagaaggatagcgacgaagccgtgacatatagcctgggaaagtttgggcagagggccctggatttctacagcattcatgtgaccaaggagtccacccaccccgtgaagcccctggcccagatcgccggaaacagatacgcctccggacctgtgggaaaggccctgagcgacgcatgtatgggcacaatcgcctccttcctgtctaagtaccaggacatcatcatcgaacaccagaaggtggtgaagggcaaccagaagagactggagagcctgcgggagctggccggcaaggaaaacctggaataccctagcgtgaccctgccacctcagcctcacaccaaggagggcgttgatgcctacaacgaagtgatcgcccgggtgcgaatgtgggtgaacctgaacctgtggcagaagctgaagctaagcagagatgatgccaagcctctgctgagactgaagggattcccttcctttcctctggtcgagagacaggccaacgaagtggactggtgggacatggtgtgtaacgtgaagaagctgatcaacgagaaaaaggaggatggcaaggtgttttggcagaatctggctggctacaagagacaggaagccctgagaccatacctgagcagcgaggaagatcggaagaagggaaagaaattcgctcggtaccagctgggcgacctgctgctgcacctggaaaagaagcacggcgaggactggggaaaggtgtacgacgaggcctgggagcggattgacaagaaagtggaaggcctgagcaagcacatcaagctggaagaggaacggagaagcgaggacgcccagagcaaggccgccctgaccgactggctgcgggctaaggccagcttcgtgatcgagggcctgaaggaggccgacaaggacgagttctgcagatgcgagctgaagctgcagaagtggtacggggacctgcggggaaagcccttcgccatcgaagccgagaacagcatcctggacatcagcggcttcagcaagcagtacaactgtgccttcatctggcagaaggacggcgtgaagaagctgaacctgtacctgatcatcaactacttcaagggcggcaagctgcggttcaagaagatcaaacctgaagccttcgaagccaacagattctacaccgtgatcaacaaaaagagcggcgagatcgtgcccatggaggtgaacttcaacttcgacgaccccaacctgatcatcctgcctctggcctttggcaagagacagggcagagaattcatctggaacgacctgctgtccctggaaaccggcagcctgaagctggccaacggaagagtgatcgagaagacactgtacaacagaagaacccggcaggatgagcctgccctgttcgtggccctgaccttcgagcggcgggaggtcctggactcctccaatatcaaaccaatgaacctgatcggcgtggcaagaggcgaaaacatccccgccgtgatcgccctgaccgaccccgagggctgcccactgagccggtttaaggatagcctgggaaacccaacccacatcctgagaatcggcgagagctataaggagaagcagcggaccatccaggccaagaaggaggtggagcagcggagagccggcggctacagccggaagtacgccagcaaagccaagaatctggcagacgatatggtgagaaacaccgctagagatctgctgtactacgccgtgacccaggatgccatgctgatcttcgccaacctgagccggggcttcggccggcagggcaagcggaccttcatggccgagagacagtacacacggatggaggactggctgaccgccaagctggcctacgagggcctgagcaagacctacctgtccaagacactggcccagtacacctccaagacatgcagcaactgtgggtttaccatcaccagcgccgactacgacagggtgctggagaagctgaagaagacagcaacaggctggatgaccacaattaacggcaaggagctgaaggtggagggccagattacctactacaacagatacaagagacagaacgtagtcaaggacctgtccgtcgagctggatagactgagcgaagaatctgtgaacaacgacatctcctcctggacaaagggcagaagcggagaagctctgagcctcctgaagaaaagattctcccatagacccgtgcaggagaagttcgtgtgcctgaactgcggcttcgagacacacgcagccgagcaagccgccctgaacatcgccagatcctggctgttcctgcggagccaggagtacaagaaataccagacaaacaagacaaccggcaacaccgataagagagccttcgtcgagacctggcagtccttttaccggaagaagcttaaggaggtgtggaaacctgccgtgcggtctggcggatctggcggaggctccacaagcagccagggcctggtgaccttcggcgacgtggccatcgacttcagccaggaggagtgggagtggctgagccccatccagaggaacctgtacaggaaggtgatgctggagaactacaggaacctggccagcctgggcctgtgcgtgagcaagcccgacgtgatcagcctgctggagcagggcaaggagccctggaccgtgaagaggaggatgaccagggccaggtgccccgacacccagcacctgaccagccccaagaaaaagagaaaagtctaagctgccttctgcggggcttgccttctggccatgcccttcttctctcccttgcacctgtacctcttggtctttgaataaagcctgagtaggaaggctagcaaaaaaaaaaaaaaaaaaaaaaaaaaaaaaaaaaaaaaaaaaaaaaaaaaaaaaaaaaaaaaaaaaaaaaaaaaaaaaaa

SEQ ID NO: 3825 - RNA, 5419 nt, synthetic construct
  source 1..5419: mol_type = other RNA
aggaaataagagagaaaagaagagtaagaagaaatataagagccaccatggcccctaagaagaagcgtaaagtgagccgggtgaacggcagcggcagcggcggcggcatgaaccacgaccaggagttcgacccccctaaggtgtaccctcccgtccccgccgagaagagaaagcccatccgggtcctgagcctgttcgatggcatcgccaccggtctgctggtgctgaaggacctgggcatccaggtggataggtacattgcctccgaggtgtgcgaggactccatcaccgtgggaatggtgcgtcatcagggcaagatcatgtacgtgggcgacgtgcggagcgtgacacagaagcatatccaggagtggggccctttcgacctggtgatcggcggcagcccttgcaatgacctgagcatcgtgaacccagcccggaagggcctgtacgagggaaccggcagactgttcttcgagttttacagactgctgcacgacgcccggcctaaggaaggcgacgaccggcccttcttttggctgttcgagaatgtggtggccatgggagtcagcgacaagcgggatattagccggttcctggagagcaaccccgtgatgatcgatgccaaggaagtgagcgccgcccaccgggccagatacttctggggcaatctgcctggcatgaacagacccctggccagcaccgtgaacgacaagctggagctgcaggagtgcctggagcacggccggatcgccaagttcagcaaggtgagaaccatcaccacccgaagcaacagcatcaaacaaggcaaggaccagcactttcctgtgttcatgaacgagaaggaggacatcctgtggtgtaccgagatggagagagtgttcgggttcccagtccactacacagatgtcagcaacatgtctagactggccagacagagactgctgggaagaagctggtccgtccctgtgatcagacacctgttcgcccctctgaaggagtacttcgcctgcgtgagcagcggcaacagcaacgccaacagccggggccccagcttctctagcggcctggtgccactgtccctgagagggagccacatgggccccatggagatctacaaaaccgtgagcgcctggaagcggcagcctgtgcgcgtgctgagcctgtttcggaatatcgataaagtcctgaaaagcctgggattcctggagagcggctctggctccggcggtggcaccctgaagtacgtggaggatgtgacaaacgtggtcagacgggatgtggagaagtggggccccttcgatctggtgtacggcagcacccaacccctgggcagctcttgtgaccggtgccctggctggtacatgtttcagttccaccggatcctgcagtacgccctgccgagacaggagtcccagcggccattcttttggattttcatggacaacttgctgctgaccgaggatgaccaggaaactaccactcggttcctgcagaccgaagccgtgaccctgcaggacgtgagaggccgggactaccagaacgccatgcgggtgtggtccaacatccctggactgaaaagcaagcacgcacctctgacccctaaagaagaggagtacctgcaggcccaggtgcggagcagaagcaagctggacgcccctaaggtggatctgctggtgaagaattgcctcctgcccctgagagagtacttcaagtatttcagccagaatagtctgcccctgggcggcccaagcagcggcgcccctcctcccagcggcggcagcccagccggctccccaacctctaccgaggagggcacctctgagtccgccacccccgagagcggccctggcacctccaccgagcccagcgagggcagcgcacccggcagccctgccggcagccccacctccacagaggagggaaccagcaccgagcccagcgaaggcagcgccccaggcaccagcaccgagcctagtgagggcggctctggcggcggcagcgcccaggagattaaacggatcaacaagatcagaagaagacttgtgaaagacagcaacaccaagaaggccggcaagacaggccccatgaaaaccctgctggttagagtgatgacacccgatctgagagagcggctggaaaacctgagaaagaagcctgaaaatatcccccagcccatcagcaatacatctagagccaacctgaataagctgctgaccgattacaccgaaatgaagaaggcgatcctgcatgtgtactgggaagagttccagaaggaccctgtgggcctgatgagccgggtggcccagcctgccagcaagaagatcgatcagaacaagctgaaacctgagatggacgagaagggcaacctgaccaccgccggctttgcctgctctcagtgtggccagcccctgttcgtgtacaagctggagcaggtgtctgagaagggcaaggcttacaccaactacttcggacggtgcaatgtggccgagcacgaaaagctgatcctgctggcccagctgaagcccgagaaggatagcgacgaagccgtgacatatagcctgggaaagtttgggcagagggccctggatttctacagcattcatgtgaccaaggagtccacccaccccgtgaagcccctggcccagatcgccggaaacagatacgcctccggacctgtgggaaaggccctgagcgacgcatgtatgggcacaatcgcctccttcctgtctaagtaccaggacatcatcatcgaacaccagaaggtggtgaagggcaaccagaagagactggagagcctgcgggagctggccggcaaggaaaacctggaataccctagcgtgaccctgccacctcagcctcacaccaaggagggcgttgatgcctacaacgaagtgatcgcccgggtgcgaatgtgggtgaacctgaacctgtggcagaagctgaagctaagcagagatgatgccaagcctctgctgagactgaagggattcccttcctttcctctggtcgagagacaggccaacgaagtggactggtgggacatggtgtgtaacgtgaagaagctgatcaacgagaaaaaggaggatggcaaggtgttttggcagaatctggctggctacaagagacaggaagccctgagaccatacctgagcagcgaggaagatcggaagaagggaaagaaattcgctcggtaccagctgggcgacctgctgctgcacctggaaaagaagcacggcgaggactggggaaaggtgtacgacgaggcctgggagcggattgacaagaaagtggaaggcctgagcaagcacatcaagctggaagaggaacggagaagcgaggacgcccagagcaaggccgccctgaccgactggctgcgggctaaggccagcttcgtgatcgagggcctgaaggaggccgacaaggacgagttctgcagatgcgagctgaagctgcagaagtggtacggggacctgcggggaaagcccttcgccatcgaagccgagaacagcatcctggacatcagcggcttcagcaagcagtacaactgtgccttcatctggcagaaggacggcgtgaagaagctgaacctgtacctgatcatcaactacttcaagggcggcaagctgcggttcaagaagatcaaacctgaagccttcgaagccaacagattctacaccgtgatcaacaaaaagagcggcgagatcgtgcccatggaggtgaacttcaacttcgacgaccccaacctgatcatcctgcctctggcctttggcaagagacagggcagagaattcatctggaacgacctgctgtccctggaaaccggcagcctgaagctggccaacggaagagtgatcgagaagacactgtacaacagaagaacccggcaggatgagcctgccctgttcgtggccctgaccttcgagcggcgggaggtcctggactcctccaatatcaaaccaatgaacctgatcggcgtggcaagaggcgaaaacatccccgccgtgatcgccctgaccgaccccgagggctgcccactgagccggtttaaggatagcctgggaaacccaacccacatcctgagaatcggcgagagctataaggagaagcagcggaccatccaggccaagaaggaggtggagcagcggagagccggcggctacagccggaagtacgccagcaaagccaagaatctggcagacgatatggtgagaaacaccgctagagatctgctgtactacgccgtgacccaggatgccatgctgatcttcgccaacctgagccggggcttcggccggcagggcaagcggaccttcatggccgagagacagtacacacggatggaggactggctgaccgccaagctggcctacgagggcctgagcaagacctacctgtccaagacactggcccagtacacctccaagacatgcagcaactgtgggtttaccatcaccagcgccgactacgacagggtgctggagaagctgaagaagacagcaacaggctggatgaccacaattaacggcaaggagctgaaggtggagggccagattacctactacaacagatacaagagacagaacgtagtcaaggacctgtccgtcgagctggatagactgagcgaagaatctgtgaacaacgacatctcctcctggacaaagggcagaagcggagaagctctgagcctcctgaagaaaagattctcccatagacccgtgcaggagaagttcgtgtgcctgaactgcggcttcgagacacacgcagccgagcaagccgccctgaacatcgccagatcctggctgttcctgcggagccaggagtacaagaaataccagacaaacaagacaaccggcaacaccgataagagagccttcgtcgagacctggcagtccttttaccggaagaagcttaaggaggtgtggaaacctgccgtgcggtctggcggatctggcggaggctccacaagccccagcgtgcccgtgaccttcagggacgtgttcgtgcagttcagcagggacgagtgggccctgctggacgacgagcagaaggagctgcaccagagcgtgatgcagagcaactacgagatgctgatgagcctgtactgcgacctggccaagcccgaggtgagcctgcagatggagaggggcgagccctgcctgcccgccgagcccgacctgcagggcaccgccgtgagcctgaaccccgccgccaccagccccaagaaaaagagaaaagtctaagctgccttctgcggggcttgccttctggccatgcccttcttctctcccttgcacctgtacctcttggtctttgaataaagcctgagtaggaaggctagcaaaaaaaaaaaaaaaaaaaaaaaaaaaaaaaaaaaaaaaaaaaaaaaaaaaaaaaaaaaaaaaaaaaaaaaaaaaaaaaa

SEQ ID NO: 3826 - RNA, 5419 nt, synthetic construct
  source 1..5419: mol_type = other RNA
aggaaataagagagaaaagaagagtaagaagaaatataagagccaccatggcccctaagaagaagcgtaaagtgagccgggtgaacggcagcggcagcggcggcggcatgaaccacgaccaggagttcgacccccctaaggtgtaccctcccgtccccgccgagaagagaaagcccatccgggtcctgagcctgttcgatggcatcgccaccggtctgctggtgctgaaggacctgggcatccaggtggataggtacattgcctccgaggtgtgcgaggactccatcaccgtgggaatggtgcgtcatcagggcaagatcatgtacgtgggcgacgtgcggagcgtgacacagaagcatatccaggagtggggccctttcgacctggtgatcggcggcagcccttgcaatgacctgagcatcgtgaacccagcccggaagggcctgtacgagggaaccggcagactgttcttcgagttttacagactgctgcacgacgcccggcctaaggaaggcgacgaccggcccttcttttggctgttcgagaatgtggtggccatgggagtcagcgacaagcgggatattagccggttcctggagagcaaccccgtgatgatcgatgccaaggaagtgagcgccgcccaccgggccagatacttctggggcaatctgcctggcatgaacagacccctggccagcaccgtgaacgacaagctggagctgcaggagtgcctggagcacggccggatcgccaagttcagcaaggtgagaaccatcaccacccgaagcaacagcatcaaacaaggcaaggaccagcactttcctgtgttcatgaacgagaaggaggacatcctgtggtgtaccgagatggagagagtgttcgggttcccagtccactacacagatgtcagcaacatgtctagactggccagacagagactgctgggaagaagctggtccgtccctgtgatcagacacctgttcgcccctctgaaggagtacttcgcctgcgtgagcagcggcaacagcaacgccaacagccggggccccagcttctctagcggcctggtgccactgtccctgagagggagccacatgggccccatggagatctacaaaaccgtgagcgcctggaagcggcagcctgtgcgcgtgctgagcctgtttcggaatatcgataaagtcctgaaaagcctgggattcctggagagcggctctggctccggcggtggcaccctgaagtacgtggaggatgtgacaaacgtggtcagacgggatgtggagaagtggggccccttcgatctggtgtacggcagcacccaacccctgggcagctcttgtgaccggtgccctggctggtacatgtttcagttccaccggatcctgcagtacgccctgccgagacaggagtcccagcggccattcttttggattttcatggacaacttgctgctgaccgaggatgaccaggaaactaccactcggttcctgcagaccgaagccgtgaccctgcaggacgtgagaggccgggactaccagaacgccatgcgggtgtggtccaacatccctggactgaaaagcaagcacgcacctctgacccctaaagaagaggagtacctgcaggcccaggtgcggagcagaagcaagctggacgcccctaaggtggatctgctggtgaagaattgcctcctgcccctgagagagtacttcaagtatttcagccagaatagtctgcccctgggcggcccaagcagcggcgcccctcctcccagcggcggcagcccagccggctccccaacctctaccgaggagggcacctctgagtccgccacccccgagagcggccctggcacctccaccgagcccagcgagggcagcgcacccggcagccctgccggcagccccacctccacagaggagggaaccagcaccgagcccagcgaaggcagcgccccaggcaccagcaccgagcctagtgagggcggctctggcggcggcagcgcccaggagattaaacggatcaacaagatcagaagaagacttgtgaaagacagcaacaccaagaaggccggcaagacaggccccatgaaaaccctgctggttagagtgatgacacccgatctgagagagcggctggaaaacctgagaaagaagcctgaaaatatcccccagcccatcagcaatacatctagagccaacctgaataagctgctgaccgattacaccgaaatgaagaaggcgatcctgcatgtgtactgggaagagttccagaaggaccctgtgggcctgatgagccgggtggcccagcctgccagcaagaagatcgatcagaacaagctgaaacctgagatggacgagaagggcaacctgaccaccgccggctttgcctgctctcagtgtggccagcccctgttcgtgtacaagctggagcaggtgtctgagaagggcaaggcttacaccaactacttcggacggtgcaatgtggccgagcacgaaaagctgatcctgctggcccagctgaagcccgagaaggatagcgacgaagccgtgacatatagcctgggaaagtttgggcagagggccctggatttctacagcattcatgtgaccaaggagtccacccaccccgtgaagcccctggcccagatcgccggaaacagatacgcctccggacctgtgggaaaggccctgagcgacgcatgtatgggcacaatcgcctccttcctgtctaagtaccaggacatcatcatcgaacaccagaaggtggtgaagggcaaccagaagagactggagagcctgcgggagctggccggcaaggaaaacctggaataccctagcgtgaccctgccacctcagcctcacaccaaggagggcgttgatgcctacaacgaagtgatcgcccgggtgcgaatgtgggtgaacctgaacctgtggcagaagctgaagctaagcagagatgatgccaagcctctgctgagactgaagggattcccttcctttcctctggtcgagagacaggccaacgaagtggactggtgggacatggtgtgtaacgtgaagaagctgatcaacgagaaaaaggaggatggcaaggtgttttggcagaatctggctggctacaagagacaggaagccctgagaccatacctgagcagcgaggaagatcggaagaagggaaagaaattcgctcggtaccagctgggcgacctgctgctgcacctggaaaagaagcacggcgaggactggggaaaggtgtacgacgaggcctgggagcggattgacaagaaagtggaaggcctgagcaagcacatcaagctggaagaggaacggagaagcgaggacgcccagagcaaggccgccctgaccgactggctgcgggctaaggccagcttcgtgatcgagggcctgaaggaggccgacaaggacgagttctgcagatgcgagctgaagctgcagaagtggtacggggacctgcggggaaagcccttcgccatcgaagccgagaacagcatcctggacatcagcggcttcagcaagcagtacaactgtgccttcatctggcagaaggacggcgtgaagaagctgaacctgtacctgatcatcaactacttcaagggcggcaagctgcggttcaagaagatcaaacctgaagccttcgaagccaacagattctacaccgtgatcaacaaaaagagcggcgagatcgtgcccatggaggtgaacttcaacttcgacgaccccaacctgatcatcctgcctctggcctttggcaagagacagggcagagaattcatctggaacgacctgctgtccctggaaaccggcagcctgaagctggccaacggaagagtgatcgagaagacactgtacaacagaagaacccggcaggatgagcctgccctgttcgtggccctgaccttcgagcggcgggaggtcctggactcctccaatatcaaaccaatgaacctgatcggcgtggcaagaggcgaaaacatccccgccgtgatcgccctgaccgaccccgagggctgcccactgagccggtttaaggatagcctgggaaacccaacccacatcctgagaatcggcgagagctataaggagaagcagcggaccatccaggccaagaaggaggtggagcagcggagagccggcggctacagccggaagtacgccagcaaagccaagaatctggcagacgatatggtgagaaacaccgctagagatctgctgtactacgccgtgacccaggatgccatgctgatcttcgccaacctgagccggggcttcggccggcagggcaagcggaccttcatggccgagagacagtacacacggatggaggactggctgaccgccaagctggcctacgagggcctgagcaagacctacctgtccaagacactggcccagtacacctccaagacatgcagcaactgtgggtttaccatcaccagcgccgactacgacagggtgctggagaagctgaagaagacagcaacaggctggatgaccacaattaacggcaaggagctgaaggtggagggccagattacctactacaacagatacaagagacagaacgtagtcaaggacctgtccgtcgagctggatagactgagcgaagaatctgtgaacaacgacatctcctcctggacaaagggcagaagcggagaagctctgagcctcctgaagaaaagattctcccatagacccgtgcaggagaagttcgtgtgcctgaactgcggcttcgagacacacgcagccgagcaagccgccctgaacatcgccagatcctggctgttcctgcggagccaggagtacaagaaataccagacaaacaagacaaccggcaacaccgataagagagccttcgtcgagacctggcagtccttttaccggaagaagcttaaggaggtgtggaaacctgccgtgcggtctggcggatctggcggaggctccacaagcttccaggagagcgtgaccttcgaggacgtggccatctacttcagcgagaacgagtggaccggcctggcccccgcccagagggccctgtacagggacgtgatgctggagaactacggcgccgtggccagcctggccgccttccccttccccaagcccgccctgatcttccagctggagcagggcgaggccccctggagcagcgccccccagggcgccctggacggcgagggccccaggggcatcaccagccccaagaaaaagagaaaagtctaagctgccttctgcggggcttgccttctggccatgcccttcttctctcccttgcacctgtacctcttggtctttgaataaagcctgagtaggaaggctagcaaaaaaaaaaaaaaaaaaaaaaaaaaaaaaaaaaaaaaaaaaaaaaaaaaaaaaaaaaaaaaaaaaaaaaaaaaaaaaaa

SEQ ID NO: 3827 - RNA, 5419 nt, synthetic construct
  source 1..5419: mol_type = other RNA
aggaaataagagagaaaagaagagtaagaagaaatataagagccaccatggcccctaagaagaagcgtaaagtgagccgggtgaacggcagcggcagcggcggcggcatgaaccacgaccaggagttcgacccccctaaggtgtaccctcccgtccccgccgagaagagaaagcccatccgggtcctgagcctgttcgatggcatcgccaccggtctgctggtgctgaaggacctgggcatccaggtggataggtacattgcctccgaggtgtgcgaggactccatcaccgtgggaatggtgcgtcatcagggcaagatcatgtacgtgggcgacgtgcggagcgtgacacagaagcatatccaggagtggggccctttcgacctggtgatcggcggcagcccttgcaatgacctgagcatcgtgaacccagcccggaagggcctgtacgagggaaccggcagactgttcttcgagttttacagactgctgcacgacgcccggcctaaggaaggcgacgaccggcccttcttttggctgttcgagaatgtggtggccatgggagtcagcgacaagcgggatattagccggttcctggagagcaaccccgtgatgatcgatgccaaggaagtgagcgccgcccaccgggccagatacttctggggcaatctgcctggcatgaacagacccctggccagcaccgtgaacgacaagctggagctgcaggagtgcctggagcacggccggatcgccaagttcagcaaggtgagaaccatcaccacccgaagcaacagcatcaaacaaggcaaggaccagcactttcctgtgttcatgaacgagaaggaggacatcctgtggtgtaccgagatggagagagtgttcgggttcccagtccactacacagatgtcagcaacatgtctagactggccagacagagactgctgggaagaagctggtccgtccctgtgatcagacacctgttcgcccctctgaaggagtacttcgcctgcgtgagcagcggcaacagcaacgccaacagccggggccccagcttctctagcggcctggtgccactgtccctgagagggagccacatgggccccatggagatctacaaaaccgtgagcgcctggaagcggcagcctgtgcgcgtgctgagcctgtttcggaatatcgataaagtcctgaaaagcctgggattcctggagagcggctctggctccggcggtggcaccctgaagtacgtggaggatgtgacaaacgtggtcagacgggatgtggagaagtggggccccttcgatctggtgtacggcagcacccaacccctgggcagctcttgtgaccggtgccctggctggtacatgtttcagttccaccggatcctgcagtacgccctgccgagacaggagtcccagcggccattcttttggattttcatggacaacttgctgctgaccgaggatgaccaggaaactaccactcggttcctgcagaccgaagccgtgaccctgcaggacgtgagaggccgggactaccagaacgccatgcgggtgtggtccaacatccctggactgaaaagcaagcacgcacctctgacccctaaagaagaggagtacctgcaggcccaggtgcggagcagaagcaagctggacgcccctaaggtggatctgctggtgaagaattgcctcctgcccctgagagagtacttcaagtatttcagccagaatagtctgcccctgggcggcccaagcagcggcgcccctcctcccagcggcggcagcccagccggctccccaacctctaccgaggagggcacctctgagtccgccacccccgagagcggccctggcacctccaccgagcccagcgagggcagcgcacccggcagccctgccggcagccccacctccacagaggagggaaccagcaccgagcccagcgaaggcagcgccccaggcaccagcaccgagcctagtgagggcggctctggcggcggcagcgcccaggagattaaacggatcaacaagatcagaagaagacttgtgaaagacagcaacaccaagaaggccggcaagacaggccccatgaaaaccctgctggttagagtgatgacacccgatctgagagagcggctggaaaacctgagaaagaagcctgaaaatatcccccagcccatcagcaatacatctagagccaacctgaataagctgctgaccgattacaccgaaatgaagaaggcgatcctgcatgtgtactgggaagagttccagaaggaccctgtgggcctgatgagccgggtggcccagcctgccagcaagaagatcgatcagaacaagctgaaacctgagatggacgagaagggcaacctgaccaccgccggctttgcctgctctcagtgtggccagcccctgttcgtgtacaagctggagcaggtgtctgagaagggcaaggcttacaccaactacttcggacggtgcaatgtggccgagcacgaaaagctgatcctgctggcccagctgaagcccgagaaggatagcgacgaagccgtgacatatagcctgggaaagtttgggcagagggccctggatttctacagcattcatgtgaccaaggagtccacccaccccgtgaagcccctggcccagatcgccggaaacagatacgcctccggacctgtgggaaaggccctgagcgacgcatgtatgggcacaatcgcctccttcctgtctaagtaccaggacatcatcatcgaacaccagaaggtggtgaagggcaaccagaagagactggagagcctgcgggagctggccggcaaggaaaacctggaataccctagcgtgaccctgccacctcagcctcacaccaaggagggcgttgatgcctacaacgaagtgatcgcccgggtgcgaatgtgggtgaacctgaacctgtggcagaagctgaagctaagcagagatgatgccaagcctctgctgagactgaagggattcccttcctttcctctggtcgagagacaggccaacgaagtggactggtgggacatggtgtgtaacgtgaagaagctgatcaacgagaaaaaggaggatggcaaggtgttttggcagaatctggctggctacaagagacaggaagccctgagaccatacctgagcagcgaggaagatcggaagaagggaaagaaattcgctcggtaccagctgggcgacctgctgctgcacctggaaaagaagcacggcgaggactggggaaaggtgtacgacgaggcctgggagcggattgacaagaaagtggaaggcctgagcaagcacatcaagctggaagaggaacggagaagcgaggacgcccagagcaaggccgccctgaccgactggctgcgggctaaggccagcttcgtgatcgagggcctgaaggaggccgacaaggacgagttctgcagatgcgagctgaagctgcagaagtggtacggggacctgcggggaaagcccttcgccatcgaagccgagaacagcatcctggacatcagcggcttcagcaagcagtacaactgtgccttcatctggcagaaggacggcgtgaagaagctgaacctgtacctgatcatcaactacttcaagggcggcaagctgcggttcaagaagatcaaacctgaagccttcgaagccaacagattctacaccgtgatcaacaaaaagagcggcgagatcgtgcccatggaggtgaacttcaacttcgacgaccccaacctgatcatcctgcctctggcctttggcaagagacagggcagagaattcatctggaacgacctgctgtccctggaaaccggcagcctgaagctggccaacggaagagtgatcgagaagacactgtacaacagaagaacccggcaggatgagcctgccctgttcgtggccctgaccttcgagcggcgggaggtcctggactcctccaatatcaaaccaatgaacctgatcggcgtggcaagaggcgaaaacatccccgccgtgatcgccctgaccgaccccgagggctgcccactgagccggtttaaggatagcctgggaaacccaacccacatcctgagaatcggcgagagctataaggagaagcagcggaccatccaggccaagaaggaggtggagcagcggagagccggcggctacagccggaagtacgccagcaaagccaagaatctggcagacgatatggtgagaaacaccgctagagatctgctgtactacgccgtgacccaggatgccatgctgatcttcgccaacctgagccggggcttcggccggcagggcaagcggaccttcatggccgagagacagtacacacggatggaggactggctgaccgccaagctggcctacgagggcctgagcaagacctacctgtccaagacactggcccagtacacctccaagacatgcagcaactgtgggtttaccatcaccagcgccgactacgacagggtgctggagaagctgaagaagacagcaacaggctggatgaccacaattaacggcaaggagctgaaggtggagggccagattacctactacaacagatacaagagacagaacgtagtcaaggacctgtccgtcgagctggatagactgagcgaagaatctgtgaacaacgacatctcctcctggacaaagggcagaagcggagaagctctgagcctcctgaagaaaagattctcccatagacccgtgcaggagaagttcgtgtgcctgaactgcggcttcgagacacacgcagccgagcaagccgccctgaacatcgccagatcctggctgttcctgcggagccaggagtacaagaaataccagacaaacaagacaaccggcaacaccgataagagagccttcgtcgagacctggcagtccttttaccggaagaagcttaaggaggtgtggaaacctgccgtgcggtctggcggatctggcggaggctccacaagcatgggccccctgaccatcagggacgtgaccgtggagttcagcctggaggagtggcactgcctggacaccgcccagcagaacctgtacagggacgtgatgctggagaactacaggaacctggtgttcctgggcatcgccgtgagcaagcccgacctgatcacctgcctggagcagggcaaggagccctgcaacatgaagaggcacgagatggtggccaagccccccgtgatgtgcagccacatcaccagccccaagaaaaagagaaaagtctaagctgccttctgcggggcttgccttctggccatgcccttcttctctcccttgcacctgtacctcttggtctttgaataaagcctgagtaggaaggctagcaaaaaaaaaaaaaaaaaaaaaaaaaaaaaaaaaaaaaaaaaaaaaaaaaaaaaaaaaaaaaaaaaaaaaaaaaaaaaaaa

SEQ ID NO: 3828 - RNA, 5419 nt, synthetic construct
  source 1..5419: mol_type = other RNA
aggaaataagagagaaaagaagagtaagaagaaatataagagccaccatggcccctaagaagaagcgtaaagtgagccgggtgaacggcagcggcagcggcggcggcatgaaccacgaccaggagttcgacccccctaaggtgtaccctcccgtccccgccgagaagagaaagcccatccgggtcctgagcctgttcgatggcatcgccaccggtctgctggtgctgaaggacctgggcatccaggtggataggtacattgcctccgaggtgtgcgaggactccatcaccgtgggaatggtgcgtcatcagggcaagatcatgtacgtgggcgacgtgcggagcgtgacacagaagcatatccaggagtggggccctttcgacctggtgatcggcggcagcccttgcaatgacctgagcatcgtgaacccagcccggaagggcctgtacgagggaaccggcagactgttcttcgagttttacagactgctgcacgacgcccggcctaaggaaggcgacgaccggcccttcttttggctgttcgagaatgtggtggccatgggagtcagcgacaagcgggatattagccggttcctggagagcaaccccgtgatgatcgatgccaaggaagtgagcgccgcccaccgggccagatacttctggggcaatctgcctggcatgaacagacccctggccagcaccgtgaacgacaagctggagctgcaggagtgcctggagcacggccggatcgccaagttcagcaaggtgagaaccatcaccacccgaagcaacagcatcaaacaaggcaaggaccagcactttcctgtgttcatgaacgagaaggaggacatcctgtggtgtaccgagatggagagagtgttcgggttcccagtccactacacagatgtcagcaacatgtctagactggccagacagagactgctgggaagaagctggtccgtccctgtgatcagacacctgttcgcccctctgaaggagtacttcgcctgcgtgagcagcggcaacagcaacgccaacagccggggccccagcttctctagcggcctggtgccactgtccctgagagggagccacatgggccccatggagatctacaaaaccgtgagcgcctggaagcggcagcctgtgcgcgtgctgagcctgtttcggaatatcgataaagtcctgaaaagcctgggattcctggagagcggctctggctccggcggtggcaccctgaagtacgtggaggatgtgacaaacgtggtcagacgggatgtggagaagtggggccccttcgatctggtgtacggcagcacccaacccctgggcagctcttgtgaccggtgccctggctggtacatgtttcagttccaccggatcctgcagtacgccctgccgagacaggagtcccagcggccattcttttggattttcatggacaacttgctgctgaccgaggatgaccaggaaactaccactcggttcctgcagaccgaagccgtgaccctgcaggacgtgagaggccgggactaccagaacgccatgcgggtgtggtccaacatccctggactgaaaagcaagcacgcacctctgacccctaaagaagaggagtacctgcaggcccaggtgcggagcagaagcaagctggacgcccctaaggtggatctgctggtgaagaattgcctcctgcccctgagagagtacttcaagtatttcagccagaatagtctgcccctgggcggcccaagcagcggcgcccctcctcccagcggcggcagcccagccggctccccaacctctaccgaggagggcacctctgagtccgccacccccgagagcggccctggcacctccaccgagcccagcgagggcagcgcacccggcagccctgccggcagccccacctccacagaggagggaaccagcaccgagcccagcgaaggcagcgccccaggcaccagcaccgagcctagtgagggcggctctggcggcggcagcgcccaggagattaaacggatcaacaagatcagaagaagacttgtgaaagacagcaacaccaagaaggccggcaagacaggccccatgaaaaccctgctggttagagtgatgacacccgatctgagagagcggctggaaaacctgagaaagaagcctgaaaatatcccccagcccatcagcaatacatctagagccaacctgaataagctgctgaccgattacaccgaaatgaagaaggcgatcctgcatgtgtactgggaagagttccagaaggaccctgtgggcctgatgagccgggtggcccagcctgccagcaagaagatcgatcagaacaagctgaaacctgagatggacgagaagggcaacctgaccaccgccggctttgcctgctctcagtgtggccagcccctgttcgtgtacaagctggagcaggtgtctgagaagggcaaggcttacaccaactacttcggacggtgcaatgtggccgagcacgaaaagctgatcctgctggcccagctgaagcccgagaaggatagcgacgaagccgtgacatatagcctgggaaagtttgggcagagggccctggatttctacagcattcatgtgaccaaggagtccacccaccccgtgaagcccctggcccagatcgccggaaacagatacgcctccggacctgtgggaaaggccctgagcgacgcatgtatgggcacaatcgcctccttcctgtctaagtaccaggacatcatcatcgaacaccagaaggtggtgaagggcaaccagaagagactggagagcctgcgggagctggccggcaaggaaaacctggaataccctagcgtgaccctgccacctcagcctcacaccaaggagggcgttgatgcctacaacgaagtgatcgcccgggtgcgaatgtgggtgaacctgaacctgtggcagaagctgaagctaagcagagatgatgccaagcctctgctgagactgaagggattcccttcctttcctctggtcgagagacaggccaacgaagtggactggtgggacatggtgtgtaacgtgaagaagctgatcaacgagaaaaaggaggatggcaaggtgttttggcagaatctggctggctacaagagacaggaagccctgagaccatacctgagcagcgaggaagatcggaagaagggaaagaaattcgctcggtaccagctgggcgacctgctgctgcacctggaaaagaagcacggcgaggactggggaaaggtgtacgacgaggcctgggagcggattgacaagaaagtggaaggcctgagcaagcacatcaagctggaagaggaacggagaagcgaggacgcccagagcaaggccgccctgaccgactggctgcgggctaaggccagcttcgtgatcgagggcctgaaggaggccgacaaggacgagttctgcagatgcgagctgaagctgcagaagtggtacggggacctgcggggaaagcccttcgccatcgaagccgagaacagcatcctggacatcagcggcttcagcaagcagtacaactgtgccttcatctggcagaaggacggcgtgaagaagctgaacctgtacctgatcatcaactacttcaagggcggcaagctgcggttcaagaagatcaaacctgaagccttcgaagccaacagattctacaccgtgatcaacaaaaagagcggcgagatcgtgcccatggaggtgaacttcaacttcgacgaccccaacctgatcatcctgcctctggcctttggcaagagacagggcagagaattcatctggaacgacctgctgtccctggaaaccggcagcctgaagctggccaacggaagagtgatcgagaagacactgtacaacagaagaacccggcaggatgagcctgccctgttcgtggccctgaccttcgagcggcgggaggtcctggactcctccaatatcaaaccaatgaacctgatcggcgtggcaagaggcgaaaacatccccgccgtgatcgccctgaccgaccccgagggctgcccactgagccggtttaaggatagcctgggaaacccaacccacatcctgagaatcggcgagagctataaggagaagcagcggaccatccaggccaagaaggaggtggagcagcggagagccggcggctacagccggaagtacgccagcaaagccaagaatctggcagacgatatggtgagaaacaccgctagagatctgctgtactacgccgtgacccaggatgccatgctgatcttcgccaacctgagccggggcttcggccggcagggcaagcggaccttcatggccgagagacagtacacacggatggaggactggctgaccgccaagctggcctacgagggcctgagcaagacctacctgtccaagacactggcccagtacacctccaagacatgcagcaactgtgggtttaccatcaccagcgccgactacgacagggtgctggagaagctgaagaagacagcaacaggctggatgaccacaattaacggcaaggagctgaaggtggagggccagattacctactacaacagatacaagagacagaacgtagtcaaggacctgtccgtcgagctggatagactgagcgaagaatctgtgaacaacgacatctcctcctggacaaagggcagaagcggagaagctctgagcctcctgaagaaaagattctcccatagacccgtgcaggagaagttcgtgtgcctgaactgcggcttcgagacacacgcagccgagcaagccgccctgaacatcgccagatcctggctgttcctgcggagccaggagtacaagaaataccagacaaacaagacaaccggcaacaccgataagagagccttcgtcgagacctggcagtccttttaccggaagaagcttaaggaggtgtggaaacctgccgtgcggtctggcggatctggcggaggctccacaagccagccccaggaggccatgaccttcaaggacgtggaggtgaccttcagccaggacgagtggggcagcctggacagcgcccagaggaacctgtacagggacgtgatgctggagaactacaggaacatggtgagcctggtgggccccttcaccaagcccgccctgatcagctggctggaggccagggagccctggggcctgaacgtgcaggccgcccagcccaagggcaaccccggcgccgcccccaccagccccaagaaaaagagaaaagtctaagctgccttctgcggggcttgccttctggccatgcccttcttctctcccttgcacctgtacctcttggtctttgaataaagcctgagtaggaaggctagcaaaaaaaaaaaaaaaaaaaaaaaaaaaaaaaaaaaaaaaaaaaaaaaaaaaaaaaaaaaaaaaaaaaaaaaaaaaaaaaa

SEQ ID NO: 3829 - RNA, 5419 nt, synthetic construct
  source 1..5419: mol_type = other RNA
aggaaataagagagaaaagaagagtaagaagaaatataagagccaccatggcccctaagaagaagcgtaaagtgagccgggtgaacggcagcggcagcggcggcggcatgaaccacgaccaggagttcgacccccctaaggtgtaccctcccgtccccgccgagaagagaaagcccatccgggtcctgagcctgttcgatggcatcgccaccggtctgctggtgctgaaggacctgggcatccaggtggataggtacattgcctccgaggtgtgcgaggactccatcaccgtgggaatggtgcgtcatcagggcaagatcatgtacgtgggcgacgtgcggagcgtgacacagaagcatatccaggagtggggccctttcgacctggtgatcggcggcagcccttgcaatgacctgagcatcgtgaacccagcccggaagggcctgtacgagggaaccggcagactgttcttcgagttttacagactgctgcacgacgcccggcctaaggaaggcgacgaccggcccttcttttggctgttcgagaatgtggtggccatgggagtcagcgacaagcgggatattagccggttcctggagagcaaccccgtgatgatcgatgccaaggaagtgagcgccgcccaccgggccagatacttctggggcaatctgcctggcatgaacagacccctggccagcaccgtgaacgacaagctggagctgcaggagtgcctggagcacggccggatcgccaagttcagcaaggtgagaaccatcaccacccgaagcaacagcatcaaacaaggcaaggaccagcactttcctgtgttcatgaacgagaaggaggacatcctgtggtgtaccgagatggagagagtgttcgggttcccagtccactacacagatgtcagcaacatgtctagactggccagacagagactgctgggaagaagctggtccgtccctgtgatcagacacctgttcgcccctctgaaggagtacttcgcctgcgtgagcagcggcaacagcaacgccaacagccggggccccagcttctctagcggcctggtgccactgtccctgagagggagccacatgggccccatggagatctacaaaaccgtgagcgcctggaagcggcagcctgtgcgcgtgctgagcctgtttcggaatatcgataaagtcctgaaaagcctgggattcctggagagcggctctggctccggcggtggcaccctgaagtacgtggaggatgtgacaaacgtggtcagacgggatgtggagaagtggggccccttcgatctggtgtacggcagcacccaacccctgggcagctcttgtgaccggtgccctggctggtacatgtttcagttccaccggatcctgcagtacgccctgccgagacaggagtcccagcggccattcttttggattttcatggacaacttgctgctgaccgaggatgaccaggaaactaccactcggttcctgcagaccgaagccgtgaccctgcaggacgtgagaggccgggactaccagaacgccatgcgggtgtggtccaacatccctggactgaaaagcaagcacgcacctctgacccctaaagaagaggagtacctgcaggcccaggtgcggagcagaagcaagctggacgcccctaaggtggatctgctggtgaagaattgcctcctgcccctgagagagtacttcaagtatttcagccagaatagtctgcccctgggcggcccaagcagcggcgcccctcctcccagcggcggcagcccagccggctccccaacctctaccgaggagggcacctctgagtccgccacccccgagagcggccctggcacctccaccgagcccagcgagggcagcgcacccggcagccctgccggcagccccacctccacagaggagggaaccagcaccgagcccagcgaaggcagcgccccaggcaccagcaccgagcctagtgagggcggctctggcggcggcagcgcccaggagattaaacggatcaacaagatcagaagaagacttgtgaaagacagcaacaccaagaaggccggcaagacaggccccatgaaaaccctgctggttagagtgatgacacccgatctgagagagcggctggaaaacctgagaaagaagcctgaaaatatcccccagcccatcagcaatacatctagagccaacctgaataagctgctgaccgattacaccgaaatgaagaaggcgatcctgcatgtgtactgggaagagttccagaaggaccctgtgggcctgatgagccgggtggcccagcctgccagcaagaagatcgatcagaacaagctgaaacctgagatggacgagaagggcaacctgaccaccgccggctttgcctgctctcagtgtggccagcccctgttcgtgtacaagctggagcaggtgtctgagaagggcaaggcttacaccaactacttcggacggtgcaatgtggccgagcacgaaaagctgatcctgctggcccagctgaagcccgagaaggatagcgacgaagccgtgacatatagcctgggaaagtttgggcagagggccctggatttctacagcattcatgtgaccaaggagtccacccaccccgtgaagcccctggcccagatcgccggaaacagatacgcctccggacctgtgggaaaggccctgagcgacgcatgtatgggcacaatcgcctccttcctgtctaagtaccaggacatcatcatcgaacaccagaaggtggtgaagggcaaccagaagagactggagagcctgcgggagctggccggcaaggaaaacctggaataccctagcgtgaccctgccacctcagcctcacaccaaggagggcgttgatgcctacaacgaagtgatcgcccgggtgcgaatgtgggtgaacctgaacctgtggcagaagctgaagctaagcagagatgatgccaagcctctgctgagactgaagggattcccttcctttcctctggtcgagagacaggccaacgaagtggactggtgggacatggtgtgtaacgtgaagaagctgatcaacgagaaaaaggaggatggcaaggtgttttggcagaatctggctggctacaagagacaggaagccctgagaccatacctgagcagcgaggaagatcggaagaagggaaagaaattcgctcggtaccagctgggcgacctgctgctgcacctggaaaagaagcacggcgaggactggggaaaggtgtacgacgaggcctgggagcggattgacaagaaagtggaaggcctgagcaagcacatcaagctggaagaggaacggagaagcgaggacgcccagagcaaggccgccctgaccgactggctgcgggctaaggccagcttcgtgatcgagggcctgaaggaggccgacaaggacgagttctgcagatgcgagctgaagctgcagaagtggtacggggacctgcggggaaagcccttcgccatcgaagccgagaacagcatcctggacatcagcggcttcagcaagcagtacaactgtgccttcatctggcagaaggacggcgtgaagaagctgaacctgtacctgatcatcaactacttcaagggcggcaagctgcggttcaagaagatcaaacctgaagccttcgaagccaacagattctacaccgtgatcaacaaaaagagcggcgagatcgtgcccatggaggtgaacttcaacttcgacgaccccaacctgatcatcctgcctctggcctttggcaagagacagggcagagaattcatctggaacgacctgctgtccctggaaaccggcagcctgaagctggccaacggaagagtgatcgagaagacactgtacaacagaagaacccggcaggatgagcctgccctgttcgtggccctgaccttcgagcggcgggaggtcctggactcctccaatatcaaaccaatgaacctgatcggcgtggcaagaggcgaaaacatccccgccgtgatcgccctgaccgaccccgagggctgcccactgagccggtttaaggatagcctgggaaacccaacccacatcctgagaatcggcgagagctataaggagaagcagcggaccatccaggccaagaaggaggtggagcagcggagagccggcggctacagccggaagtacgccagcaaagccaagaatctggcagacgatatggtgagaaacaccgctagagatctgctgtactacgccgtgacccaggatgccatgctgatcttcgccaacctgagccggggcttcggccggcagggcaagcggaccttcatggccgagagacagtacacacggatggaggactggctgaccgccaagctggcctacgagggcctgagcaagacctacctgtccaagacactggcccagtacacctccaagacatgcagcaactgtgggtttaccatcaccagcgccgactacgacagggtgctggagaagctgaagaagacagcaacaggctggatgaccacaattaacggcaaggagctgaaggtggagggccagattacctactacaacagatacaagagacagaacgtagtcaaggacctgtccgtcgagctggatagactgagcgaagaatctgtgaacaacgacatctcctcctggacaaagggcagaagcggagaagctctgagcctcctgaagaaaagattctcccatagacccgtgcaggagaagttcgtgtgcctgaactgcggcttcgagacacacgcagccgagcaagccgccctgaacatcgccagatcctggctgttcctgcggagccaggagtacaagaaataccagacaaacaagacaaccggcaacaccgataagagagccttcgtcgagacctggcagtccttttaccggaagaagcttaaggaggtgtggaaacctgccgtgcggtctggcggatctggcggaggctccacaagcatgaacagcgaggtgatcgtggaccccatccagggccaggtgaacttcgaggacgtgttcgtgtacttcagccaggaggagtgggtgctgctggacgaggcccagaggctgctgtacagggacgtgatgctggagaacttcgccctgatggccagcctgggccacaccagcttcatgagccacatcggcgccagcctggtgatgggcagcgagccctgggtgcccgactgggtggacatgatcaccagccccaagaaaaagagaaaagtctaagctgccttctgcggggcttgccttctggccatgcccttcttctctcccttgcacctgtacctcttggtctttgaataaagcctgagtaggaaggctagcaaaaaaaaaaaaaaaaaaaaaaaaaaaaaaaaaaaaaaaaaaaaaaaaaaaaaaaaaaaaaaaaaaaaaaaaaaaaaaaa

SEQ ID NO: 3830 - RNA, 5419 nt, synthetic construct
  source 1..5419: mol_type = other RNA
aggaaataagagagaaaagaagagtaagaagaaatataagagccaccatggcccctaagaagaagcgtaaagtgagccgggtgaacggcagcggcagcggcggcggcatgaaccacgaccaggagttcgacccccctaaggtgtaccctcccgtccccgccgagaagagaaagcccatccgggtcctgagcctgttcgatggcatcgccaccggtctgctggtgctgaaggacctgggcatccaggtggataggtacattgcctccgaggtgtgcgaggactccatcaccgtgggaatggtgcgtcatcagggcaagatcatgtacgtgggcgacgtgcggagcgtgacacagaagcatatccaggagtggggccctttcgacctggtgatcggcggcagcccttgcaatgacctgagcatcgtgaacccagcccggaagggcctgtacgagggaaccggcagactgttcttcgagttttacagactgctgcacgacgcccggcctaaggaaggcgacgaccggcccttcttttggctgttcgagaatgtggtggccatgggagtcagcgacaagcgggatattagccggttcctggagagcaaccccgtgatgatcgatgccaaggaagtgagcgccgcccaccgggccagatacttctggggcaatctgcctggcatgaacagacccctggccagcaccgtgaacgacaagctggagctgcaggagtgcctggagcacggccggatcgccaagttcagcaaggtgagaaccatcaccacccgaagcaacagcatcaaacaaggcaaggaccagcactttcctgtgttcatgaacgagaaggaggacatcctgtggtgtaccgagatggagagagtgttcgggttcccagtccactacacagatgtcagcaacatgtctagactggccagacagagactgctgggaagaagctggtccgtccctgtgatcagacacctgttcgcccctctgaaggagtacttcgcctgcgtgagcagcggcaacagcaacgccaacagccggggccccagcttctctagcggcctggtgccactgtccctgagagggagccacatgggccccatggagatctacaaaaccgtgagcgcctggaagcggcagcctgtgcgcgtgctgagcctgtttcggaatatcgataaagtcctgaaaagcctgggattcctggagagcggctctggctccggcggtggcaccctgaagtacgtggaggatgtgacaaacgtggtcagacgggatgtggagaagtggggccccttcgatctggtgtacggcagcacccaacccctgggcagctcttgtgaccggtgccctggctggtacatgtttcagttccaccggatcctgcagtacgccctgccgagacaggagtcccagcggccattcttttggattttcatggacaacttgctgctgaccgaggatgaccaggaaactaccactcggttcctgcagaccgaagccgtgaccctgcaggacgtgagaggccgggactaccagaacgccatgcgggtgtggtccaacatccctggactgaaaagcaagcacgcacctctgacccctaaagaagaggagtacctgcaggcccaggtgcggagcagaagcaagctggacgcccctaaggtggatctgctggtgaagaattgcctcctgcccctgagagagtacttcaagtatttcagccagaatagtctgcccctgggcggcccaagcagcggcgcccctcctcccagcggcggcagcccagccggctccccaacctctaccgaggagggcacctctgagtccgccacccccgagagcggccctggcacctccaccgagcccagcgagggcagcgcacccggcagccctgccggcagccccacctccacagaggagggaaccagcaccgagcccagcgaaggcagcgccccaggcaccagcaccgagcctagtgagggcggctctggcggcggcagcgcccaggagattaaacggatcaacaagatcagaagaagacttgtgaaagacagcaacaccaagaaggccggcaagacaggccccatgaaaaccctgctggttagagtgatgacacccgatctgagagagcggctggaaaacctgagaaagaagcctgaaaatatcccccagcccatcagcaatacatctagagccaacctgaataagctgctgaccgattacaccgaaatgaagaaggcgatcctgcatgtgtactgggaagagttccagaaggaccctgtgggcctgatgagccgggtggcccagcctgccagcaagaagatcgatcagaacaagctgaaacctgagatggacgagaagggcaacctgaccaccgccggctttgcctgctctcagtgtggccagcccctgttcgtgtacaagctggagcaggtgtctgagaagggcaaggcttacaccaactacttcggacggtgcaatgtggccgagcacgaaaagctgatcctgctggcccagctgaagcccgagaaggatagcgacgaagccgtgacatatagcctgggaaagtttgggcagagggccctggatttctacagcattcatgtgaccaaggagtccacccaccccgtgaagcccctggcccagatcgccggaaacagatacgcctccggacctgtgggaaaggccctgagcgacgcatgtatgggcacaatcgcctccttcctgtctaagtaccaggacatcatcatcgaacaccagaaggtggtgaagggcaaccagaagagactggagagcctgcgggagctggccggcaaggaaaacctggaataccctagcgtgaccctgccacctcagcctcacaccaaggagggcgttgatgcctacaacgaagtgatcgcccgggtgcgaatgtgggtgaacctgaacctgtggcagaagctgaagctaagcagagatgatgccaagcctctgctgagactgaagggattcccttcctttcctctggtcgagagacaggccaacgaagtggactggtgggacatggtgtgtaacgtgaagaagctgatcaacgagaaaaaggaggatggcaaggtgttttggcagaatctggctggctacaagagacaggaagccctgagaccatacctgagcagcgaggaagatcggaagaagggaaagaaattcgctcggtaccagctgggcgacctgctgctgcacctggaaaagaagcacggcgaggactggggaaaggtgtacgacgaggcctgggagcggattgacaagaaagtggaaggcctgagcaagcacatcaagctggaagaggaacggagaagcgaggacgcccagagcaaggccgccctgaccgactggctgcgggctaaggccagcttcgtgatcgagggcctgaaggaggccgacaaggacgagttctgcagatgcgagctgaagctgcagaagtggtacggggacctgcggggaaagcccttcgccatcgaagccgagaacagcatcctggacatcagcggcttcagcaagcagtacaactgtgccttcatctggcagaaggacggcgtgaagaagctgaacctgtacctgatcatcaactacttcaagggcggcaagctgcggttcaagaagatcaaacctgaagccttcgaagccaacagattctacaccgtgatcaacaaaaagagcggcgagatcgtgcccatggaggtgaacttcaacttcgacgaccccaacctgatcatcctgcctctggcctttggcaagagacagggcagagaattcatctggaacgacctgctgtccctggaaaccggcagcctgaagctggccaacggaagagtgatcgagaagacactgtacaacagaagaacccggcaggatgagcctgccctgttcgtggccctgaccttcgagcggcgggaggtcctggactcctccaatatcaaaccaatgaacctgatcggcgtggcaagaggcgaaaacatccccgccgtgatcgccctgaccgaccccgagggctgcccactgagccggtttaaggatagcctgggaaacccaacccacatcctgagaatcggcgagagctataaggagaagcagcggaccatccaggccaagaaggaggtggagcagcggagagccggcggctacagccggaagtacgccagcaaagccaagaatctggcagacgatatggtgagaaacaccgctagagatctgctgtactacgccgtgacccaggatgccatgctgatcttcgccaacctgagccggggcttcggccggcagggcaagcggaccttcatggccgagagacagtacacacggatggaggactggctgaccgccaagctggcctacgagggcctgagcaagacctacctgtccaagacactggcccagtacacctccaagacatgcagcaactgtgggtttaccatcaccagcgccgactacgacagggtgctggagaagctgaagaagacagcaacaggctggatgaccacaattaacggcaaggagctgaaggtggagggccagattacctactacaacagatacaagagacagaacgtagtcaaggacctgtccgtcgagctggatagactgagcgaagaatctgtgaacaacgacatctcctcctggacaaagggcagaagcggagaagctctgagcctcctgaagaaaagattctcccatagacccgtgcaggagaagttcgtgtgcctgaactgcggcttcgagacacacgcagccgagcaagccgccctgaacatcgccagatcctggctgttcctgcggagccaggagtacaagaaataccagacaaacaagacaaccggcaacaccgataagagagccttcgtcgagacctggcagtccttttaccggaagaagcttaaggaggtgtggaaacctgccgtgcggtctggcggatctggcggaggctccacaagcctgcaggagagcgtgaccttcagggacgtggccgtgttcttcagccaggacgagtggctgaggctggacagcgcccagaggaccctgtacagggaggtgatgctggagaactacggcaccctggtgagcctgggcatccccttcagcacccccaaggtgatctgccagctgcagcagggcgaggacccctgcgtggtggacagggagctgccccaggacgcctggcccggcctgaagacccagaccagccccaagaaaaagagaaaagtctaagctgccttctgcggggcttgccttctggccatgcccttcttctctcccttgcacctgtacctcttggtctttgaataaagcctgagtaggaaggctagcaaaaaaaaaaaaaaaaaaaaaaaaaaaaaaaaaaaaaaaaaaaaaaaaaaaaaaaaaaaaaaaaaaaaaaaaaaaaaaaa

SEQ ID NO: 3831 - RNA, 5419 nt, synthetic construct
  source 1..5419: mol_type = other RNA
aggaaataagagagaaaagaagagtaagaagaaatataagagccaccatggcccctaagaagaagcgtaaagtgagccgggtgaacggcagcggcagcggcggcggcatgaaccacgaccaggagttcgacccccctaaggtgtaccctcccgtccccgccgagaagagaaagcccatccgggtcctgagcctgttcgatggcatcgccaccggtctgctggtgctgaaggacctgggcatccaggtggataggtacattgcctccgaggtgtgcgaggactccatcaccgtgggaatggtgcgtcatcagggcaagatcatgtacgtgggcgacgtgcggagcgtgacacagaagcatatccaggagtggggccctttcgacctggtgatcggcggcagcccttgcaatgacctgagcatcgtgaacccagcccggaagggcctgtacgagggaaccggcagactgttcttcgagttttacagactgctgcacgacgcccggcctaaggaaggcgacgaccggcccttcttttggctgttcgagaatgtggtggccatgggagtcagcgacaagcgggatattagccggttcctggagagcaaccccgtgatgatcgatgccaaggaagtgagcgccgcccaccgggccagatacttctggggcaatctgcctggcatgaacagacccctggccagcaccgtgaacgacaagctggagctgcaggagtgcctggagcacggccggatcgccaagttcagcaaggtgagaaccatcaccacccgaagcaacagcatcaaacaaggcaaggaccagcactttcctgtgttcatgaacgagaaggaggacatcctgtggtgtaccgagatggagagagtgttcgggttcccagtccactacacagatgtcagcaacatgtctagactggccagacagagactgctgggaagaagctggtccgtccctgtgatcagacacctgttcgcccctctgaaggagtacttcgcctgcgtgagcagcggcaacagcaacgccaacagccggggccccagcttctctagcggcctggtgccactgtccctgagagggagccacatgggccccatggagatctacaaaaccgtgagcgcctggaagcggcagcctgtgcgcgtgctgagcctgtttcggaatatcgataaagtcctgaaaagcctgggattcctggagagcggctctggctccggcggtggcaccctgaagtacgtggaggatgtgacaaacgtggtcagacgggatgtggagaagtggggccccttcgatctggtgtacggcagcacccaacccctgggcagctcttgtgaccggtgccctggctggtacatgtttcagttccaccggatcctgcagtacgccctgccgagacaggagtcccagcggccattcttttggattttcatggacaacttgctgctgaccgaggatgaccaggaaactaccactcggttcctgcagaccgaagccgtgaccctgcaggacgtgagaggccgggactaccagaacgccatgcgggtgtggtccaacatccctggactgaaaagcaagcacgcacctctgacccctaaagaagaggagtacctgcaggcccaggtgcggagcagaagcaagctggacgcccctaaggtggatctgctggtgaagaattgcctcctgcccctgagagagtacttcaagtatttcagccagaatagtctgcccctgggcggcccaagcagcggcgcccctcctcccagcggcggcagcccagccggctccccaacctctaccgaggagggcacctctgagtccgccacccccgagagcggccctggcacctccaccgagcccagcgagggcagcgcacccggcagccctgccggcagccccacctccacagaggagggaaccagcaccgagcccagcgaaggcagcgccccaggcaccagcaccgagcctagtgagggcggctctggcggcggcagcgcccaggagattaaacggatcaacaagatcagaagaagacttgtgaaagacagcaacaccaagaaggccggcaagacaggccccatgaaaaccctgctggttagagtgatgacacccgatctgagagagcggctggaaaacctgagaaagaagcctgaaaatatcccccagcccatcagcaatacatctagagccaacctgaataagctgctgaccgattacaccgaaatgaagaaggcgatcctgcatgtgtactgggaagagttccagaaggaccctgtgggcctgatgagccgggtggcccagcctgccagcaagaagatcgatcagaacaagctgaaacctgagatggacgagaagggcaacctgaccaccgccggctttgcctgctctcagtgtggccagcccctgttcgtgtacaagctggagcaggtgtctgagaagggcaaggcttacaccaactacttcggacggtgcaatgtggccgagcacgaaaagctgatcctgctggcccagctgaagcccgagaaggatagcgacgaagccgtgacatatagcctgggaaagtttgggcagagggccctggatttctacagcattcatgtgaccaaggagtccacccaccccgtgaagcccctggcccagatcgccggaaacagatacgcctccggacctgtgggaaaggccctgagcgacgcatgtatgggcacaatcgcctccttcctgtctaagtaccaggacatcatcatcgaacaccagaaggtggtgaagggcaaccagaagagactggagagcctgcgggagctggccggcaaggaaaacctggaataccctagcgtgaccctgccacctcagcctcacaccaaggagggcgttgatgcctacaacgaagtgatcgcccgggtgcgaatgtgggtgaacctgaacctgtggcagaagctgaagctaagcagagatgatgccaagcctctgctgagactgaagggattcccttcctttcctctggtcgagagacaggccaacgaagtggactggtgggacatggtgtgtaacgtgaagaagctgatcaacgagaaaaaggaggatggcaaggtgttttggcagaatctggctggctacaagagacaggaagccctgagaccatacctgagcagcgaggaagatcggaagaagggaaagaaattcgctcggtaccagctgggcgacctgctgctgcacctggaaaagaagcacggcgaggactggggaaaggtgtacgacgaggcctgggagcggattgacaagaaagtggaaggcctgagcaagcacatcaagctggaagaggaacggagaagcgaggacgcccagagcaaggccgccctgaccgactggctgcgggctaaggccagcttcgtgatcgagggcctgaaggaggccgacaaggacgagttctgcagatgcgagctgaagctgcagaagtggtacggggacctgcggggaaagcccttcgccatcgaagccgagaacagcatcctggacatcagcggcttcagcaagcagtacaactgtgccttcatctggcagaaggacggcgtgaagaagctgaacctgtacctgatcatcaactacttcaagggcggcaagctgcggttcaagaagatcaaacctgaagccttcgaagccaacagattctacaccgtgatcaacaaaaagagcggcgagatcgtgcccatggaggtgaacttcaacttcgacgaccccaacctgatcatcctgcctctggcctttggcaagagacagggcagagaattcatctggaacgacctgctgtccctggaaaccggcagcctgaagctggccaacggaagagtgatcgagaagacactgtacaacagaagaacccggcaggatgagcctgccctgttcgtggccctgaccttcgagcggcgggaggtcctggactcctccaatatcaaaccaatgaacctgatcggcgtggcaagaggcgaaaacatccccgccgtgatcgccctgaccgaccccgagggctgcccactgagccggtttaaggatagcctgggaaacccaacccacatcctgagaatcggcgagagctataaggagaagcagcggaccatccaggccaagaaggaggtggagcagcggagagccggcggctacagccggaagtacgccagcaaagccaagaatctggcagacgatatggtgagaaacaccgctagagatctgctgtactacgccgtgacccaggatgccatgctgatcttcgccaacctgagccggggcttcggccggcagggcaagcggaccttcatggccgagagacagtacacacggatggaggactggctgaccgccaagctggcctacgagggcctgagcaagacctacctgtccaagacactggcccagtacacctccaagacatgcagcaactgtgggtttaccatcaccagcgccgactacgacagggtgctggagaagctgaagaagacagcaacaggctggatgaccacaattaacggcaaggagctgaaggtggagggccagattacctactacaacagatacaagagacagaacgtagtcaaggacctgtccgtcgagctggatagactgagcgaagaatctgtgaacaacgacatctcctcctggacaaagggcagaagcggagaagctctgagcctcctgaagaaaagattctcccatagacccgtgcaggagaagttcgtgtgcctgaactgcggcttcgagacacacgcagccgagcaagccgccctgaacatcgccagatcctggctgttcctgcggagccaggagtacaagaaataccagacaaacaagacaaccggcaacaccgataagagagccttcgtcgagacctggcagtccttttaccggaagaagcttaaggaggtgtggaaacctgccgtgcggtctggcggatctggcggaggctccacaagcttccagggcagcatcagcttcaaggacgtgaccgtgggcttcacccaggaggagtggcagcacctggaccccagccagagggccctgtacagggacgtgaccctggagaactacagcaacctggtgagcgtgggctactgcgtgcacaagcccgaggtgatcttcaggctggagcagggcgaggagccctggaggctggaggaggagttccccagccagagcttccccgaggtgtggaccgccaccagccccaagaaaaagagaaaagtctaagctgccttctgcggggcttgccttctggccatgcccttcttctctcccttgcacctgtacctcttggtctttgaataaagcctgagtaggaaggctagcaaaaaaaaaaaaaaaaaaaaaaaaaaaaaaaaaaaaaaaaaaaaaaaaaaaaaaaaaaaaaaaaaaaaaaaaaaaaaaaa

SEQ ID NO: 3832 - RNA, 5419 nt, synthetic construct
  source 1..5419: mol_type = other RNA
aggaaataagagagaaaagaagagtaagaagaaatataagagccaccatggcccctaagaagaagcgtaaagtgagccgggtgaacggcagcggcagcggcggcggcatgaaccacgaccaggagttcgacccccctaaggtgtaccctcccgtccccgccgagaagagaaagcccatccgggtcctgagcctgttcgatggcatcgccaccggtctgctggtgctgaaggacctgggcatccaggtggataggtacattgcctccgaggtgtgcgaggactccatcaccgtgggaatggtgcgtcatcagggcaagatcatgtacgtgggcgacgtgcggagcgtgacacagaagcatatccaggagtggggccctttcgacctggtgatcggcggcagcccttgcaatgacctgagcatcgtgaacccagcccggaagggcctgtacgagggaaccggcagactgttcttcgagttttacagactgctgcacgacgcccggcctaaggaaggcgacgaccggcccttcttttggctgttcgagaatgtggtggccatgggagtcagcgacaagcgggatattagccggttcctggagagcaaccccgtgatgatcgatgccaaggaagtgagcgccgcccaccgggccagatacttctggggcaatctgcctggcatgaacagacccctggccagcaccgtgaacgacaagctggagctgcaggagtgcctggagcacggccggatcgccaagttcagcaaggtgagaaccatcaccacccgaagcaacagcatcaaacaaggcaaggaccagcactttcctgtgttcatgaacgagaaggaggacatcctgtggtgtaccgagatggagagagtgttcgggttcccagtccactacacagatgtcagcaacatgtctagactggccagacagagactgctgggaagaagctggtccgtccctgtgatcagacacctgttcgcccctctgaaggagtacttcgcctgcgtgagcagcggcaacagcaacgccaacagccggggccccagcttctctagcggcctggtgccactgtccctgagagggagccacatgggccccatggagatctacaaaaccgtgagcgcctggaagcggcagcctgtgcgcgtgctgagcctgtttcggaatatcgataaagtcctgaaaagcctgggattcctggagagcggctctggctccggcggtggcaccctgaagtacgtggaggatgtgacaaacgtggtcagacgggatgtggagaagtggggccccttcgatctggtgtacggcagcacccaacccctgggcagctcttgtgaccggtgccctggctggtacatgtttcagttccaccggatcctgcagtacgccctgccgagacaggagtcccagcggccattcttttggattttcatggacaacttgctgctgaccgaggatgaccaggaaactaccactcggttcctgcagaccgaagccgtgaccctgcaggacgtgagaggccgggactaccagaacgccatgcgggtgtggtccaacatccctggactgaaaagcaagcacgcacctctgacccctaaagaagaggagtacctgcaggcccaggtgcggagcagaagcaagctggacgcccctaaggtggatctgctggtgaagaattgcctcctgcccctgagagagtacttcaagtatttcagccagaatagtctgcccctgggcggcccaagcagcggcgcccctcctcccagcggcggcagcccagccggctccccaacctctaccgaggagggcacctctgagtccgccacccccgagagcggccctggcacctccaccgagcccagcgagggcagcgcacccggcagccctgccggcagccccacctccacagaggagggaaccagcaccgagcccagcgaaggcagcgccccaggcaccagcaccgagcctagtgagggcggctctggcggcggcagcgcccaggagattaaacggatcaacaagatcagaagaagacttgtgaaagacagcaacaccaagaaggccggcaagacaggccccatgaaaaccctgctggttagagtgatgacacccgatctgagagagcggctggaaaacctgagaaagaagcctgaaaatatcccccagcccatcagcaatacatctagagccaacctgaataagctgctgaccgattacaccgaaatgaagaaggcgatcctgcatgtgtactgggaagagttccagaaggaccctgtgggcctgatgagccgggtggcccagcctgccagcaagaagatcgatcagaacaagctgaaacctgagatggacgagaagggcaacctgaccaccgccggctttgcctgctctcagtgtggccagcccctgttcgtgtacaagctggagcaggtgtctgagaagggcaaggcttacaccaactacttcggacggtgcaatgtggccgagcacgaaaagctgatcctgctggcccagctgaagcccgagaaggatagcgacgaagccgtgacatatagcctgggaaagtttgggcagagggccctggatttctacagcattcatgtgaccaaggagtccacccaccccgtgaagcccctggcccagatcgccggaaacagatacgcctccggacctgtgggaaaggccctgagcgacgcatgtatgggcacaatcgcctccttcctgtctaagtaccaggacatcatcatcgaacaccagaaggtggtgaagggcaaccagaagagactggagagcctgcgggagctggccggcaaggaaaacctggaataccctagcgtgaccctgccacctcagcctcacaccaaggagggcgttgatgcctacaacgaagtgatcgcccgggtgcgaatgtgggtgaacctgaacctgtggcagaagctgaagctaagcagagatgatgccaagcctctgctgagactgaagggattcccttcctttcctctggtcgagagacaggccaacgaagtggactggtgggacatggtgtgtaacgtgaagaagctgatcaacgagaaaaaggaggatggcaaggtgttttggcagaatctggctggctacaagagacaggaagccctgagaccatacctgagcagcgaggaagatcggaagaagggaaagaaattcgctcggtaccagctgggcgacctgctgctgcacctggaaaagaagcacggcgaggactggggaaaggtgtacgacgaggcctgggagcggattgacaagaaagtggaaggcctgagcaagcacatcaagctggaagaggaacggagaagcgaggacgcccagagcaaggccgccctgaccgactggctgcgggctaaggccagcttcgtgatcgagggcctgaaggaggccgacaaggacgagttctgcagatgcgagctgaagctgcagaagtggtacggggacctgcggggaaagcccttcgccatcgaagccgagaacagcatcctggacatcagcggcttcagcaagcagtacaactgtgccttcatctggcagaaggacggcgtgaagaagctgaacctgtacctgatcatcaactacttcaagggcggcaagctgcggttcaagaagatcaaacctgaagccttcgaagccaacagattctacaccgtgatcaacaaaaagagcggcgagatcgtgcccatggaggtgaacttcaacttcgacgaccccaacctgatcatcctgcctctggcctttggcaagagacagggcagagaattcatctggaacgacctgctgtccctggaaaccggcagcctgaagctggccaacggaagagtgatcgagaagacactgtacaacagaagaacccggcaggatgagcctgccctgttcgtggccctgaccttcgagcggcgggaggtcctggactcctccaatatcaaaccaatgaacctgatcggcgtggcaagaggcgaaaacatccccgccgtgatcgccctgaccgaccccgagggctgcccactgagccggtttaaggatagcctgggaaacccaacccacatcctgagaatcggcgagagctataaggagaagcagcggaccatccaggccaagaaggaggtggagcagcggagagccggcggctacagccggaagtacgccagcaaagccaagaatctggcagacgatatggtgagaaacaccgctagagatctgctgtactacgccgtgacccaggatgccatgctgatcttcgccaacctgagccggggcttcggccggcagggcaagcggaccttcatggccgagagacagtacacacggatggaggactggctgaccgccaagctggcctacgagggcctgagcaagacctacctgtccaagacactggcccagtacacctccaagacatgcagcaactgtgggtttaccatcaccagcgccgactacgacagggtgctggagaagctgaagaagacagcaacaggctggatgaccacaattaacggcaaggagctgaaggtggagggccagattacctactacaacagatacaagagacagaacgtagtcaaggacctgtccgtcgagctggatagactgagcgaagaatctgtgaacaacgacatctcctcctggacaaagggcagaagcggagaagctctgagcctcctgaagaaaagattctcccatagacccgtgcaggagaagttcgtgtgcctgaactgcggcttcgagacacacgcagccgagcaagccgccctgaacatcgccagatcctggctgttcctgcggagccaggagtacaagaaataccagacaaacaagacaaccggcaacaccgataagagagccttcgtcgagacctggcagtccttttaccggaagaagcttaaggaggtgtggaaacctgccgtgcggtctggcggatctggcggaggctccacaagcccccaggagcccgtgaccttcgaggacgtggccgtgtacttcacccagaaccagtgggccagcctggaccccacccagagggccctgtacagggaggtgatgctggagaactacgccagcgtggccagcctggtgttccccttccccaagcccgacctggtgagccagctggagagggaggaggccccctggggccccgacccctgggaggccgaggtgctgaggggcatctgccccggcggcaccagccccaagaaaaagagaaaagtctaagctgccttctgcggggcttgccttctggccatgcccttcttctctcccttgcacctgtacctcttggtctttgaataaagcctgagtaggaaggctagcaaaaaaaaaaaaaaaaaaaaaaaaaaaaaaaaaaaaaaaaaaaaaaaaaaaaaaaaaaaaaaaaaaaaaaaaaaaaaaaa

SEQ ID NO: 3833 - RNA, 5419 nt, synthetic construct
  source 1..5419: mol_type = other RNA
aggaaataagagagaaaagaagagtaagaagaaatataagagccaccatggcccctaagaagaagcgtaaagtgagccgggtgaacggcagcggcagcggcggcggcatgaaccacgaccaggagttcgacccccctaaggtgtaccctcccgtccccgccgagaagagaaagcccatccgggtcctgagcctgttcgatggcatcgccaccggtctgctggtgctgaaggacctgggcatccaggtggataggtacattgcctccgaggtgtgcgaggactccatcaccgtgggaatggtgcgtcatcagggcaagatcatgtacgtgggcgacgtgcggagcgtgacacagaagcatatccaggagtggggccctttcgacctggtgatcggcggcagcccttgcaatgacctgagcatcgtgaacccagcccggaagggcctgtacgagggaaccggcagactgttcttcgagttttacagactgctgcacgacgcccggcctaaggaaggcgacgaccggcccttcttttggctgttcgagaatgtggtggccatgggagtcagcgacaagcgggatattagccggttcctggagagcaaccccgtgatgatcgatgccaaggaagtgagcgccgcccaccgggccagatacttctggggcaatctgcctggcatgaacagacccctggccagcaccgtgaacgacaagctggagctgcaggagtgcctggagcacggccggatcgccaagttcagcaaggtgagaaccatcaccacccgaagcaacagcatcaaacaaggcaaggaccagcactttcctgtgttcatgaacgagaaggaggacatcctgtggtgtaccgagatggagagagtgttcgggttcccagtccactacacagatgtcagcaacatgtctagactggccagacagagactgctgggaagaagctggtccgtccctgtgatcagacacctgttcgcccctctgaaggagtacttcgcctgcgtgagcagcggcaacagcaacgccaacagccggggccccagcttctctagcggcctggtgccactgtccctgagagggagccacatgggccccatggagatctacaaaaccgtgagcgcctggaagcggcagcctgtgcgcgtgctgagcctgtttcggaatatcgataaagtcctgaaaagcctgggattcctggagagcggctctggctccggcggtggcaccctgaagtacgtggaggatgtgacaaacgtggtcagacgggatgtggagaagtggggccccttcgatctggtgtacggcagcacccaacccctgggcagctcttgtgaccggtgccctggctggtacatgtttcagttccaccggatcctgcagtacgccctgccgagacaggagtcccagcggccattcttttggattttcatggacaacttgctgctgaccgaggatgaccaggaaactaccactcggttcctgcagaccgaagccgtgaccctgcaggacgtgagaggccgggactaccagaacgccatgcgggtgtggtccaacatccctggactgaaaagcaagcacgcacctctgacccctaaagaagaggagtacctgcaggcccaggtgcggagcagaagcaagctggacgcccctaaggtggatctgctggtgaagaattgcctcctgcccctgagagagtacttcaagtatttcagccagaatagtctgcccctgggcggcccaagcagcggcgcccctcctcccagcggcggcagcccagccggctccccaacctctaccgaggagggcacctctgagtccgccacccccgagagcggccctggcacctccaccgagcccagcgagggcagcgcacccggcagccctgccggcagccccacctccacagaggagggaaccagcaccgagcccagcgaaggcagcgccccaggcaccagcaccgagcctagtgagggcggctctggcggcggcagcgcccaggagattaaacggatcaacaagatcagaagaagacttgtgaaagacagcaacaccaagaaggccggcaagacaggccccatgaaaaccctgctggttagagtgatgacacccgatctgagagagcggctggaaaacctgagaaagaagcctgaaaatatcccccagcccatcagcaatacatctagagccaacctgaataagctgctgaccgattacaccgaaatgaagaaggcgatcctgcatgtgtactgggaagagttccagaaggaccctgtgggcctgatgagccgggtggcccagcctgccagcaagaagatcgatcagaacaagctgaaacctgagatggacgagaagggcaacctgaccaccgccggctttgcctgctctcagtgtggccagcccctgttcgtgtacaagctggagcaggtgtctgagaagggcaaggcttacaccaactacttcggacggtgcaatgtggccgagcacgaaaagctgatcctgctggcccagctgaagcccgagaaggatagcgacgaagccgtgacatatagcctgggaaagtttgggcagagggccctggatttctacagcattcatgtgaccaaggagtccacccaccccgtgaagcccctggcccagatcgccggaaacagatacgcctccggacctgtgggaaaggccctgagcgacgcatgtatgggcacaatcgcctccttcctgtctaagtaccaggacatcatcatcgaacaccagaaggtggtgaagggcaaccagaagagactggagagcctgcgggagctggccggcaaggaaaacctggaataccctagcgtgaccctgccacctcagcctcacaccaaggagggcgttgatgcctacaacgaagtgatcgcccgggtgcgaatgtgggtgaacctgaacctgtggcagaagctgaagctaagcagagatgatgccaagcctctgctgagactgaagggattcccttcctttcctctggtcgagagacaggccaacgaagtggactggtgggacatggtgtgtaacgtgaagaagctgatcaacgagaaaaaggaggatggcaaggtgttttggcagaatctggctggctacaagagacaggaagccctgagaccatacctgagcagcgaggaagatcggaagaagggaaagaaattcgctcggtaccagctgggcgacctgctgctgcacctggaaaagaagcacggcgaggactggggaaaggtgtacgacgaggcctgggagcggattgacaagaaagtggaaggcctgagcaagcacatcaagctggaagaggaacggagaagcgaggacgcccagagcaaggccgccctgaccgactggctgcgggctaaggccagcttcgtgatcgagggcctgaaggaggccgacaaggacgagttctgcagatgcgagctgaagctgcagaagtggtacggggacctgcggggaaagcccttcgccatcgaagccgagaacagcatcctggacatcagcggcttcagcaagcagtacaactgtgccttcatctggcagaaggacggcgtgaagaagctgaacctgtacctgatcatcaactacttcaagggcggcaagctgcggttcaagaagatcaaacctgaagccttcgaagccaacagattctacaccgtgatcaacaaaaagagcggcgagatcgtgcccatggaggtgaacttcaacttcgacgaccccaacctgatcatcctgcctctggcctttggcaagagacagggcagagaattcatctggaacgacctgctgtccctggaaaccggcagcctgaagctggccaacggaagagtgatcgagaagacactgtacaacagaagaacccggcaggatgagcctgccctgttcgtggccctgaccttcgagcggcgggaggtcctggactcctccaatatcaaaccaatgaacctgatcggcgtggcaagaggcgaaaacatccccgccgtgatcgccctgaccgaccccgagggctgcccactgagccggtttaaggatagcctgggaaacccaacccacatcctgagaatcggcgagagctataaggagaagcagcggaccatccaggccaagaaggaggtggagcagcggagagccggcggctacagccggaagtacgccagcaaagccaagaatctggcagacgatatggtgagaaacaccgctagagatctgctgtactacgccgtgacccaggatgccatgctgatcttcgccaacctgagccggggcttcggccggcagggcaagcggaccttcatggccgagagacagtacacacggatggaggactggctgaccgccaagctggcctacgagggcctgagcaagacctacctgtccaagacactggcccagtacacctccaagacatgcagcaactgtgggtttaccatcaccagcgccgactacgacagggtgctggagaagctgaagaagacagcaacaggctggatgaccacaattaacggcaaggagctgaaggtggagggccagattacctactacaacagatacaagagacagaacgtagtcaaggacctgtccgtcgagctggatagactgagcgaagaatctgtgaacaacgacatctcctcctggacaaagggcagaagcggagaagctctgagcctcctgaagaaaagattctcccatagacccgtgcaggagaagttcgtgtgcctgaactgcggcttcgagacacacgcagccgagcaagccgccctgaacatcgccagatcctggctgttcctgcggagccaggagtacaagaaataccagacaaacaagacaaccggcaacaccgataagagagccttcgtcgagacctggcagtccttttaccggaagaagcttaaggaggtgtggaaacctgccgtgcggtctggcggatctggcggaggctccacaagccccaaggtgcccgtgaccttcgacgacgtggccgtgtacttcagcgagagcgagtggggcaggctggacaagtggcagaaggagctgtacaagcacgtgatgaggggcaactacgagatgctggtgagcctggactacgccatcagcaagcccgacatcctgaccaggatggagaggggcgaggagccctgccccgacggcccctggggccccgaggagggcaaggagagggaggccgccaggaccagccccaagaaaaagagaaaagtctaagctgccttctgcggggcttgccttctggccatgcccttcttctctcccttgcacctgtacctcttggtctttgaataaagcctgagtaggaaggctagcaaaaaaaaaaaaaaaaaaaaaaaaaaaaaaaaaaaaaaaaaaaaaaaaaaaaaaaaaaaaaaaaaaaaaaaaaaaaaaaa

SEQ ID NO: 3834 - RNA, 5419 nt, synthetic construct
  source 1..5419: mol_type = other RNA
aggaaataagagagaaaagaagagtaagaagaaatataagagccaccatggcccctaagaagaagcgtaaagtgagccgggtgaacggcagcggcagcggcggcggcatgaaccacgaccaggagttcgacccccctaaggtgtaccctcccgtccccgccgagaagagaaagcccatccgggtcctgagcctgttcgatggcatcgccaccggtctgctggtgctgaaggacctgggcatccaggtggataggtacattgcctccgaggtgtgcgaggactccatcaccgtgggaatggtgcgtcatcagggcaagatcatgtacgtgggcgacgtgcggagcgtgacacagaagcatatccaggagtggggccctttcgacctggtgatcggcggcagcccttgcaatgacctgagcatcgtgaacccagcccggaagggcctgtacgagggaaccggcagactgttcttcgagttttacagactgctgcacgacgcccggcctaaggaaggcgacgaccggcccttcttttggctgttcgagaatgtggtggccatgggagtcagcgacaagcgggatattagccggttcctggagagcaaccccgtgatgatcgatgccaaggaagtgagcgccgcccaccgggccagatacttctggggcaatctgcctggcatgaacagacccctggccagcaccgtgaacgacaagctggagctgcaggagtgcctggagcacggccggatcgccaagttcagcaaggtgagaaccatcaccacccgaagcaacagcatcaaacaaggcaaggaccagcactttcctgtgttcatgaacgagaaggaggacatcctgtggtgtaccgagatggagagagtgttcgggttcccagtccactacacagatgtcagcaacatgtctagactggccagacagagactgctgggaagaagctggtccgtccctgtgatcagacacctgttcgcccctctgaaggagtacttcgcctgcgtgagcagcggcaacagcaacgccaacagccggggccccagcttctctagcggcctggtgccactgtccctgagagggagccacatgggccccatggagatctacaaaaccgtgagcgcctggaagcggcagcctgtgcgcgtgctgagcctgtttcggaatatcgataaagtcctgaaaagcctgggattcctggagagcggctctggctccggcggtggcaccctgaagtacgtggaggatgtgacaaacgtggtcagacgggatgtggagaagtggggccccttcgatctggtgtacggcagcacccaacccctgggcagctcttgtgaccggtgccctggctggtacatgtttcagttccaccggatcctgcagtacgccctgccgagacaggagtcccagcggccattcttttggattttcatggacaacttgctgctgaccgaggatgaccaggaaactaccactcggttcctgcagaccgaagccgtgaccctgcaggacgtgagaggccgggactaccagaacgccatgcgggtgtggtccaacatccctggactgaaaagcaagcacgcacctctgacccctaaagaagaggagtacctgcaggcccaggtgcggagcagaagcaagctggacgcccctaaggtggatctgctggtgaagaattgcctcctgcccctgagagagtacttcaagtatttcagccagaatagtctgcccctgggcggcccaagcagcggcgcccctcctcccagcggcggcagcccagccggctccccaacctctaccgaggagggcacctctgagtccgccacccccgagagcggccctggcacctccaccgagcccagcgagggcagcgcacccggcagccctgccggcagccccacctccacagaggagggaaccagcaccgagcccagcgaaggcagcgccccaggcaccagcaccgagcctagtgagggcggctctggcggcggcagcgcccaggagattaaacggatcaacaagatcagaagaagacttgtgaaagacagcaacaccaagaaggccggcaagacaggccccatgaaaaccctgctggttagagtgatgacacccgatctgagagagcggctggaaaacctgagaaagaagcctgaaaatatcccccagcccatcagcaatacatctagagccaacctgaataagctgctgaccgattacaccgaaatgaagaaggcgatcctgcatgtgtactgggaagagttccagaaggaccctgtgggcctgatgagccgggtggcccagcctgccagcaagaagatcgatcagaacaagctgaaacctgagatggacgagaagggcaacctgaccaccgccggctttgcctgctctcagtgtggccagcccctgttcgtgtacaagctggagcaggtgtctgagaagggcaaggcttacaccaactacttcggacggtgcaatgtggccgagcacgaaaagctgatcctgctggcccagctgaagcccgagaaggatagcgacgaagccgtgacatatagcctgggaaagtttgggcagagggccctggatttctacagcattcatgtgaccaaggagtccacccaccccgtgaagcccctggcccagatcgccggaaacagatacgcctccggacctgtgggaaaggccctgagcgacgcatgtatgggcacaatcgcctccttcctgtctaagtaccaggacatcatcatcgaacaccagaaggtggtgaagggcaaccagaagagactggagagcctgcgggagctggccggcaaggaaaacctggaataccctagcgtgaccctgccacctcagcctcacaccaaggagggcgttgatgcctacaacgaagtgatcgcccgggtgcgaatgtgggtgaacctgaacctgtggcagaagctgaagctaagcagagatgatgccaagcctctgctgagactgaagggattcccttcctttcctctggtcgagagacaggccaacgaagtggactggtgggacatggtgtgtaacgtgaagaagctgatcaacgagaaaaaggaggatggcaaggtgttttggcagaatctggctggctacaagagacaggaagccctgagaccatacctgagcagcgaggaagatcggaagaagggaaagaaattcgctcggtaccagctgggcgacctgctgctgcacctggaaaagaagcacggcgaggactggggaaaggtgtacgacgaggcctgggagcggattgacaagaaagtggaaggcctgagcaagcacatcaagctggaagaggaacggagaagcgaggacgcccagagcaaggccgccctgaccgactggctgcgggctaaggccagcttcgtgatcgagggcctgaaggaggccgacaaggacgagttctgcagatgcgagctgaagctgcagaagtggtacggggacctgcggggaaagcccttcgccatcgaagccgagaacagcatcctggacatcagcggcttcagcaagcagtacaactgtgccttcatctggcagaaggacggcgtgaagaagctgaacctgtacctgatcatcaactacttcaagggcggcaagctgcggttcaagaagatcaaacctgaagccttcgaagccaacagattctacaccgtgatcaacaaaaagagcggcgagatcgtgcccatggaggtgaacttcaacttcgacgaccccaacctgatcatcctgcctctggcctttggcaagagacagggcagagaattcatctggaacgacctgctgtccctggaaaccggcagcctgaagctggccaacggaagagtgatcgagaagacactgtacaacagaagaacccggcaggatgagcctgccctgttcgtggccctgaccttcgagcggcgggaggtcctggactcctccaatatcaaaccaatgaacctgatcggcgtggcaagaggcgaaaacatccccgccgtgatcgccctgaccgaccccgagggctgcccactgagccggtttaaggatagcctgggaaacccaacccacatcctgagaatcggcgagagctataaggagaagcagcggaccatccaggccaagaaggaggtggagcagcggagagccggcggctacagccggaagtacgccagcaaagccaagaatctggcagacgatatggtgagaaacaccgctagagatctgctgtactacgccgtgacccaggatgccatgctgatcttcgccaacctgagccggggcttcggccggcagggcaagcggaccttcatggccgagagacagtacacacggatggaggactggctgaccgccaagctggcctacgagggcctgagcaagacctacctgtccaagacactggcccagtacacctccaagacatgcagcaactgtgggtttaccatcaccagcgccgactacgacagggtgctggagaagctgaagaagacagcaacaggctggatgaccacaattaacggcaaggagctgaaggtggagggccagattacctactacaacagatacaagagacagaacgtagtcaaggacctgtccgtcgagctggatagactgagcgaagaatctgtgaacaacgacatctcctcctggacaaagggcagaagcggagaagctctgagcctcctgaagaaaagattctcccatagacccgtgcaggagaagttcgtgtgcctgaactgcggcttcgagacacacgcagccgagcaagccgccctgaacatcgccagatcctggctgttcctgcggagccaggagtacaagaaataccagacaaacaagacaaccggcaacaccgataagagagccttcgtcgagacctggcagtccttttaccggaagaagcttaaggaggtgtggaaacctgccgtgcggtctggcggatctggcggaggctccacaagctgcaacatgagcctgagcttcagcgacgtggccgtggacctgagccaggaggagtgggagtgcatgagccccgcccagagggccctgtacagggacgtgatgctggagaactacagcaacctggtgagcctgggctgcagcacccccaagcccgacatgatcaccctgctggagcaggagaaggagccctggatgatcctgagggagggcaccggcagctggttcaccgacctggagagcgagaccagccccaagaaaaagagaaaagtctaagctgccttctgcggggcttgccttctggccatgcccttcttctctcccttgcacctgtacctcttggtctttgaataaagcctgagtaggaaggctagcaaaaaaaaaaaaaaaaaaaaaaaaaaaaaaaaaaaaaaaaaaaaaaaaaaaaaaaaaaaaaaaaaaaaaaaaaaaaaaaa

SEQ ID NO: 3835 - RNA, 5419 nt, synthetic construct
  source 1..5419: mol_type = other RNA
aggaaataagagagaaaagaagagtaagaagaaatataagagccaccatggcccctaagaagaagcgtaaagtgagccgggtgaacggcagcggcagcggcggcggcatgaaccacgaccaggagttcgacccccctaaggtgtaccctcccgtccccgccgagaagagaaagcccatccgggtcctgagcctgttcgatggcatcgccaccggtctgctggtgctgaaggacctgggcatccaggtggataggtacattgcctccgaggtgtgcgaggactccatcaccgtgggaatggtgcgtcatcagggcaagatcatgtacgtgggcgacgtgcggagcgtgacacagaagcatatccaggagtggggccctttcgacctggtgatcggcggcagcccttgcaatgacctgagcatcgtgaacccagcccggaagggcctgtacgagggaaccggcagactgttcttcgagttttacagactgctgcacgacgcccggcctaaggaaggcgacgaccggcccttcttttggctgttcgagaatgtggtggccatgggagtcagcgacaagcgggatattagccggttcctggagagcaaccccgtgatgatcgatgccaaggaagtgagcgccgcccaccgggccagatacttctggggcaatctgcctggcatgaacagacccctggccagcaccgtgaacgacaagctggagctgcaggagtgcctggagcacggccggatcgccaagttcagcaaggtgagaaccatcaccacccgaagcaacagcatcaaacaaggcaaggaccagcactttcctgtgttcatgaacgagaaggaggacatcctgtggtgtaccgagatggagagagtgttcgggttcccagtccactacacagatgtcagcaacatgtctagactggccagacagagactgctgggaagaagctggtccgtccctgtgatcagacacctgttcgcccctctgaaggagtacttcgcctgcgtgagcagcggcaacagcaacgccaacagccggggccccagcttctctagcggcctggtgccactgtccctgagagggagccacatgggccccatggagatctacaaaaccgtgagcgcctggaagcggcagcctgtgcgcgtgctgagcctgtttcggaatatcgataaagtcctgaaaagcctgggattcctggagagcggctctggctccggcggtggcaccctgaagtacgtggaggatgtgacaaacgtggtcagacgggatgtggagaagtggggccccttcgatctggtgtacggcagcacccaacccctgggcagctcttgtgaccggtgccctggctggtacatgtttcagttccaccggatcctgcagtacgccctgccgagacaggagtcccagcggccattcttttggattttcatggacaacttgctgctgaccgaggatgaccaggaaactaccactcggttcctgcagaccgaagccgtgaccctgcaggacgtgagaggccgggactaccagaacgccatgcgggtgtggtccaacatccctggactgaaaagcaagcacgcacctctgacccctaaagaagaggagtacctgcaggcccaggtgcggagcagaagcaagctggacgcccctaaggtggatctgctggtgaagaattgcctcctgcccctgagagagtacttcaagtatttcagccagaatagtctgcccctgggcggcccaagcagcggcgcccctcctcccagcggcggcagcccagccggctccccaacctctaccgaggagggcacctctgagtccgccacccccgagagcggccctggcacctccaccgagcccagcgagggcagcgcacccggcagccctgccggcagccccacctccacagaggagggaaccagcaccgagcccagcgaaggcagcgccccaggcaccagcaccgagcctagtgagggcggctctggcggcggcagcgcccaggagattaaacggatcaacaagatcagaagaagacttgtgaaagacagcaacaccaagaaggccggcaagacaggccccatgaaaaccctgctggttagagtgatgacacccgatctgagagagcggctggaaaacctgagaaagaagcctgaaaatatcccccagcccatcagcaatacatctagagccaacctgaataagctgctgaccgattacaccgaaatgaagaaggcgatcctgcatgtgtactgggaagagttccagaaggaccctgtgggcctgatgagccgggtggcccagcctgccagcaagaagatcgatcagaacaagctgaaacctgagatggacgagaagggcaacctgaccaccgccggctttgcctgctctcagtgtggccagcccctgttcgtgtacaagctggagcaggtgtctgagaagggcaaggcttacaccaactacttcggacggtgcaatgtggccgagcacgaaaagctgatcctgctggcccagctgaagcccgagaaggatagcgacgaagccgtgacatatagcctgggaaagtttgggcagagggccctggatttctacagcattcatgtgaccaaggagtccacccaccccgtgaagcccctggcccagatcgccggaaacagatacgcctccggacctgtgggaaaggccctgagcgacgcatgtatgggcacaatcgcctccttcctgtctaagtaccaggacatcatcatcgaacaccagaaggtggtgaagggcaaccagaagagactggagagcctgcgggagctggccggcaaggaaaacctggaataccctagcgtgaccctgccacctcagcctcacaccaaggagggcgttgatgcctacaacgaagtgatcgcccgggtgcgaatgtgggtgaacctgaacctgtggcagaagctgaagctaagcagagatgatgccaagcctctgctgagactgaagggattcccttcctttcctctggtcgagagacaggccaacgaagtggactggtgggacatggtgtgtaacgtgaagaagctgatcaacgagaaaaaggaggatggcaaggtgttttggcagaatctggctggctacaagagacaggaagccctgagaccatacctgagcagcgaggaagatcggaagaagggaaagaaattcgctcggtaccagctgggcgacctgctgctgcacctggaaaagaagcacggcgaggactggggaaaggtgtacgacgaggcctgggagcggattgacaagaaagtggaaggcctgagcaagcacatcaagctggaagaggaacggagaagcgaggacgcccagagcaaggccgccctgaccgactggctgcgggctaaggccagcttcgtgatcgagggcctgaaggaggccgacaaggacgagttctgcagatgcgagctgaagctgcagaagtggtacggggacctgcggggaaagcccttcgccatcgaagccgagaacagcatcctggacatcagcggcttcagcaagcagtacaactgtgccttcatctggcagaaggacggcgtgaagaagctgaacctgtacctgatcatcaactacttcaagggcggcaagctgcggttcaagaagatcaaacctgaagccttcgaagccaacagattctacaccgtgatcaacaaaaagagcggcgagatcgtgcccatggaggtgaacttcaacttcgacgaccccaacctgatcatcctgcctctggcctttggcaagagacagggcagagaattcatctggaacgacctgctgtccctggaaaccggcagcctgaagctggccaacggaagagtgatcgagaagacactgtacaacagaagaacccggcaggatgagcctgccctgttcgtggccctgaccttcgagcggcgggaggtcctggactcctccaatatcaaaccaatgaacctgatcggcgtggcaagaggcgaaaacatccccgccgtgatcgccctgaccgaccccgagggctgcccactgagccggtttaaggatagcctgggaaacccaacccacatcctgagaatcggcgagagctataaggagaagcagcggaccatccaggccaagaaggaggtggagcagcggagagccggcggctacagccggaagtacgccagcaaagccaagaatctggcagacgatatggtgagaaacaccgctagagatctgctgtactacgccgtgacccaggatgccatgctgatcttcgccaacctgagccggggcttcggccggcagggcaagcggaccttcatggccgagagacagtacacacggatggaggactggctgaccgccaagctggcctacgagggcctgagcaagacctacctgtccaagacactggcccagtacacctccaagacatgcagcaactgtgggtttaccatcaccagcgccgactacgacagggtgctggagaagctgaagaagacagcaacaggctggatgaccacaattaacggcaaggagctgaaggtggagggccagattacctactacaacagatacaagagacagaacgtagtcaaggacctgtccgtcgagctggatagactgagcgaagaatctgtgaacaacgacatctcctcctggacaaagggcagaagcggagaagctctgagcctcctgaagaaaagattctcccatagacccgtgcaggagaagttcgtgtgcctgaactgcggcttcgagacacacgcagccgagcaagccgccctgaacatcgccagatcctggctgttcctgcggagccaggagtacaagaaataccagacaaacaagacaaccggcaacaccgataagagagccttcgtcgagacctggcagtccttttaccggaagaagcttaaggaggtgtggaaacctgccgtgcggtctggcggatctggcggaggctccacaagcgagcccggcgccgtgagcttcgccgacgtggccgtgtacttctgcagggaggagtggggctgcctgaggcccgcccagagggccctgtacagggacgtgatgagggagacctacggccacctgagcgccctgggcatcggcggcaacaagcccgccctgatcagctgggtggaggaggaggccgagctgtggggccccgccgcccaggaccccgaggtggccaagtgccagacccagaccgacaccagccccaagaaaaagagaaaagtctaagctgccttctgcggggcttgccttctggccatgcccttcttctctcccttgcacctgtacctcttggtctttgaataaagcctgagtaggaaggctagcaaaaaaaaaaaaaaaaaaaaaaaaaaaaaaaaaaaaaaaaaaaaaaaaaaaaaaaaaaaaaaaaaaaaaaaaaaaaaaaa

SEQ ID NO: 3836 - RNA, 5419 nt, synthetic construct
  source 1..5419: mol_type = other RNA
aggaaataagagagaaaagaagagtaagaagaaatataagagccaccatggcccctaagaagaagcgtaaagtgagccgggtgaacggcagcggcagcggcggcggcatgaaccacgaccaggagttcgacccccctaaggtgtaccctcccgtccccgccgagaagagaaagcccatccgggtcctgagcctgttcgatggcatcgccaccggtctgctggtgctgaaggacctgggcatccaggtggataggtacattgcctccgaggtgtgcgaggactccatcaccgtgggaatggtgcgtcatcagggcaagatcatgtacgtgggcgacgtgcggagcgtgacacagaagcatatccaggagtggggccctttcgacctggtgatcggcggcagcccttgcaatgacctgagcatcgtgaacccagcccggaagggcctgtacgagggaaccggcagactgttcttcgagttttacagactgctgcacgacgcccggcctaaggaaggcgacgaccggcccttcttttggctgttcgagaatgtggtggccatgggagtcagcgacaagcgggatattagccggttcctggagagcaaccccgtgatgatcgatgccaaggaagtgagcgccgcccaccgggccagatacttctggggcaatctgcctggcatgaacagacccctggccagcaccgtgaacgacaagctggagctgcaggagtgcctggagcacggccggatcgccaagttcagcaaggtgagaaccatcaccacccgaagcaacagcatcaaacaaggcaaggaccagcactttcctgtgttcatgaacgagaaggaggacatcctgtggtgtaccgagatggagagagtgttcgggttcccagtccactacacagatgtcagcaacatgtctagactggccagacagagactgctgggaagaagctggtccgtccctgtgatcagacacctgttcgcccctctgaaggagtacttcgcctgcgtgagcagcggcaacagcaacgccaacagccggggccccagcttctctagcggcctggtgccactgtccctgagagggagccacatgggccccatggagatctacaaaaccgtgagcgcctggaagcggcagcctgtgcgcgtgctgagcctgtttcggaatatcgataaagtcctgaaaagcctgggattcctggagagcggctctggctccggcggtggcaccctgaagtacgtggaggatgtgacaaacgtggtcagacgggatgtggagaagtggggccccttcgatctggtgtacggcagcacccaacccctgggcagctcttgtgaccggtgccctggctggtacatgtttcagttccaccggatcctgcagtacgccctgccgagacaggagtcccagcggccattcttttggattttcatggacaacttgctgctgaccgaggatgaccaggaaactaccactcggttcctgcagaccgaagccgtgaccctgcaggacgtgagaggccgggactaccagaacgccatgcgggtgtggtccaacatccctggactgaaaagcaagcacgcacctctgacccctaaagaagaggagtacctgcaggcccaggtgcggagcagaagcaagctggacgcccctaaggtggatctgctggtgaagaattgcctcctgcccctgagagagtacttcaagtatttcagccagaatagtctgcccctgggcggcccaagcagcggcgcccctcctcccagcggcggcagcccagccggctccccaacctctaccgaggagggcacctctgagtccgccacccccgagagcggccctggcacctccaccgagcccagcgagggcagcgcacccggcagccctgccggcagccccacctccacagaggagggaaccagcaccgagcccagcgaaggcagcgccccaggcaccagcaccgagcctagtgagggcggctctggcggcggcagcgcccaggagattaaacggatcaacaagatcagaagaagacttgtgaaagacagcaacaccaagaaggccggcaagacaggccccatgaaaaccctgctggttagagtgatgacacccgatctgagagagcggctggaaaacctgagaaagaagcctgaaaatatcccccagcccatcagcaatacatctagagccaacctgaataagctgctgaccgattacaccgaaatgaagaaggcgatcctgcatgtgtactgggaagagttccagaaggaccctgtgggcctgatgagccgggtggcccagcctgccagcaagaagatcgatcagaacaagctgaaacctgagatggacgagaagggcaacctgaccaccgccggctttgcctgctctcagtgtggccagcccctgttcgtgtacaagctggagcaggtgtctgagaagggcaaggcttacaccaactacttcggacggtgcaatgtggccgagcacgaaaagctgatcctgctggcccagctgaagcccgagaaggatagcgacgaagccgtgacatatagcctgggaaagtttgggcagagggccctggatttctacagcattcatgtgaccaaggagtccacccaccccgtgaagcccctggcccagatcgccggaaacagatacgcctccggacctgtgggaaaggccctgagcgacgcatgtatgggcacaatcgcctccttcctgtctaagtaccaggacatcatcatcgaacaccagaaggtggtgaagggcaaccagaagagactggagagcctgcgggagctggccggcaaggaaaacctggaataccctagcgtgaccctgccacctcagcctcacaccaaggagggcgttgatgcctacaacgaagtgatcgcccgggtgcgaatgtgggtgaacctgaacctgtggcagaagctgaagctaagcagagatgatgccaagcctctgctgagactgaagggattcccttcctttcctctggtcgagagacaggccaacgaagtggactggtgggacatggtgtgtaacgtgaagaagctgatcaacgagaaaaaggaggatggcaaggtgttttggcagaatctggctggctacaagagacaggaagccctgagaccatacctgagcagcgaggaagatcggaagaagggaaagaaattcgctcggtaccagctgggcgacctgctgctgcacctggaaaagaagcacggcgaggactggggaaaggtgtacgacgaggcctgggagcggattgacaagaaagtggaaggcctgagcaagcacatcaagctggaagaggaacggagaagcgaggacgcccagagcaaggccgccctgaccgactggctgcgggctaaggccagcttcgtgatcgagggcctgaaggaggccgacaaggacgagttctgcagatgcgagctgaagctgcagaagtggtacggggacctgcggggaaagcccttcgccatcgaagccgagaacagcatcctggacatcagcggcttcagcaagcagtacaactgtgccttcatctggcagaaggacggcgtgaagaagctgaacctgtacctgatcatcaactacttcaagggcggcaagctgcggttcaagaagatcaaacctgaagccttcgaagccaacagattctacaccgtgatcaacaaaaagagcggcgagatcgtgcccatggaggtgaacttcaacttcgacgaccccaacctgatcatcctgcctctggcctttggcaagagacagggcagagaattcatctggaacgacctgctgtccctggaaaccggcagcctgaagctggccaacggaagagtgatcgagaagacactgtacaacagaagaacccggcaggatgagcctgccctgttcgtggccctgaccttcgagcggcgggaggtcctggactcctccaatatcaaaccaatgaacctgatcggcgtggcaagaggcgaaaacatccccgccgtgatcgccctgaccgaccccgagggctgcccactgagccggtttaaggatagcctgggaaacccaacccacatcctgagaatcggcgagagctataaggagaagcagcggaccatccaggccaagaaggaggtggagcagcggagagccggcggctacagccggaagtacgccagcaaagccaagaatctggcagacgatatggtgagaaacaccgctagagatctgctgtactacgccgtgacccaggatgccatgctgatcttcgccaacctgagccggggcttcggccggcagggcaagcggaccttcatggccgagagacagtacacacggatggaggactggctgaccgccaagctggcctacgagggcctgagcaagacctacctgtccaagacactggcccagtacacctccaagacatgcagcaactgtgggtttaccatcaccagcgccgactacgacagggtgctggagaagctgaagaagacagcaacaggctggatgaccacaattaacggcaaggagctgaaggtggagggccagattacctactacaacagatacaagagacagaacgtagtcaaggacctgtccgtcgagctggatagactgagcgaagaatctgtgaacaacgacatctcctcctggacaaagggcagaagcggagaagctctgagcctcctgaagaaaagattctcccatagacccgtgcaggagaagttcgtgtgcctgaactgcggcttcgagacacacgcagccgagcaagccgccctgaacatcgccagatcctggctgttcctgcggagccaggagtacaagaaataccagacaaacaagacaaccggcaacaccgataagagagccttcgtcgagacctggcagtccttttaccggaagaagcttaaggaggtgtggaaacctgccgtgcggtctggcggatctggcggaggctccacaagcttcaagggccccgtgaccttcaaggacgtgaccgtggagttcaccaaggaggagtggaagctgctgacccccgcccagaggaccctgtacaaggacgtgatgctggagaactacaaccacctggtgagcgtgggctacagggtgagcaagcccaacctggtgttcaagctgaagcagggcaaggagccctgggtgctggaggtggagttccccaggaggaggtgccccgaggagctgtggaacaccagccccaagaaaaagagaaaagtctaagctgccttctgcggggcttgccttctggccatgcccttcttctctcccttgcacctgtacctcttggtctttgaataaagcctgagtaggaaggctagcaaaaaaaaaaaaaaaaaaaaaaaaaaaaaaaaaaaaaaaaaaaaaaaaaaaaaaaaaaaaaaaaaaaaaaaaaaaaaaaa

SEQ ID NO: 3837 - RNA, 5419 nt, synthetic construct
  source 1..5419: mol_type = other RNA
aggaaataagagagaaaagaagagtaagaagaaatataagagccaccatggcccctaagaagaagcgtaaagtgagccgggtgaacggcagcggcagcggcggcggcatgaaccacgaccaggagttcgacccccctaaggtgtaccctcccgtccccgccgagaagagaaagcccatccgggtcctgagcctgttcgatggcatcgccaccggtctgctggtgctgaaggacctgggcatccaggtggataggtacattgcctccgaggtgtgcgaggactccatcaccgtgggaatggtgcgtcatcagggcaagatcatgtacgtgggcgacgtgcggagcgtgacacagaagcatatccaggagtggggccctttcgacctggtgatcggcggcagcccttgcaatgacctgagcatcgtgaacccagcccggaagggcctgtacgagggaaccggcagactgttcttcgagttttacagactgctgcacgacgcccggcctaaggaaggcgacgaccggcccttcttttggctgttcgagaatgtggtggccatgggagtcagcgacaagcgggatattagccggttcctggagagcaaccccgtgatgatcgatgccaaggaagtgagcgccgcccaccgggccagatacttctggggcaatctgcctggcatgaacagacccctggccagcaccgtgaacgacaagctggagctgcaggagtgcctggagcacggccggatcgccaagttcagcaaggtgagaaccatcaccacccgaagcaacagcatcaaacaaggcaaggaccagcactttcctgtgttcatgaacgagaaggaggacatcctgtggtgtaccgagatggagagagtgttcgggttcccagtccactacacagatgtcagcaacatgtctagactggccagacagagactgctgggaagaagctggtccgtccctgtgatcagacacctgttcgcccctctgaaggagtacttcgcctgcgtgagcagcggcaacagcaacgccaacagccggggccccagcttctctagcggcctggtgccactgtccctgagagggagccacatgggccccatggagatctacaaaaccgtgagcgcctggaagcggcagcctgtgcgcgtgctgagcctgtttcggaatatcgataaagtcctgaaaagcctgggattcctggagagcggctctggctccggcggtggcaccctgaagtacgtggaggatgtgacaaacgtggtcagacgggatgtggagaagtggggccccttcgatctggtgtacggcagcacccaacccctgggcagctcttgtgaccggtgccctggctggtacatgtttcagttccaccggatcctgcagtacgccctgccgagacaggagtcccagcggccattcttttggattttcatggacaacttgctgctgaccgaggatgaccaggaaactaccactcggttcctgcagaccgaagccgtgaccctgcaggacgtgagaggccgggactaccagaacgccatgcgggtgtggtccaacatccctggactgaaaagcaagcacgcacctctgacccctaaagaagaggagtacctgcaggcccaggtgcggagcagaagcaagctggacgcccctaaggtggatctgctggtgaagaattgcctcctgcccctgagagagtacttcaagtatttcagccagaatagtctgcccctgggcggcccaagcagcggcgcccctcctcccagcggcggcagcccagccggctccccaacctctaccgaggagggcacctctgagtccgccacccccgagagcggccctggcacctccaccgagcccagcgagggcagcgcacccggcagccctgccggcagccccacctccacagaggagggaaccagcaccgagcccagcgaaggcagcgccccaggcaccagcaccgagcctagtgagggcggctctggcggcggcagcgcccaggagattaaacggatcaacaagatcagaagaagacttgtgaaagacagcaacaccaagaaggccggcaagacaggccccatgaaaaccctgctggttagagtgatgacacccgatctgagagagcggctggaaaacctgagaaagaagcctgaaaatatcccccagcccatcagcaatacatctagagccaacctgaataagctgctgaccgattacaccgaaatgaagaaggcgatcctgcatgtgtactgggaagagttccagaaggaccctgtgggcctgatgagccgggtggcccagcctgccagcaagaagatcgatcagaacaagctgaaacctgagatggacgagaagggcaacctgaccaccgccggctttgcctgctctcagtgtggccagcccctgttcgtgtacaagctggagcaggtgtctgagaagggcaaggcttacaccaactacttcggacggtgcaatgtggccgagcacgaaaagctgatcctgctggcccagctgaagcccgagaaggatagcgacgaagccgtgacatatagcctgggaaagtttgggcagagggccctggatttctacagcattcatgtgaccaaggagtccacccaccccgtgaagcccctggcccagatcgccggaaacagatacgcctccggacctgtgggaaaggccctgagcgacgcatgtatgggcacaatcgcctccttcctgtctaagtaccaggacatcatcatcgaacaccagaaggtggtgaagggcaaccagaagagactggagagcctgcgggagctggccggcaaggaaaacctggaataccctagcgtgaccctgccacctcagcctcacaccaaggagggcgttgatgcctacaacgaagtgatcgcccgggtgcgaatgtgggtgaacctgaacctgtggcagaagctgaagctaagcagagatgatgccaagcctctgctgagactgaagggattcccttcctttcctctggtcgagagacaggccaacgaagtggactggtgggacatggtgtgtaacgtgaagaagctgatcaacgagaaaaaggaggatggcaaggtgttttggcagaatctggctggctacaagagacaggaagccctgagaccatacctgagcagcgaggaagatcggaagaagggaaagaaattcgctcggtaccagctgggcgacctgctgctgcacctggaaaagaagcacggcgaggactggggaaaggtgtacgacgaggcctgggagcggattgacaagaaagtggaaggcctgagcaagcacatcaagctggaagaggaacggagaagcgaggacgcccagagcaaggccgccctgaccgactggctgcgggctaaggccagcttcgtgatcgagggcctgaaggaggccgacaaggacgagttctgcagatgcgagctgaagctgcagaagtggtacggggacctgcggggaaagcccttcgccatcgaagccgagaacagcatcctggacatcagcggcttcagcaagcagtacaactgtgccttcatctggcagaaggacggcgtgaagaagctgaacctgtacctgatcatcaactacttcaagggcggcaagctgcggttcaagaagatcaaacctgaagccttcgaagccaacagattctacaccgtgatcaacaaaaagagcggcgagatcgtgcccatggaggtgaacttcaacttcgacgaccccaacctgatcatcctgcctctggcctttggcaagagacagggcagagaattcatctggaacgacctgctgtccctggaaaccggcagcctgaagctggccaacggaagagtgatcgagaagacactgtacaacagaagaacccggcaggatgagcctgccctgttcgtggccctgaccttcgagcggcgggaggtcctggactcctccaatatcaaaccaatgaacctgatcggcgtggcaagaggcgaaaacatccccgccgtgatcgccctgaccgaccccgagggctgcccactgagccggtttaaggatagcctgggaaacccaacccacatcctgagaatcggcgagagctataaggagaagcagcggaccatccaggccaagaaggaggtggagcagcggagagccggcggctacagccggaagtacgccagcaaagccaagaatctggcagacgatatggtgagaaacaccgctagagatctgctgtactacgccgtgacccaggatgccatgctgatcttcgccaacctgagccggggcttcggccggcagggcaagcggaccttcatggccgagagacagtacacacggatggaggactggctgaccgccaagctggcctacgagggcctgagcaagacctacctgtccaagacactggcccagtacacctccaagacatgcagcaactgtgggtttaccatcaccagcgccgactacgacagggtgctggagaagctgaagaagacagcaacaggctggatgaccacaattaacggcaaggagctgaaggtggagggccagattacctactacaacagatacaagagacagaacgtagtcaaggacctgtccgtcgagctggatagactgagcgaagaatctgtgaacaacgacatctcctcctggacaaagggcagaagcggagaagctctgagcctcctgaagaaaagattctcccatagacccgtgcaggagaagttcgtgtgcctgaactgcggcttcgagacacacgcagccgagcaagccgccctgaacatcgccagatcctggctgttcctgcggagccaggagtacaagaaataccagacaaacaagacaaccggcaacaccgataagagagccttcgtcgagacctggcagtccttttaccggaagaagcttaaggaggtgtggaaacctgccgtgcggtctggcggatctggcggaggctccacaagcgtggccggccccgtgaccttcgaggaggtggccgtgtacttcagcgaggaggagtgggccctgctggaccccggccagagggccctgtacagggacgtgatgcaggagaactacgaggccgtgagctggctgggcttccccgtgagcaagcccggcgagaccagctggctggagagggccggcaagctgcaggagtgggagagcaggagccacgccaacaccgccaggcccaggggcaaccagaccagccccaagaaaaagagaaaagtctaagctgccttctgcggggcttgccttctggccatgcccttcttctctcccttgcacctgtacctcttggtctttgaataaagcctgagtaggaaggctagcaaaaaaaaaaaaaaaaaaaaaaaaaaaaaaaaaaaaaaaaaaaaaaaaaaaaaaaaaaaaaaaaaaaaaaaaaaaaaaaa

SEQ ID NO: 3838 - RNA, 5425 nt, synthetic construct
  source 1..5425: mol_type = other RNA
aggaaataagagagaaaagaagagtaagaagaaatataagagccaccatggcccctaagaagaagcgtaaagtgagccgggtgaacggcagcggcagcggcggcggcatgaaccacgaccaggagttcgacccccctaaggtgtaccctcccgtccccgccgagaagagaaagcccatccgggtcctgagcctgttcgatggcatcgccaccggtctgctggtgctgaaggacctgggcatccaggtggataggtacattgcctccgaggtgtgcgaggactccatcaccgtgggaatggtgcgtcatcagggcaagatcatgtacgtgggcgacgtgcggagcgtgacacagaagcatatccaggagtggggccctttcgacctggtgatcggcggcagcccttgcaatgacctgagcatcgtgaacccagcccggaagggcctgtacgagggaaccggcagactgttcttcgagttttacagactgctgcacgacgcccggcctaaggaaggcgacgaccggcccttcttttggctgttcgagaatgtggtggccatgggagtcagcgacaagcgggatattagccggttcctggagagcaaccccgtgatgatcgatgccaaggaagtgagcgccgcccaccgggccagatacttctggggcaatctgcctggcatgaacagacccctggccagcaccgtgaacgacaagctggagctgcaggagtgcctggagcacggccggatcgccaagttcagcaaggtgagaaccatcaccacccgaagcaacagcatcaaacaaggcaaggaccagcactttcctgtgttcatgaacgagaaggaggacatcctgtggtgtaccgagatggagagagtgttcgggttcccagtccactacacagatgtcagcaacatgtctagactggccagacagagactgctgggaagaagctggtccgtccctgtgatcagacacctgttcgcccctctgaaggagtacttcgcctgcgtgagcagcggcaacagcaacgccaacagccggggccccagcttctctagcggcctggtgccactgtccctgagagggagccacatgggccccatggagatctacaaaaccgtgagcgcctggaagcggcagcctgtgcgcgtgctgagcctgtttcggaatatcgataaagtcctgaaaagcctgggattcctggagagcggctctggctccggcggtggcaccctgaagtacgtggaggatgtgacaaacgtggtcagacgggatgtggagaagtggggccccttcgatctggtgtacggcagcacccaacccctgggcagctcttgtgaccggtgccctggctggtacatgtttcagttccaccggatcctgcagtacgccctgccgagacaggagtcccagcggccattcttttggattttcatggacaacttgctgctgaccgaggatgaccaggaaactaccactcggttcctgcagaccgaagccgtgaccctgcaggacgtgagaggccgggactaccagaacgccatgcgggtgtggtccaacatccctggactgaaaagcaagcacgcacctctgacccctaaagaagaggagtacctgcaggcccaggtgcggagcagaagcaagctggacgcccctaaggtggatctgctggtgaagaattgcctcctgcccctgagagagtacttcaagtatttcagccagaatagtctgcccctgggcggcccaagcagcggcgcccctcctcccagcggcggcagcccagccggctccccaacctctaccgaggagggcacctctgagtccgccacccccgagagcggccctggcacctccaccgagcccagcgagggcagcgcacccggcagccctgccggcagccccacctccacagaggagggaaccagcaccgagcccagcgaaggcagcgccccaggcaccagcaccgagcctagtgagggcggctctggcggcggcagcgcccaggagattaaacggatcaacaagatcagaagaagacttgtgaaagacagcaacaccaagaaggccggcaagacaggccccatgaaaaccctgctggttagagtgatgacacccgatctgagagagcggctggaaaacctgagaaagaagcctgaaaatatcccccagcccatcagcaatacatctagagccaacctgaataagctgctgaccgattacaccgaaatgaagaaggcgatcctgcatgtgtactgggaagagttccagaaggaccctgtgggcctgatgagccgggtggcccagcctgccagcaagaagatcgatcagaacaagctgaaacctgagatggacgagaagggcaacctgaccaccgccggctttgcctgctctcagtgtggccagcccctgttcgtgtacaagctggagcaggtgtctgagaagggcaaggcttacaccaactacttcggacggtgcaatgtggccgagcacgaaaagctgatcctgctggcccagctgaagcccgagaaggatagcgacgaagccgtgacatatagcctgggaaagtttgggcagagggccctggatttctacagcattcatgtgaccaaggagtccacccaccccgtgaagcccctggcccagatcgccggaaacagatacgcctccggacctgtgggaaaggccctgagcgacgcatgtatgggcacaatcgcctccttcctgtctaagtaccaggacatcatcatcgaacaccagaaggtggtgaagggcaaccagaagagactggagagcctgcgggagctggccggcaaggaaaacctggaataccctagcgtgaccctgccacctcagcctcacaccaaggagggcgttgatgcctacaacgaagtgatcgcccgggtgcgaatgtgggtgaacctgaacctgtggcagaagctgaagctaagcagagatgatgccaagcctctgctgagactgaagggattcccttcctttcctctggtcgagagacaggccaacgaagtggactggtgggacatggtgtgtaacgtgaagaagctgatcaacgagaaaaaggaggatggcaaggtgttttggcagaatctggctggctacaagagacaggaagccctgagaccatacctgagcagcgaggaagatcggaagaagggaaagaaattcgctcggtaccagctgggcgacctgctgctgcacctggaaaagaagcacggcgaggactggggaaaggtgtacgacgaggcctgggagcggattgacaagaaagtggaaggcctgagcaagcacatcaagctggaagaggaacggagaagcgaggacgcccagagcaaggccgccctgaccgactggctgcgggctaaggccagcttcgtgatcgagggcctgaaggaggccgacaaggacgagttctgcagatgcgagctgaagctgcagaagtggtacggggacctgcggggaaagcccttcgccatcgaagccgagaacagcatcctggacatcagcggcttcagcaagcagtacaactgtgccttcatctggcagaaggacggcgtgaagaagctgaacctgtacctgatcatcaactacttcaagggcggcaagctgcggttcaagaagatcaaacctgaagccttcgaagccaacagattctacaccgtgatcaacaaaaagagcggcgagatcgtgcccatggaggtgaacttcaacttcgacgaccccaacctgatcatcctgcctctggcctttggcaagagacagggcagagaattcatctggaacgacctgctgtccctggaaaccggcagcctgaagctggccaacggaagagtgatcgagaagacactgtacaacagaagaacccggcaggatgagcctgccctgttcgtggccctgaccttcgagcggcgggaggtcctggactcctccaatatcaaaccaatgaacctgatcggcgtggcaagaggcgaaaacatccccgccgtgatcgccctgaccgaccccgagggctgcccactgagccggtttaaggatagcctgggaaacccaacccacatcctgagaatcggcgagagctataaggagaagcagcggaccatccaggccaagaaggaggtggagcagcggagagccggcggctacagccggaagtacgccagcaaagccaagaatctggcagacgatatggtgagaaacaccgctagagatctgctgtactacgccgtgacccaggatgccatgctgatcttcgccaacctgagccggggcttcggccggcagggcaagcggaccttcatggccgagagacagtacacacggatggaggactggctgaccgccaagctggcctacgagggcctgagcaagacctacctgtccaagacactggcccagtacacctccaagacatgcagcaactgtgggtttaccatcaccagcgccgactacgacagggtgctggagaagctgaagaagacagcaacaggctggatgaccacaattaacggcaaggagctgaaggtggagggccagattacctactacaacagatacaagagacagaacgtagtcaaggacctgtccgtcgagctggatagactgagcgaagaatctgtgaacaacgacatctcctcctggacaaagggcagaagcggagaagctctgagcctcctgaagaaaagattctcccatagacccgtgcaggagaagttcgtgtgcctgaactgcggcttcgagacacacgcagccgagcaagccgccctgaacatcgccagatcctggctgttcctgcggagccaggagtacaagaaataccagacaaacaagacaaccggcaacaccgataagagagccttcgtcgagacctggcagtccttttaccggaagaagcttaaggaggtgtggaaacctgccgtgcggtctggcggatctggcggaggctccacaagcatgacctacgacgacgtgcacgtgaacttcaccggcgaggagtgggccctgctgagccccagccagaagaggctgtacaaggacgtgatgctggagacctacaggaacctgaccgccatcggctacaactgggaggaccacaacagcgagcacttccagcacagcaggaggcacggcaggcacgagaggaggcacaccggcgagaagcccagcgtgtacacccagtgcggcaaggtgttcgcctaccacaccagccccaagaaaaagagaaaagtctaagctgccttctgcggggcttgccttctggccatgcccttcttctctcccttgcacctgtacctcttggtctttgaataaagcctgagtaggaaggctagcaaaaaaaaaaaaaaaaaaaaaaaaaaaaaaaaaaaaaaaaaaaaaaaaaaaaaaaaaaaaaaaaaaaaaaaaaaaaaaaa

SEQ ID NO: 3839 - RNA, 5419 nt, synthetic construct
  source 1..5419: mol_type = other RNA
aggaaataagagagaaaagaagagtaagaagaaatataagagccaccatggcccctaagaagaagcgtaaagtgagccgggtgaacggcagcggcagcggcggcggcatgaaccacgaccaggagttcgacccccctaaggtgtaccctcccgtccccgccgagaagagaaagcccatccgggtcctgagcctgttcgatggcatcgccaccggtctgctggtgctgaaggacctgggcatccaggtggataggtacattgcctccgaggtgtgcgaggactccatcaccgtgggaatggtgcgtcatcagggcaagatcatgtacgtgggcgacgtgcggagcgtgacacagaagcatatccaggagtggggccctttcgacctggtgatcggcggcagcccttgcaatgacctgagcatcgtgaacccagcccggaagggcctgtacgagggaaccggcagactgttcttcgagttttacagactgctgcacgacgcccggcctaaggaaggcgacgaccggcccttcttttggctgttcgagaatgtggtggccatgggagtcagcgacaagcgggatattagccggttcctggagagcaaccccgtgatgatcgatgccaaggaagtgagcgccgcccaccgggccagatacttctggggcaatctgcctggcatgaacagacccctggccagcaccgtgaacgacaagctggagctgcaggagtgcctggagcacggccggatcgccaagttcagcaaggtgagaaccatcaccacccgaagcaacagcatcaaacaaggcaaggaccagcactttcctgtgttcatgaacgagaaggaggacatcctgtggtgtaccgagatggagagagtgttcgggttcccagtccactacacagatgtcagcaacatgtctagactggccagacagagactgctgggaagaagctggtccgtccctgtgatcagacacctgttcgcccctctgaaggagtacttcgcctgcgtgagcagcggcaacagcaacgccaacagccggggccccagcttctctagcggcctggtgccactgtccctgagagggagccacatgggccccatggagatctacaaaaccgtgagcgcctggaagcggcagcctgtgcgcgtgctgagcctgtttcggaatatcgataaagtcctgaaaagcctgggattcctggagagcggctctggctccggcggtggcaccctgaagtacgtggaggatgtgacaaacgtggtcagacgggatgtggagaagtggggccccttcgatctggtgtacggcagcacccaacccctgggcagctcttgtgaccggtgccctggctggtacatgtttcagttccaccggatcctgcagtacgccctgccgagacaggagtcccagcggccattcttttggattttcatggacaacttgctgctgaccgaggatgaccaggaaactaccactcggttcctgcagaccgaagccgtgaccctgcaggacgtgagaggccgggactaccagaacgccatgcgggtgtggtccaacatccctggactgaaaagcaagcacgcacctctgacccctaaagaagaggagtacctgcaggcccaggtgcggagcagaagcaagctggacgcccctaaggtggatctgctggtgaagaattgcctcctgcccctgagagagtacttcaagtatttcagccagaatagtctgcccctgggcggcccaagcagcggcgcccctcctcccagcggcggcagcccagccggctccccaacctctaccgaggagggcacctctgagtccgccacccccgagagcggccctggcacctccaccgagcccagcgagggcagcgcacccggcagccctgccggcagccccacctccacagaggagggaaccagcaccgagcccagcgaaggcagcgccccaggcaccagcaccgagcctagtgagggcggctctggcggcggcagcgcccaggagattaaacggatcaacaagatcagaagaagacttgtgaaagacagcaacaccaagaaggccggcaagacaggccccatgaaaaccctgctggttagagtgatgacacccgatctgagagagcggctggaaaacctgagaaagaagcctgaaaatatcccccagcccatcagcaatacatctagagccaacctgaataagctgctgaccgattacaccgaaatgaagaaggcgatcctgcatgtgtactgggaagagttccagaaggaccctgtgggcctgatgagccgggtggcccagcctgccagcaagaagatcgatcagaacaagctgaaacctgagatggacgagaagggcaacctgaccaccgccggctttgcctgctctcagtgtggccagcccctgttcgtgtacaagctggagcaggtgtctgagaagggcaaggcttacaccaactacttcggacggtgcaatgtggccgagcacgaaaagctgatcctgctggcccagctgaagcccgagaaggatagcgacgaagccgtgacatatagcctgggaaagtttgggcagagggccctggatttctacagcattcatgtgaccaaggagtccacccaccccgtgaagcccctggcccagatcgccggaaacagatacgcctccggacctgtgggaaaggccctgagcgacgcatgtatgggcacaatcgcctccttcctgtctaagtaccaggacatcatcatcgaacaccagaaggtggtgaagggcaaccagaagagactggagagcctgcgggagctggccggcaaggaaaacctggaataccctagcgtgaccctgccacctcagcctcacaccaaggagggcgttgatgcctacaacgaagtgatcgcccgggtgcgaatgtgggtgaacctgaacctgtggcagaagctgaagctaagcagagatgatgccaagcctctgctgagactgaagggattcccttcctttcctctggtcgagagacaggccaacgaagtggactggtgggacatggtgtgtaacgtgaagaagctgatcaacgagaaaaaggaggatggcaaggtgttttggcagaatctggctggctacaagagacaggaagccctgagaccatacctgagcagcgaggaagatcggaagaagggaaagaaattcgctcggtaccagctgggcgacctgctgctgcacctggaaaagaagcacggcgaggactggggaaaggtgtacgacgaggcctgggagcggattgacaagaaagtggaaggcctgagcaagcacatcaagctggaagaggaacggagaagcgaggacgcccagagcaaggccgccctgaccgactggctgcgggctaaggccagcttcgtgatcgagggcctgaaggaggccgacaaggacgagttctgcagatgcgagctgaagctgcagaagtggtacggggacctgcggggaaagcccttcgccatcgaagccgagaacagcatcctggacatcagcggcttcagcaagcagtacaactgtgccttcatctggcagaaggacggcgtgaagaagctgaacctgtacctgatcatcaactacttcaagggcggcaagctgcggttcaagaagatcaaacctgaagccttcgaagccaacagattctacaccgtgatcaacaaaaagagcggcgagatcgtgcccatggaggtgaacttcaacttcgacgaccccaacctgatcatcctgcctctggcctttggcaagagacagggcagagaattcatctggaacgacctgctgtccctggaaaccggcagcctgaagctggccaacggaagagtgatcgagaagacactgtacaacagaagaacccggcaggatgagcctgccctgttcgtggccctgaccttcgagcggcgggaggtcctggactcctccaatatcaaaccaatgaacctgatcggcgtggcaagaggcgaaaacatccccgccgtgatcgccctgaccgaccccgagggctgcccactgagccggtttaaggatagcctgggaaacccaacccacatcctgagaatcggcgagagctataaggagaagcagcggaccatccaggccaagaaggaggtggagcagcggagagccggcggctacagccggaagtacgccagcaaagccaagaatctggcagacgatatggtgagaaacaccgctagagatctgctgtactacgccgtgacccaggatgccatgctgatcttcgccaacctgagccggggcttcggccggcagggcaagcggaccttcatggccgagagacagtacacacggatggaggactggctgaccgccaagctggcctacgagggcctgagcaagacctacctgtccaagacactggcccagtacacctccaagacatgcagcaactgtgggtttaccatcaccagcgccgactacgacagggtgctggagaagctgaagaagacagcaacaggctggatgaccacaattaacggcaaggagctgaaggtggagggccagattacctactacaacagatacaagagacagaacgtagtcaaggacctgtccgtcgagctggatagactgagcgaagaatctgtgaacaacgacatctcctcctggacaaagggcagaagcggagaagctctgagcctcctgaagaaaagattctcccatagacccgtgcaggagaagttcgtgtgcctgaactgcggcttcgagacacacgcagccgagcaagccgccctgaacatcgccagatcctggctgttcctgcggagccaggagtacaagaaataccagacaaacaagacaaccggcaacaccgataagagagccttcgtcgagacctggcagtccttttaccggaagaagcttaaggaggtgtggaaacctgccgtgcggtctggcggatctggcggaggctccacaagcctgcaggagcccctggagttcatggacgtggccatcgagttcagcctggaggagtggcactgcctggacaccgcccagaggaacctgtacagggacgtgatgctggagaactacaggaacctggtgttcctgggcatcgtggtgagcaagcccgacctgatcacctggctggagcagggcaagaagcccctgaccgtgaagaggaggggcatgatcgccgccccccccggcatgagcagccacaccagccccaagaaaaagagaaaagtctaagctgccttctgcggggcttgccttctggccatgcccttcttctctcccttgcacctgtacctcttggtctttgaataaagcctgagtaggaaggctagcaaaaaaaaaaaaaaaaaaaaaaaaaaaaaaaaaaaaaaaaaaaaaaaaaaaaaaaaaaaaaaaaaaaaaaaaaaaaaaaa

SEQ ID NO: 3840 - RNA, 5419 nt, synthetic construct
  source 1..5419: mol_type = other RNA
aggaaataagagagaaaagaagagtaagaagaaatataagagccaccatggcccctaagaagaagcgtaaagtgagccgggtgaacggcagcggcagcggcggcggcatgaaccacgaccaggagttcgacccccctaaggtgtaccctcccgtccccgccgagaagagaaagcccatccgggtcctgagcctgttcgatggcatcgccaccggtctgctggtgctgaaggacctgggcatccaggtggataggtacattgcctccgaggtgtgcgaggactccatcaccgtgggaatggtgcgtcatcagggcaagatcatgtacgtgggcgacgtgcggagcgtgacacagaagcatatccaggagtggggccctttcgacctggtgatcggcggcagcccttgcaatgacctgagcatcgtgaacccagcccggaagggcctgtacgagggaaccggcagactgttcttcgagttttacagactgctgcacgacgcccggcctaaggaaggcgacgaccggcccttcttttggctgttcgagaatgtggtggccatgggagtcagcgacaagcgggatattagccggttcctggagagcaaccccgtgatgatcgatgccaaggaagtgagcgccgcccaccgggccagatacttctggggcaatctgcctggcatgaacagacccctggccagcaccgtgaacgacaagctggagctgcaggagtgcctggagcacggccggatcgccaagttcagcaaggtgagaaccatcaccacccgaagcaacagcatcaaacaaggcaaggaccagcactttcctgtgttcatgaacgagaaggaggacatcctgtggtgtaccgagatggagagagtgttcgggttcccagtccactacacagatgtcagcaacatgtctagactggccagacagagactgctgggaagaagctggtccgtccctgtgatcagacacctgttcgcccctctgaaggagtacttcgcctgcgtgagcagcggcaacagcaacgccaacagccggggccccagcttctctagcggcctggtgccactgtccctgagagggagccacatgggccccatggagatctacaaaaccgtgagcgcctggaagcggcagcctgtgcgcgtgctgagcctgtttcggaatatcgataaagtcctgaaaagcctgggattcctggagagcggctctggctccggcggtggcaccctgaagtacgtggaggatgtgacaaacgtggtcagacgggatgtggagaagtggggccccttcgatctggtgtacggcagcacccaacccctgggcagctcttgtgaccggtgccctggctggtacatgtttcagttccaccggatcctgcagtacgccctgccgagacaggagtcccagcggccattcttttggattttcatggacaacttgctgctgaccgaggatgaccaggaaactaccactcggttcctgcagaccgaagccgtgaccctgcaggacgtgagaggccgggactaccagaacgccatgcgggtgtggtccaacatccctggactgaaaagcaagcacgcacctctgacccctaaagaagaggagtacctgcaggcccaggtgcggagcagaagcaagctggacgcccctaaggtggatctgctggtgaagaattgcctcctgcccctgagagagtacttcaagtatttcagccagaatagtctgcccctgggcggcccaagcagcggcgcccctcctcccagcggcggcagcccagccggctccccaacctctaccgaggagggcacctctgagtccgccacccccgagagcggccctggcacctccaccgagcccagcgagggcagcgcacccggcagccctgccggcagccccacctccacagaggagggaaccagcaccgagcccagcgaaggcagcgccccaggcaccagcaccgagcctagtgagggcggctctggcggcggcagcgcccaggagattaaacggatcaacaagatcagaagaagacttgtgaaagacagcaacaccaagaaggccggcaagacaggccccatgaaaaccctgctggttagagtgatgacacccgatctgagagagcggctggaaaacctgagaaagaagcctgaaaatatcccccagcccatcagcaatacatctagagccaacctgaataagctgctgaccgattacaccgaaatgaagaaggcgatcctgcatgtgtactgggaagagttccagaaggaccctgtgggcctgatgagccgggtggcccagcctgccagcaagaagatcgatcagaacaagctgaaacctgagatggacgagaagggcaacctgaccaccgccggctttgcctgctctcagtgtggccagcccctgttcgtgtacaagctggagcaggtgtctgagaagggcaaggcttacaccaactacttcggacggtgcaatgtggccgagcacgaaaagctgatcctgctggcccagctgaagcccgagaaggatagcgacgaagccgtgacatatagcctgggaaagtttgggcagagggccctggatttctacagcattcatgtgaccaaggagtccacccaccccgtgaagcccctggcccagatcgccggaaacagatacgcctccggacctgtgggaaaggccctgagcgacgcatgtatgggcacaatcgcctccttcctgtctaagtaccaggacatcatcatcgaacaccagaaggtggtgaagggcaaccagaagagactggagagcctgcgggagctggccggcaaggaaaacctggaataccctagcgtgaccctgccacctcagcctcacaccaaggagggcgttgatgcctacaacgaagtgatcgcccgggtgcgaatgtgggtgaacctgaacctgtggcagaagctgaagctaagcagagatgatgccaagcctctgctgagactgaagggattcccttcctttcctctggtcgagagacaggccaacgaagtggactggtgggacatggtgtgtaacgtgaagaagctgatcaacgagaaaaaggaggatggcaaggtgttttggcagaatctggctggctacaagagacaggaagccctgagaccatacctgagcagcgaggaagatcggaagaagggaaagaaattcgctcggtaccagctgggcgacctgctgctgcacctggaaaagaagcacggcgaggactggggaaaggtgtacgacgaggcctgggagcggattgacaagaaagtggaaggcctgagcaagcacatcaagctggaagaggaacggagaagcgaggacgcccagagcaaggccgccctgaccgactggctgcgggctaaggccagcttcgtgatcgagggcctgaaggaggccgacaaggacgagttctgcagatgcgagctgaagctgcagaagtggtacggggacctgcggggaaagcccttcgccatcgaagccgagaacagcatcctggacatcagcggcttcagcaagcagtacaactgtgccttcatctggcagaaggacggcgtgaagaagctgaacctgtacctgatcatcaactacttcaagggcggcaagctgcggttcaagaagatcaaacctgaagccttcgaagccaacagattctacaccgtgatcaacaaaaagagcggcgagatcgtgcccatggaggtgaacttcaacttcgacgaccccaacctgatcatcctgcctctggcctttggcaagagacagggcagagaattcatctggaacgacctgctgtccctggaaaccggcagcctgaagctggccaacggaagagtgatcgagaagacactgtacaacagaagaacccggcaggatgagcctgccctgttcgtggccctgaccttcgagcggcgggaggtcctggactcctccaatatcaaaccaatgaacctgatcggcgtggcaagaggcgaaaacatccccgccgtgatcgccctgaccgaccccgagggctgcccactgagccggtttaaggatagcctgggaaacccaacccacatcctgagaatcggcgagagctataaggagaagcagcggaccatccaggccaagaaggaggtggagcagcggagagccggcggctacagccggaagtacgccagcaaagccaagaatctggcagacgatatggtgagaaacaccgctagagatctgctgtactacgccgtgacccaggatgccatgctgatcttcgccaacctgagccggggcttcggccggcagggcaagcggaccttcatggccgagagacagtacacacggatggaggactggctgaccgccaagctggcctacgagggcctgagcaagacctacctgtccaagacactggcccagtacacctccaagacatgcagcaactgtgggtttaccatcaccagcgccgactacgacagggtgctggagaagctgaagaagacagcaacaggctggatgaccacaattaacggcaaggagctgaaggtggagggccagattacctactacaacagatacaagagacagaacgtagtcaaggacctgtccgtcgagctggatagactgagcgaagaatctgtgaacaacgacatctcctcctggacaaagggcagaagcggagaagctctgagcctcctgaagaaaagattctcccatagacccgtgcaggagaagttcgtgtgcctgaactgcggcttcgagacacacgcagccgagcaagccgccctgaacatcgccagatcctggctgttcctgcggagccaggagtacaagaaataccagacaaacaagacaaccggcaacaccgataagagagccttcgtcgagacctggcagtccttttaccggaagaagcttaaggaggtgtggaaacctgccgtgcggtctggcggatctggcggaggctccacaagccagatgcccatcaagttcgaggacatcgccgtgagcttcagccaggaggagtgggagtacctgaacgaggagcagaaggagctgtacagggaggtgatgaaggagaactaccagaccctgatcagcctgggcaccggcagcccccccgtgacccccgacatcatcagccacatcgagaggggcgaggagccctacatcagggaggagcccggcagcgaggagagggagcccggcaggagcagcaccagccccaagaaaaagagaaaagtctaagctgccttctgcggggcttgccttctggccatgcccttcttctctcccttgcacctgtacctcttggtctttgaataaagcctgagtaggaaggctagcaaaaaaaaaaaaaaaaaaaaaaaaaaaaaaaaaaaaaaaaaaaaaaaaaaaaaaaaaaaaaaaaaaaaaaaaaaaaaaaa

SEQ ID NO: 3841 - RNA, 5419 nt, synthetic construct
  source 1..5419: mol_type = other RNA
aggaaataagagagaaaagaagagtaagaagaaatataagagccaccatggcccctaagaagaagcgtaaagtgagccgggtgaacggcagcggcagcggcggcggcatgaaccacgaccaggagttcgacccccctaaggtgtaccctcccgtccccgccgagaagagaaagcccatccgggtcctgagcctgttcgatggcatcgccaccggtctgctggtgctgaaggacctgggcatccaggtggataggtacattgcctccgaggtgtgcgaggactccatcaccgtgggaatggtgcgtcatcagggcaagatcatgtacgtgggcgacgtgcggagcgtgacacagaagcatatccaggagtggggccctttcgacctggtgatcggcggcagcccttgcaatgacctgagcatcgtgaacccagcccggaagggcctgtacgagggaaccggcagactgttcttcgagttttacagactgctgcacgacgcccggcctaaggaaggcgacgaccggcccttcttttggctgttcgagaatgtggtggccatgggagtcagcgacaagcgggatattagccggttcctggagagcaaccccgtgatgatcgatgccaaggaagtgagcgccgcccaccgggccagatacttctggggcaatctgcctggcatgaacagacccctggccagcaccgtgaacgacaagctggagctgcaggagtgcctggagcacggccggatcgccaagttcagcaaggtgagaaccatcaccacccgaagcaacagcatcaaacaaggcaaggaccagcactttcctgtgttcatgaacgagaaggaggacatcctgtggtgtaccgagatggagagagtgttcgggttcccagtccactacacagatgtcagcaacatgtctagactggccagacagagactgctgggaagaagctggtccgtccctgtgatcagacacctgttcgcccctctgaaggagtacttcgcctgcgtgagcagcggcaacagcaacgccaacagccggggccccagcttctctagcggcctggtgccactgtccctgagagggagccacatgggccccatggagatctacaaaaccgtgagcgcctggaagcggcagcctgtgcgcgtgctgagcctgtttcggaatatcgataaagtcctgaaaagcctgggattcctggagagcggctctggctccggcggtggcaccctgaagtacgtggaggatgtgacaaacgtggtcagacgggatgtggagaagtggggccccttcgatctggtgtacggcagcacccaacccctgggcagctcttgtgaccggtgccctggctggtacatgtttcagttccaccggatcctgcagtacgccctgccgagacaggagtcccagcggccattcttttggattttcatggacaacttgctgctgaccgaggatgaccaggaaactaccactcggttcctgcagaccgaagccgtgaccctgcaggacgtgagaggccgggactaccagaacgccatgcgggtgtggtccaacatccctggactgaaaagcaagcacgcacctctgacccctaaagaagaggagtacctgcaggcccaggtgcggagcagaagcaagctggacgcccctaaggtggatctgctggtgaagaattgcctcctgcccctgagagagtacttcaagtatttcagccagaatagtctgcccctgggcggcccaagcagcggcgcccctcctcccagcggcggcagcccagccggctccccaacctctaccgaggagggcacctctgagtccgccacccccgagagcggccctggcacctccaccgagcccagcgagggcagcgcacccggcagccctgccggcagccccacctccacagaggagggaaccagcaccgagcccagcgaaggcagcgccccaggcaccagcaccgagcctagtgagggcggctctggcggcggcagcgcccaggagattaaacggatcaacaagatcagaagaagacttgtgaaagacagcaacaccaagaaggccggcaagacaggccccatgaaaaccctgctggttagagtgatgacacccgatctgagagagcggctggaaaacctgagaaagaagcctgaaaatatcccccagcccatcagcaatacatctagagccaacctgaataagctgctgaccgattacaccgaaatgaagaaggcgatcctgcatgtgtactgggaagagttccagaaggaccctgtgggcctgatgagccgggtggcccagcctgccagcaagaagatcgatcagaacaagctgaaacctgagatggacgagaagggcaacctgaccaccgccggctttgcctgctctcagtgtggccagcccctgttcgtgtacaagctggagcaggtgtctgagaagggcaaggcttacaccaactacttcggacggtgcaatgtggccgagcacgaaaagctgatcctgctggcccagctgaagcccgagaaggatagcgacgaagccgtgacatatagcctgggaaagtttgggcagagggccctggatttctacagcattcatgtgaccaaggagtccacccaccccgtgaagcccctggcccagatcgccggaaacagatacgcctccggacctgtgggaaaggccctgagcgacgcatgtatgggcacaatcgcctccttcctgtctaagtaccaggacatcatcatcgaacaccagaaggtggtgaagggcaaccagaagagactggagagcctgcgggagctggccggcaaggaaaacctggaataccctagcgtgaccctgccacctcagcctcacaccaaggagggcgttgatgcctacaacgaagtgatcgcccgggtgcgaatgtgggtgaacctgaacctgtggcagaagctgaagctaagcagagatgatgccaagcctctgctgagactgaagggattcccttcctttcctctggtcgagagacaggccaacgaagtggactggtgggacatggtgtgtaacgtgaagaagctgatcaacgagaaaaaggaggatggcaaggtgttttggcagaatctggctggctacaagagacaggaagccctgagaccatacctgagcagcgaggaagatcggaagaagggaaagaaattcgctcggtaccagctgggcgacctgctgctgcacctggaaaagaagcacggcgaggactggggaaaggtgtacgacgaggcctgggagcggattgacaagaaagtggaaggcctgagcaagcacatcaagctggaagaggaacggagaagcgaggacgcccagagcaaggccgccctgaccgactggctgcgggctaaggccagcttcgtgatcgagggcctgaaggaggccgacaaggacgagttctgcagatgcgagctgaagctgcagaagtggtacggggacctgcggggaaagcccttcgccatcgaagccgagaacagcatcctggacatcagcggcttcagcaagcagtacaactgtgccttcatctggcagaaggacggcgtgaagaagctgaacctgtacctgatcatcaactacttcaagggcggcaagctgcggttcaagaagatcaaacctgaagccttcgaagccaacagattctacaccgtgatcaacaaaaagagcggcgagatcgtgcccatggaggtgaacttcaacttcgacgaccccaacctgatcatcctgcctctggcctttggcaagagacagggcagagaattcatctggaacgacctgctgtccctggaaaccggcagcctgaagctggccaacggaagagtgatcgagaagacactgtacaacagaagaacccggcaggatgagcctgccctgttcgtggccctgaccttcgagcggcgggaggtcctggactcctccaatatcaaaccaatgaacctgatcggcgtggcaagaggcgaaaacatccccgccgtgatcgccctgaccgaccccgagggctgcccactgagccggtttaaggatagcctgggaaacccaacccacatcctgagaatcggcgagagctataaggagaagcagcggaccatccaggccaagaaggaggtggagcagcggagagccggcggctacagccggaagtacgccagcaaagccaagaatctggcagacgatatggtgagaaacaccgctagagatctgctgtactacgccgtgacccaggatgccatgctgatcttcgccaacctgagccggggcttcggccggcagggcaagcggaccttcatggccgagagacagtacacacggatggaggactggctgaccgccaagctggcctacgagggcctgagcaagacctacctgtccaagacactggcccagtacacctccaagacatgcagcaactgtgggtttaccatcaccagcgccgactacgacagggtgctggagaagctgaagaagacagcaacaggctggatgaccacaattaacggcaaggagctgaaggtggagggccagattacctactacaacagatacaagagacagaacgtagtcaaggacctgtccgtcgagctggatagactgagcgaagaatctgtgaacaacgacatctcctcctggacaaagggcagaagcggagaagctctgagcctcctgaagaaaagattctcccatagacccgtgcaggagaagttcgtgtgcctgaactgcggcttcgagacacacgcagccgagcaagccgccctgaacatcgccagatcctggctgttcctgcggagccaggagtacaagaaataccagacaaacaagacaaccggcaacaccgataagagagccttcgtcgagacctggcagtccttttaccggaagaagcttaaggaggtgtggaaacctgccgtgcggtctggcggatctggcggaggctccacaagcgtgtgcggcagcgtgaccttcaaggacgtggccgtggacttcagccaggaggagtgggcctgcctggacgccacccagaaggtgctgtacagggacatgatgctggagacctacagcaacctggtggccgtggtgggcaggtgcatcagcaagcccgacctgatcgtgctgctggagcaggagaaggagccctggatggccgtgaaggaggagaccgacaggcccagccccgacctggagagcaccagccccaagaaaaagagaaaagtctaagctgccttctgcggggcttgccttctggccatgcccttcttctctcccttgcacctgtacctcttggtctttgaataaagcctgagtaggaaggctagcaaaaaaaaaaaaaaaaaaaaaaaaaaaaaaaaaaaaaaaaaaaaaaaaaaaaaaaaaaaaaaaaaaaaaaaaaaaaaaaa

SEQ ID NO: 3842 - RNA, 5419 nt, synthetic construct
  source 1..5419: mol_type = other RNA
aggaaataagagagaaaagaagagtaagaagaaatataagagccaccatggcccctaagaagaagcgtaaagtgagccgggtgaacggcagcggcagcggcggcggcatgaaccacgaccaggagttcgacccccctaaggtgtaccctcccgtccccgccgagaagagaaagcccatccgggtcctgagcctgttcgatggcatcgccaccggtctgctggtgctgaaggacctgggcatccaggtggataggtacattgcctccgaggtgtgcgaggactccatcaccgtgggaatggtgcgtcatcagggcaagatcatgtacgtgggcgacgtgcggagcgtgacacagaagcatatccaggagtggggccctttcgacctggtgatcggcggcagcccttgcaatgacctgagcatcgtgaacccagcccggaagggcctgtacgagggaaccggcagactgttcttcgagttttacagactgctgcacgacgcccggcctaaggaaggcgacgaccggcccttcttttggctgttcgagaatgtggtggccatgggagtcagcgacaagcgggatattagccggttcctggagagcaaccccgtgatgatcgatgccaaggaagtgagcgccgcccaccgggccagatacttctggggcaatctgcctggcatgaacagacccctggccagcaccgtgaacgacaagctggagctgcaggagtgcctggagcacggccggatcgccaagttcagcaaggtgagaaccatcaccacccgaagcaacagcatcaaacaaggcaaggaccagcactttcctgtgttcatgaacgagaaggaggacatcctgtggtgtaccgagatggagagagtgttcgggttcccagtccactacacagatgtcagcaacatgtctagactggccagacagagactgctgggaagaagctggtccgtccctgtgatcagacacctgttcgcccctctgaaggagtacttcgcctgcgtgagcagcggcaacagcaacgccaacagccggggccccagcttctctagcggcctggtgccactgtccctgagagggagccacatgggccccatggagatctacaaaaccgtgagcgcctggaagcggcagcctgtgcgcgtgctgagcctgtttcggaatatcgataaagtcctgaaaagcctgggattcctggagagcggctctggctccggcggtggcaccctgaagtacgtggaggatgtgacaaacgtggtcagacgggatgtggagaagtggggccccttcgatctggtgtacggcagcacccaacccctgggcagctcttgtgaccggtgccctggctggtacatgtttcagttccaccggatcctgcagtacgccctgccgagacaggagtcccagcggccattcttttggattttcatggacaacttgctgctgaccgaggatgaccaggaaactaccactcggttcctgcagaccgaagccgtgaccctgcaggacgtgagaggccgggactaccagaacgccatgcgggtgtggtccaacatccctggactgaaaagcaagcacgcacctctgacccctaaagaagaggagtacctgcaggcccaggtgcggagcagaagcaagctggacgcccctaaggtggatctgctggtgaagaattgcctcctgcccctgagagagtacttcaagtatttcagccagaatagtctgcccctgggcggcccaagcagcggcgcccctcctcccagcggcggcagcccagccggctccccaacctctaccgaggagggcacctctgagtccgccacccccgagagcggccctggcacctccaccgagcccagcgagggcagcgcacccggcagccctgccggcagccccacctccacagaggagggaaccagcaccgagcccagcgaaggcagcgccccaggcaccagcaccgagcctagtgagggcggctctggcggcggcagcgcccaggagattaaacggatcaacaagatcagaagaagacttgtgaaagacagcaacaccaagaaggccggcaagacaggccccatgaaaaccctgctggttagagtgatgacacccgatctgagagagcggctggaaaacctgagaaagaagcctgaaaatatcccccagcccatcagcaatacatctagagccaacctgaataagctgctgaccgattacaccgaaatgaagaaggcgatcctgcatgtgtactgggaagagttccagaaggaccctgtgggcctgatgagccgggtggcccagcctgccagcaagaagatcgatcagaacaagctgaaacctgagatggacgagaagggcaacctgaccaccgccggctttgcctgctctcagtgtggccagcccctgttcgtgtacaagctggagcaggtgtctgagaagggcaaggcttacaccaactacttcggacggtgcaatgtggccgagcacgaaaagctgatcctgctggcccagctgaagcccgagaaggatagcgacgaagccgtgacatatagcctgggaaagtttgggcagagggccctggatttctacagcattcatgtgaccaaggagtccacccaccccgtgaagcccctggcccagatcgccggaaacagatacgcctccggacctgtgggaaaggccctgagcgacgcatgtatgggcacaatcgcctccttcctgtctaagtaccaggacatcatcatcgaacaccagaaggtggtgaagggcaaccagaagagactggagagcctgcgggagctggccggcaaggaaaacctggaataccctagcgtgaccctgccacctcagcctcacaccaaggagggcgttgatgcctacaacgaagtgatcgcccgggtgcgaatgtgggtgaacctgaacctgtggcagaagctgaagctaagcagagatgatgccaagcctctgctgagactgaagggattcccttcctttcctctggtcgagagacaggccaacgaagtggactggtgggacatggtgtgtaacgtgaagaagctgatcaacgagaaaaaggaggatggcaaggtgttttggcagaatctggctggctacaagagacaggaagccctgagaccatacctgagcagcgaggaagatcggaagaagggaaagaaattcgctcggtaccagctgggcgacctgctgctgcacctggaaaagaagcacggcgaggactggggaaaggtgtacgacgaggcctgggagcggattgacaagaaagtggaaggcctgagcaagcacatcaagctggaagaggaacggagaagcgaggacgcccagagcaaggccgccctgaccgactggctgcgggctaaggccagcttcgtgatcgagggcctgaaggaggccgacaaggacgagttctgcagatgcgagctgaagctgcagaagtggtacggggacctgcggggaaagcccttcgccatcgaagccgagaacagcatcctggacatcagcggcttcagcaagcagtacaactgtgccttcatctggcagaaggacggcgtgaagaagctgaacctgtacctgatcatcaactacttcaagggcggcaagctgcggttcaagaagatcaaacctgaagccttcgaagccaacagattctacaccgtgatcaacaaaaagagcggcgagatcgtgcccatggaggtgaacttcaacttcgacgaccccaacctgatcatcctgcctctggcctttggcaagagacagggcagagaattcatctggaacgacctgctgtccctggaaaccggcagcctgaagctggccaacggaagagtgatcgagaagacactgtacaacagaagaacccggcaggatgagcctgccctgttcgtggccctgaccttcgagcggcgggaggtcctggactcctccaatatcaaaccaatgaacctgatcggcgtggcaagaggcgaaaacatccccgccgtgatcgccctgaccgaccccgagggctgcccactgagccggtttaaggatagcctgggaaacccaacccacatcctgagaatcggcgagagctataaggagaagcagcggaccatccaggccaagaaggaggtggagcagcggagagccggcggctacagccggaagtacgccagcaaagccaagaatctggcagacgatatggtgagaaacaccgctagagatctgctgtactacgccgtgacccaggatgccatgctgatcttcgccaacctgagccggggcttcggccggcagggcaagcggaccttcatggccgagagacagtacacacggatggaggactggctgaccgccaagctggcctacgagggcctgagcaagacctacctgtccaagacactggcccagtacacctccaagacatgcagcaactgtgggtttaccatcaccagcgccgactacgacagggtgctggagaagctgaagaagacagcaacaggctggatgaccacaattaacggcaaggagctgaaggtggagggccagattacctactacaacagatacaagagacagaacgtagtcaaggacctgtccgtcgagctggatagactgagcgaagaatctgtgaacaacgacatctcctcctggacaaagggcagaagcggagaagctctgagcctcctgaagaaaagattctcccatagacccgtgcaggagaagttcgtgtgcctgaactgcggcttcgagacacacgcagccgagcaagccgccctgaacatcgccagatcctggctgttcctgcggagccaggagtacaagaaataccagacaaacaagacaaccggcaacaccgataagagagccttcgtcgagacctggcagtccttttaccggaagaagcttaaggaggtgtggaaacctgccgtgcggtctggcggatctggcggaggctccacaagcttccaggagagcctgaccttcaaggacgtggccgtggacttcacctacgaggagtggcagcagctgaaccccgaccagaggtacctgtacagggacgtgatgctggagaactacaagaacctggtgttcctgggccaccagatcagcaagcccgacgtgatcagccagctggagcagggcaaggagccctggcccatcgagagggagatcttcacctacagctgcagggactgggagaccaagaccagccccaagaaaaagagaaaagtctaagctgccttctgcggggcttgccttctggccatgcccttcttctctcccttgcacctgtacctcttggtctttgaataaagcctgagtaggaaggctagcaaaaaaaaaaaaaaaaaaaaaaaaaaaaaaaaaaaaaaaaaaaaaaaaaaaaaaaaaaaaaaaaaaaaaaaaaaaaaaaa

SEQ ID NO: 3843 - RNA, 5419 nt, synthetic construct
  source 1..5419: mol_type = other RNA
aggaaataagagagaaaagaagagtaagaagaaatataagagccaccatggcccctaagaagaagcgtaaagtgagccgggtgaacggcagcggcagcggcggcggcatgaaccacgaccaggagttcgacccccctaaggtgtaccctcccgtccccgccgagaagagaaagcccatccgggtcctgagcctgttcgatggcatcgccaccggtctgctggtgctgaaggacctgggcatccaggtggataggtacattgcctccgaggtgtgcgaggactccatcaccgtgggaatggtgcgtcatcagggcaagatcatgtacgtgggcgacgtgcggagcgtgacacagaagcatatccaggagtggggccctttcgacctggtgatcggcggcagcccttgcaatgacctgagcatcgtgaacccagcccggaagggcctgtacgagggaaccggcagactgttcttcgagttttacagactgctgcacgacgcccggcctaaggaaggcgacgaccggcccttcttttggctgttcgagaatgtggtggccatgggagtcagcgacaagcgggatattagccggttcctggagagcaaccccgtgatgatcgatgccaaggaagtgagcgccgcccaccgggccagatacttctggggcaatctgcctggcatgaacagacccctggccagcaccgtgaacgacaagctggagctgcaggagtgcctggagcacggccggatcgccaagttcagcaaggtgagaaccatcaccacccgaagcaacagcatcaaacaaggcaaggaccagcactttcctgtgttcatgaacgagaaggaggacatcctgtggtgtaccgagatggagagagtgttcgggttcccagtccactacacagatgtcagcaacatgtctagactggccagacagagactgctgggaagaagctggtccgtccctgtgatcagacacctgttcgcccctctgaaggagtacttcgcctgcgtgagcagcggcaacagcaacgccaacagccggggccccagcttctctagcggcctggtgccactgtccctgagagggagccacatgggccccatggagatctacaaaaccgtgagcgcctggaagcggcagcctgtgcgcgtgctgagcctgtttcggaatatcgataaagtcctgaaaagcctgggattcctggagagcggctctggctccggcggtggcaccctgaagtacgtggaggatgtgacaaacgtggtcagacgggatgtggagaagtggggccccttcgatctggtgtacggcagcacccaacccctgggcagctcttgtgaccggtgccctggctggtacatgtttcagttccaccggatcctgcagtacgccctgccgagacaggagtcccagcggccattcttttggattttcatggacaacttgctgctgaccgaggatgaccaggaaactaccactcggttcctgcagaccgaagccgtgaccctgcaggacgtgagaggccgggactaccagaacgccatgcgggtgtggtccaacatccctggactgaaaagcaagcacgcacctctgacccctaaagaagaggagtacctgcaggcccaggtgcggagcagaagcaagctggacgcccctaaggtggatctgctggtgaagaattgcctcctgcccctgagagagtacttcaagtatttcagccagaatagtctgcccctgggcggcccaagcagcggcgcccctcctcccagcggcggcagcccagccggctccccaacctctaccgaggagggcacctctgagtccgccacccccgagagcggccctggcacctccaccgagcccagcgagggcagcgcacccggcagccctgccggcagccccacctccacagaggagggaaccagcaccgagcccagcgaaggcagcgccccaggcaccagcaccgagcctagtgagggcggctctggcggcggcagcgcccaggagattaaacggatcaacaagatcagaagaagacttgtgaaagacagcaacaccaagaaggccggcaagacaggccccatgaaaaccctgctggttagagtgatgacacccgatctgagagagcggctggaaaacctgagaaagaagcctgaaaatatcccccagcccatcagcaatacatctagagccaacctgaataagctgctgaccgattacaccgaaatgaagaaggcgatcctgcatgtgtactgggaagagttccagaaggaccctgtgggcctgatgagccgggtggcccagcctgccagcaagaagatcgatcagaacaagctgaaacctgagatggacgagaagggcaacctgaccaccgccggctttgcctgctctcagtgtggccagcccctgttcgtgtacaagctggagcaggtgtctgagaagggcaaggcttacaccaactacttcggacggtgcaatgtggccgagcacgaaaagctgatcctgctggcccagctgaagcccgagaaggatagcgacgaagccgtgacatatagcctgggaaagtttgggcagagggccctggatttctacagcattcatgtgaccaaggagtccacccaccccgtgaagcccctggcccagatcgccggaaacagatacgcctccggacctgtgggaaaggccctgagcgacgcatgtatgggcacaatcgcctccttcctgtctaagtaccaggacatcatcatcgaacaccagaaggtggtgaagggcaaccagaagagactggagagcctgcgggagctggccggcaaggaaaacctggaataccctagcgtgaccctgccacctcagcctcacaccaaggagggcgttgatgcctacaacgaagtgatcgcccgggtgcgaatgtgggtgaacctgaacctgtggcagaagctgaagctaagcagagatgatgccaagcctctgctgagactgaagggattcccttcctttcctctggtcgagagacaggccaacgaagtggactggtgggacatggtgtgtaacgtgaagaagctgatcaacgagaaaaaggaggatggcaaggtgttttggcagaatctggctggctacaagagacaggaagccctgagaccatacctgagcagcgaggaagatcggaagaagggaaagaaattcgctcggtaccagctgggcgacctgctgctgcacctggaaaagaagcacggcgaggactggggaaaggtgtacgacgaggcctgggagcggattgacaagaaagtggaaggcctgagcaagcacatcaagctggaagaggaacggagaagcgaggacgcccagagcaaggccgccctgaccgactggctgcgggctaaggccagcttcgtgatcgagggcctgaaggaggccgacaaggacgagttctgcagatgcgagctgaagctgcagaagtggtacggggacctgcggggaaagcccttcgccatcgaagccgagaacagcatcctggacatcagcggcttcagcaagcagtacaactgtgccttcatctggcagaaggacggcgtgaagaagctgaacctgtacctgatcatcaactacttcaagggcggcaagctgcggttcaagaagatcaaacctgaagccttcgaagccaacagattctacaccgtgatcaacaaaaagagcggcgagatcgtgcccatggaggtgaacttcaacttcgacgaccccaacctgatcatcctgcctctggcctttggcaagagacagggcagagaattcatctggaacgacctgctgtccctggaaaccggcagcctgaagctggccaacggaagagtgatcgagaagacactgtacaacagaagaacccggcaggatgagcctgccctgttcgtggccctgaccttcgagcggcgggaggtcctggactcctccaatatcaaaccaatgaacctgatcggcgtggcaagaggcgaaaacatccccgccgtgatcgccctgaccgaccccgagggctgcccactgagccggtttaaggatagcctgggaaacccaacccacatcctgagaatcggcgagagctataaggagaagcagcggaccatccaggccaagaaggaggtggagcagcggagagccggcggctacagccggaagtacgccagcaaagccaagaatctggcagacgatatggtgagaaacaccgctagagatctgctgtactacgccgtgacccaggatgccatgctgatcttcgccaacctgagccggggcttcggccggcagggcaagcggaccttcatggccgagagacagtacacacggatggaggactggctgaccgccaagctggcctacgagggcctgagcaagacctacctgtccaagacactggcccagtacacctccaagacatgcagcaactgtgggtttaccatcaccagcgccgactacgacagggtgctggagaagctgaagaagacagcaacaggctggatgaccacaattaacggcaaggagctgaaggtggagggccagattacctactacaacagatacaagagacagaacgtagtcaaggacctgtccgtcgagctggatagactgagcgaagaatctgtgaacaacgacatctcctcctggacaaagggcagaagcggagaagctctgagcctcctgaagaaaagattctcccatagacccgtgcaggagaagttcgtgtgcctgaactgcggcttcgagacacacgcagccgagcaagccgccctgaacatcgccagatcctggctgttcctgcggagccaggagtacaagaaataccagacaaacaagacaaccggcaacaccgataagagagccttcgtcgagacctggcagtccttttaccggaagaagcttaaggaggtgtggaaacctgccgtgcggtctggcggatctggcggaggctccacaagcttccagaacagcctgaccttcgacgacgtggccgtggacttcacccaggaggagtgggtgctgatggaccagacccagagggacctgtacagggaggtgatgctggagaactaccagaacctgttcagcgccggctgcgagatcaccaagcccagcctgatcagctggctggaggaggacctgcagatcggccagagggaggacttccaggagtgggagatgcaggacaccctgagggagcagaccagccccaagaaaaagagaaaagtctaagctgccttctgcggggcttgccttctggccatgcccttcttctctcccttgcacctgtacctcttggtctttgaataaagcctgagtaggaaggctagcaaaaaaaaaaaaaaaaaaaaaaaaaaaaaaaaaaaaaaaaaaaaaaaaaaaaaaaaaaaaaaaaaaaaaaaaaaaaaaaa

SEQ ID NO: 3844 - RNA, 5419 nt, synthetic construct
  source 1..5419: mol_type = other RNA
aggaaataagagagaaaagaagagtaagaagaaatataagagccaccatggcccctaagaagaagcgtaaagtgagccgggtgaacggcagcggcagcggcggcggcatgaaccacgaccaggagttcgacccccctaaggtgtaccctcccgtccccgccgagaagagaaagcccatccgggtcctgagcctgttcgatggcatcgccaccggtctgctggtgctgaaggacctgggcatccaggtggataggtacattgcctccgaggtgtgcgaggactccatcaccgtgggaatggtgcgtcatcagggcaagatcatgtacgtgggcgacgtgcggagcgtgacacagaagcatatccaggagtggggccctttcgacctggtgatcggcggcagcccttgcaatgacctgagcatcgtgaacccagcccggaagggcctgtacgagggaaccggcagactgttcttcgagttttacagactgctgcacgacgcccggcctaaggaaggcgacgaccggcccttcttttggctgttcgagaatgtggtggccatgggagtcagcgacaagcgggatattagccggttcctggagagcaaccccgtgatgatcgatgccaaggaagtgagcgccgcccaccgggccagatacttctggggcaatctgcctggcatgaacagacccctggccagcaccgtgaacgacaagctggagctgcaggagtgcctggagcacggccggatcgccaagttcagcaaggtgagaaccatcaccacccgaagcaacagcatcaaacaaggcaaggaccagcactttcctgtgttcatgaacgagaaggaggacatcctgtggtgtaccgagatggagagagtgttcgggttcccagtccactacacagatgtcagcaacatgtctagactggccagacagagactgctgggaagaagctggtccgtccctgtgatcagacacctgttcgcccctctgaaggagtacttcgcctgcgtgagcagcggcaacagcaacgccaacagccggggccccagcttctctagcggcctggtgccactgtccctgagagggagccacatgggccccatggagatctacaaaaccgtgagcgcctggaagcggcagcctgtgcgcgtgctgagcctgtttcggaatatcgataaagtcctgaaaagcctgggattcctggagagcggctctggctccggcggtggcaccctgaagtacgtggaggatgtgacaaacgtggtcagacgggatgtggagaagtggggccccttcgatctggtgtacggcagcacccaacccctgggcagctcttgtgaccggtgccctggctggtacatgtttcagttccaccggatcctgcagtacgccctgccgagacaggagtcccagcggccattcttttggattttcatggacaacttgctgctgaccgaggatgaccaggaaactaccactcggttcctgcagaccgaagccgtgaccctgcaggacgtgagaggccgggactaccagaacgccatgcgggtgtggtccaacatccctggactgaaaagcaagcacgcacctctgacccctaaagaagaggagtacctgcaggcccaggtgcggagcagaagcaagctggacgcccctaaggtggatctgctggtgaagaattgcctcctgcccctgagagagtacttcaagtatttcagccagaatagtctgcccctgggcggcccaagcagcggcgcccctcctcccagcggcggcagcccagccggctccccaacctctaccgaggagggcacctctgagtccgccacccccgagagcggccctggcacctccaccgagcccagcgagggcagcgcacccggcagccctgccggcagccccacctccacagaggagggaaccagcaccgagcccagcgaaggcagcgccccaggcaccagcaccgagcctagtgagggcggctctggcggcggcagcgcccaggagattaaacggatcaacaagatcagaagaagacttgtgaaagacagcaacaccaagaaggccggcaagacaggccccatgaaaaccctgctggttagagtgatgacacccgatctgagagagcggctggaaaacctgagaaagaagcctgaaaatatcccccagcccatcagcaatacatctagagccaacctgaataagctgctgaccgattacaccgaaatgaagaaggcgatcctgcatgtgtactgggaagagttccagaaggaccctgtgggcctgatgagccgggtggcccagcctgccagcaagaagatcgatcagaacaagctgaaacctgagatggacgagaagggcaacctgaccaccgccggctttgcctgctctcagtgtggccagcccctgttcgtgtacaagctggagcaggtgtctgagaagggcaaggcttacaccaactacttcggacggtgcaatgtggccgagcacgaaaagctgatcctgctggcccagctgaagcccgagaaggatagcgacgaagccgtgacatatagcctgggaaagtttgggcagagggccctggatttctacagcattcatgtgaccaaggagtccacccaccccgtgaagcccctggcccagatcgccggaaacagatacgcctccggacctgtgggaaaggccctgagcgacgcatgtatgggcacaatcgcctccttcctgtctaagtaccaggacatcatcatcgaacaccagaaggtggtgaagggcaaccagaagagactggagagcctgcgggagctggccggcaaggaaaacctggaataccctagcgtgaccctgccacctcagcctcacaccaaggagggcgttgatgcctacaacgaagtgatcgcccgggtgcgaatgtgggtgaacctgaacctgtggcagaagctgaagctaagcagagatgatgccaagcctctgctgagactgaagggattcccttcctttcctctggtcgagagacaggccaacgaagtggactggtgggacatggtgtgtaacgtgaagaagctgatcaacgagaaaaaggaggatggcaaggtgttttggcagaatctggctggctacaagagacaggaagccctgagaccatacctgagcagcgaggaagatcggaagaagggaaagaaattcgctcggtaccagctgggcgacctgctgctgcacctggaaaagaagcacggcgaggactggggaaaggtgtacgacgaggcctgggagcggattgacaagaaagtggaaggcctgagcaagcacatcaagctggaagaggaacggagaagcgaggacgcccagagcaaggccgccctgaccgactggctgcgggctaaggccagcttcgtgatcgagggcctgaaggaggccgacaaggacgagttctgcagatgcgagctgaagctgcagaagtggtacggggacctgcggggaaagcccttcgccatcgaagccgagaacagcatcctggacatcagcggcttcagcaagcagtacaactgtgccttcatctggcagaaggacggcgtgaagaagctgaacctgtacctgatcatcaactacttcaagggcggcaagctgcggttcaagaagatcaaacctgaagccttcgaagccaacagattctacaccgtgatcaacaaaaagagcggcgagatcgtgcccatggaggtgaacttcaacttcgacgaccccaacctgatcatcctgcctctggcctttggcaagagacagggcagagaattcatctggaacgacctgctgtccctggaaaccggcagcctgaagctggccaacggaagagtgatcgagaagacactgtacaacagaagaacccggcaggatgagcctgccctgttcgtggccctgaccttcgagcggcgggaggtcctggactcctccaatatcaaaccaatgaacctgatcggcgtggcaagaggcgaaaacatccccgccgtgatcgccctgaccgaccccgagggctgcccactgagccggtttaaggatagcctgggaaacccaacccacatcctgagaatcggcgagagctataaggagaagcagcggaccatccaggccaagaaggaggtggagcagcggagagccggcggctacagccggaagtacgccagcaaagccaagaatctggcagacgatatggtgagaaacaccgctagagatctgctgtactacgccgtgacccaggatgccatgctgatcttcgccaacctgagccggggcttcggccggcagggcaagcggaccttcatggccgagagacagtacacacggatggaggactggctgaccgccaagctggcctacgagggcctgagcaagacctacctgtccaagacactggcccagtacacctccaagacatgcagcaactgtgggtttaccatcaccagcgccgactacgacagggtgctggagaagctgaagaagacagcaacaggctggatgaccacaattaacggcaaggagctgaaggtggagggccagattacctactacaacagatacaagagacagaacgtagtcaaggacctgtccgtcgagctggatagactgagcgaagaatctgtgaacaacgacatctcctcctggacaaagggcagaagcggagaagctctgagcctcctgaagaaaagattctcccatagacccgtgcaggagaagttcgtgtgcctgaactgcggcttcgagacacacgcagccgagcaagccgccctgaacatcgccagatcctggctgttcctgcggagccaggagtacaagaaataccagacaaacaagacaaccggcaacaccgataagagagccttcgtcgagacctggcagtccttttaccggaagaagcttaaggaggtgtggaaacctgccgtgcggtctggcggatctggcggaggctccacaagcccccaggagagcgtgaccttcagggacgtggccgtggacttcacctgggaggagtggggccagctggaccccagccagaaggagctgtacagggaggtgatgctggagaactacggcaacctggcctgcctgggcctggccgtgagcaagcccgacgtgatcctgcagctggagaggggcgagatcccctggatgagcgagaggaaggtgcccgagggcatctgccccgactgggaggccaggaccagccccaagaaaaagagaaaagtctaagctgccttctgcggggcttgccttctggccatgcccttcttctctcccttgcacctgtacctcttggtctttgaataaagcctgagtaggaaggctagcaaaaaaaaaaaaaaaaaaaaaaaaaaaaaaaaaaaaaaaaaaaaaaaaaaaaaaaaaaaaaaaaaaaaaaaaaaaaaaaa

SEQ ID NO: 3845 - RNA, 5419 nt, synthetic construct
  source 1..5419: mol_type = other RNA
aggaaataagagagaaaagaagagtaagaagaaatataagagccaccatggcccctaagaagaagcgtaaagtgagccgggtgaacggcagcggcagcggcggcggcatgaaccacgaccaggagttcgacccccctaaggtgtaccctcccgtccccgccgagaagagaaagcccatccgggtcctgagcctgttcgatggcatcgccaccggtctgctggtgctgaaggacctgggcatccaggtggataggtacattgcctccgaggtgtgcgaggactccatcaccgtgggaatggtgcgtcatcagggcaagatcatgtacgtgggcgacgtgcggagcgtgacacagaagcatatccaggagtggggccctttcgacctggtgatcggcggcagcccttgcaatgacctgagcatcgtgaacccagcccggaagggcctgtacgagggaaccggcagactgttcttcgagttttacagactgctgcacgacgcccggcctaaggaaggcgacgaccggcccttcttttggctgttcgagaatgtggtggccatgggagtcagcgacaagcgggatattagccggttcctggagagcaaccccgtgatgatcgatgccaaggaagtgagcgccgcccaccgggccagatacttctggggcaatctgcctggcatgaacagacccctggccagcaccgtgaacgacaagctggagctgcaggagtgcctggagcacggccggatcgccaagttcagcaaggtgagaaccatcaccacccgaagcaacagcatcaaacaaggcaaggaccagcactttcctgtgttcatgaacgagaaggaggacatcctgtggtgtaccgagatggagagagtgttcgggttcccagtccactacacagatgtcagcaacatgtctagactggccagacagagactgctgggaagaagctggtccgtccctgtgatcagacacctgttcgcccctctgaaggagtacttcgcctgcgtgagcagcggcaacagcaacgccaacagccggggccccagcttctctagcggcctggtgccactgtccctgagagggagccacatgggccccatggagatctacaaaaccgtgagcgcctggaagcggcagcctgtgcgcgtgctgagcctgtttcggaatatcgataaagtcctgaaaagcctgggattcctggagagcggctctggctccggcggtggcaccctgaagtacgtggaggatgtgacaaacgtggtcagacgggatgtggagaagtggggccccttcgatctggtgtacggcagcacccaacccctgggcagctcttgtgaccggtgccctggctggtacatgtttcagttccaccggatcctgcagtacgccctgccgagacaggagtcccagcggccattcttttggattttcatggacaacttgctgctgaccgaggatgaccaggaaactaccactcggttcctgcagaccgaagccgtgaccctgcaggacgtgagaggccgggactaccagaacgccatgcgggtgtggtccaacatccctggactgaaaagcaagcacgcacctctgacccctaaagaagaggagtacctgcaggcccaggtgcggagcagaagcaagctggacgcccctaaggtggatctgctggtgaagaattgcctcctgcccctgagagagtacttcaagtatttcagccagaatagtctgcccctgggcggcccaagcagcggcgcccctcctcccagcggcggcagcccagccggctccccaacctctaccgaggagggcacctctgagtccgccacccccgagagcggccctggcacctccaccgagcccagcgagggcagcgcacccggcagccctgccggcagccccacctccacagaggagggaaccagcaccgagcccagcgaaggcagcgccccaggcaccagcaccgagcctagtgagggcggctctggcggcggcagcgcccaggagattaaacggatcaacaagatcagaagaagacttgtgaaagacagcaacaccaagaaggccggcaagacaggccccatgaaaaccctgctggttagagtgatgacacccgatctgagagagcggctggaaaacctgagaaagaagcctgaaaatatcccccagcccatcagcaatacatctagagccaacctgaataagctgctgaccgattacaccgaaatgaagaaggcgatcctgcatgtgtactgggaagagttccagaaggaccctgtgggcctgatgagccgggtggcccagcctgccagcaagaagatcgatcagaacaagctgaaacctgagatggacgagaagggcaacctgaccaccgccggctttgcctgctctcagtgtggccagcccctgttcgtgtacaagctggagcaggtgtctgagaagggcaaggcttacaccaactacttcggacggtgcaatgtggccgagcacgaaaagctgatcctgctggcccagctgaagcccgagaaggatagcgacgaagccgtgacatatagcctgggaaagtttgggcagagggccctggatttctacagcattcatgtgaccaaggagtccacccaccccgtgaagcccctggcccagatcgccggaaacagatacgcctccggacctgtgggaaaggccctgagcgacgcatgtatgggcacaatcgcctccttcctgtctaagtaccaggacatcatcatcgaacaccagaaggtggtgaagggcaaccagaagagactggagagcctgcgggagctggccggcaaggaaaacctggaataccctagcgtgaccctgccacctcagcctcacaccaaggagggcgttgatgcctacaacgaagtgatcgcccgggtgcgaatgtgggtgaacctgaacctgtggcagaagctgaagctaagcagagatgatgccaagcctctgctgagactgaagggattcccttcctttcctctggtcgagagacaggccaacgaagtggactggtgggacatggtgtgtaacgtgaagaagctgatcaacgagaaaaaggaggatggcaaggtgttttggcagaatctggctggctacaagagacaggaagccctgagaccatacctgagcagcgaggaagatcggaagaagggaaagaaattcgctcggtaccagctgggcgacctgctgctgcacctggaaaagaagcacggcgaggactggggaaaggtgtacgacgaggcctgggagcggattgacaagaaagtggaaggcctgagcaagcacatcaagctggaagaggaacggagaagcgaggacgcccagagcaaggccgccctgaccgactggctgcgggctaaggccagcttcgtgatcgagggcctgaaggaggccgacaaggacgagttctgcagatgcgagctgaagctgcagaagtggtacggggacctgcggggaaagcccttcgccatcgaagccgagaacagcatcctggacatcagcggcttcagcaagcagtacaactgtgccttcatctggcagaaggacggcgtgaagaagctgaacctgtacctgatcatcaactacttcaagggcggcaagctgcggttcaagaagatcaaacctgaagccttcgaagccaacagattctacaccgtgatcaacaaaaagagcggcgagatcgtgcccatggaggtgaacttcaacttcgacgaccccaacctgatcatcctgcctctggcctttggcaagagacagggcagagaattcatctggaacgacctgctgtccctggaaaccggcagcctgaagctggccaacggaagagtgatcgagaagacactgtacaacagaagaacccggcaggatgagcctgccctgttcgtggccctgaccttcgagcggcgggaggtcctggactcctccaatatcaaaccaatgaacctgatcggcgtggcaagaggcgaaaacatccccgccgtgatcgccctgaccgaccccgagggctgcccactgagccggtttaaggatagcctgggaaacccaacccacatcctgagaatcggcgagagctataaggagaagcagcggaccatccaggccaagaaggaggtggagcagcggagagccggcggctacagccggaagtacgccagcaaagccaagaatctggcagacgatatggtgagaaacaccgctagagatctgctgtactacgccgtgacccaggatgccatgctgatcttcgccaacctgagccggggcttcggccggcagggcaagcggaccttcatggccgagagacagtacacacggatggaggactggctgaccgccaagctggcctacgagggcctgagcaagacctacctgtccaagacactggcccagtacacctccaagacatgcagcaactgtgggtttaccatcaccagcgccgactacgacagggtgctggagaagctgaagaagacagcaacaggctggatgaccacaattaacggcaaggagctgaaggtggagggccagattacctactacaacagatacaagagacagaacgtagtcaaggacctgtccgtcgagctggatagactgagcgaagaatctgtgaacaacgacatctcctcctggacaaagggcagaagcggagaagctctgagcctcctgaagaaaagattctcccatagacccgtgcaggagaagttcgtgtgcctgaactgcggcttcgagacacacgcagccgagcaagccgccctgaacatcgccagatcctggctgttcctgcggagccaggagtacaagaaataccagacaaacaagacaaccggcaacaccgataagagagccttcgtcgagacctggcagtccttttaccggaagaagcttaaggaggtgtggaaacctgccgtgcggtctggcggatctggcggaggctccacaagcgtggtgctgctggaggccttcgaggacgtggccgtgtacttcacccagaaggagtgggccctgctggacgacggcgacaaggccctgtacagggaccagatgctgaggaactaccaggccctgatcagcctgggctacaggggccccacccccgccctgatcaacaggatccagaggggcgagatggagctgtgggtgtgcgacaaggactacggcgagaagagcagcctggagggcctgttcaccagccccaagaaaaagagaaaagtctaagctgccttctgcggggcttgccttctggccatgcccttcttctctcccttgcacctgtacctcttggtctttgaataaagcctgagtaggaaggctagcaaaaaaaaaaaaaaaaaaaaaaaaaaaaaaaaaaaaaaaaaaaaaaaaaaaaaaaaaaaaaaaaaaaaaaaaaaaaaaaa

SEQ ID NO: 3846 - RNA, 5419 nt, synthetic construct
  source 1..5419: mol_type = other RNA
aggaaataagagagaaaagaagagtaagaagaaatataagagccaccatggcccctaagaagaagcgtaaagtgagccgggtgaacggcagcggcagcggcggcggcatgaaccacgaccaggagttcgacccccctaaggtgtaccctcccgtccccgccgagaagagaaagcccatccgggtcctgagcctgttcgatggcatcgccaccggtctgctggtgctgaaggacctgggcatccaggtggataggtacattgcctccgaggtgtgcgaggactccatcaccgtgggaatggtgcgtcatcagggcaagatcatgtacgtgggcgacgtgcggagcgtgacacagaagcatatccaggagtggggccctttcgacctggtgatcggcggcagcccttgcaatgacctgagcatcgtgaacccagcccggaagggcctgtacgagggaaccggcagactgttcttcgagttttacagactgctgcacgacgcccggcctaaggaaggcgacgaccggcccttcttttggctgttcgagaatgtggtggccatgggagtcagcgacaagcgggatattagccggttcctggagagcaaccccgtgatgatcgatgccaaggaagtgagcgccgcccaccgggccagatacttctggggcaatctgcctggcatgaacagacccctggccagcaccgtgaacgacaagctggagctgcaggagtgcctggagcacggccggatcgccaagttcagcaaggtgagaaccatcaccacccgaagcaacagcatcaaacaaggcaaggaccagcactttcctgtgttcatgaacgagaaggaggacatcctgtggtgtaccgagatggagagagtgttcgggttcccagtccactacacagatgtcagcaacatgtctagactggccagacagagactgctgggaagaagctggtccgtccctgtgatcagacacctgttcgcccctctgaaggagtacttcgcctgcgtgagcagcggcaacagcaacgccaacagccggggccccagcttctctagcggcctggtgccactgtccctgagagggagccacatgggccccatggagatctacaaaaccgtgagcgcctggaagcggcagcctgtgcgcgtgctgagcctgtttcggaatatcgataaagtcctgaaaagcctgggattcctggagagcggctctggctccggcggtggcaccctgaagtacgtggaggatgtgacaaacgtggtcagacgggatgtggagaagtggggccccttcgatctggtgtacggcagcacccaacccctgggcagctcttgtgaccggtgccctggctggtacatgtttcagttccaccggatcctgcagtacgccctgccgagacaggagtcccagcggccattcttttggattttcatggacaacttgctgctgaccgaggatgaccaggaaactaccactcggttcctgcagaccgaagccgtgaccctgcaggacgtgagaggccgggactaccagaacgccatgcgggtgtggtccaacatccctggactgaaaagcaagcacgcacctctgacccctaaagaagaggagtacctgcaggcccaggtgcggagcagaagcaagctggacgcccctaaggtggatctgctggtgaagaattgcctcctgcccctgagagagtacttcaagtatttcagccagaatagtctgcccctgggcggcccaagcagcggcgcccctcctcccagcggcggcagcccagccggctccccaacctctaccgaggagggcacctctgagtccgccacccccgagagcggccctggcacctccaccgagcccagcgagggcagcgcacccggcagccctgccggcagccccacctccacagaggagggaaccagcaccgagcccagcgaaggcagcgccccaggcaccagcaccgagcctagtgagggcggctctggcggcggcagcgcccaggagattaaacggatcaacaagatcagaagaagacttgtgaaagacagcaacaccaagaaggccggcaagacaggccccatgaaaaccctgctggttagagtgatgacacccgatctgagagagcggctggaaaacctgagaaagaagcctgaaaatatcccccagcccatcagcaatacatctagagccaacctgaataagctgctgaccgattacaccgaaatgaagaaggcgatcctgcatgtgtactgggaagagttccagaaggaccctgtgggcctgatgagccgggtggcccagcctgccagcaagaagatcgatcagaacaagctgaaacctgagatggacgagaagggcaacctgaccaccgccggctttgcctgctctcagtgtggccagcccctgttcgtgtacaagctggagcaggtgtctgagaagggcaaggcttacaccaactacttcggacggtgcaatgtggccgagcacgaaaagctgatcctgctggcccagctgaagcccgagaaggatagcgacgaagccgtgacatatagcctgggaaagtttgggcagagggccctggatttctacagcattcatgtgaccaaggagtccacccaccccgtgaagcccctggcccagatcgccggaaacagatacgcctccggacctgtgggaaaggccctgagcgacgcatgtatgggcacaatcgcctccttcctgtctaagtaccaggacatcatcatcgaacaccagaaggtggtgaagggcaaccagaagagactggagagcctgcgggagctggccggcaaggaaaacctggaataccctagcgtgaccctgccacctcagcctcacaccaaggagggcgttgatgcctacaacgaagtgatcgcccgggtgcgaatgtgggtgaacctgaacctgtggcagaagctgaagctaagcagagatgatgccaagcctctgctgagactgaagggattcccttcctttcctctggtcgagagacaggccaacgaagtggactggtgggacatggtgtgtaacgtgaagaagctgatcaacgagaaaaaggaggatggcaaggtgttttggcagaatctggctggctacaagagacaggaagccctgagaccatacctgagcagcgaggaagatcggaagaagggaaagaaattcgctcggtaccagctgggcgacctgctgctgcacctggaaaagaagcacggcgaggactggggaaaggtgtacgacgaggcctgggagcggattgacaagaaagtggaaggcctgagcaagcacatcaagctggaagaggaacggagaagcgaggacgcccagagcaaggccgccctgaccgactggctgcgggctaaggccagcttcgtgatcgagggcctgaaggaggccgacaaggacgagttctgcagatgcgagctgaagctgcagaagtggtacggggacctgcggggaaagcccttcgccatcgaagccgagaacagcatcctggacatcagcggcttcagcaagcagtacaactgtgccttcatctggcagaaggacggcgtgaagaagctgaacctgtacctgatcatcaactacttcaagggcggcaagctgcggttcaagaagatcaaacctgaagccttcgaagccaacagattctacaccgtgatcaacaaaaagagcggcgagatcgtgcccatggaggtgaacttcaacttcgacgaccccaacctgatcatcctgcctctggcctttggcaagagacagggcagagaattcatctggaacgacctgctgtccctggaaaccggcagcctgaagctggccaacggaagagtgatcgagaagacactgtacaacagaagaacccggcaggatgagcctgccctgttcgtggccctgaccttcgagcggcgggaggtcctggactcctccaatatcaaaccaatgaacctgatcggcgtggcaagaggcgaaaacatccccgccgtgatcgccctgaccgaccccgagggctgcccactgagccggtttaaggatagcctgggaaacccaacccacatcctgagaatcggcgagagctataaggagaagcagcggaccatccaggccaagaaggaggtggagcagcggagagccggcggctacagccggaagtacgccagcaaagccaagaatctggcagacgatatggtgagaaacaccgctagagatctgctgtactacgccgtgacccaggatgccatgctgatcttcgccaacctgagccggggcttcggccggcagggcaagcggaccttcatggccgagagacagtacacacggatggaggactggctgaccgccaagctggcctacgagggcctgagcaagacctacctgtccaagacactggcccagtacacctccaagacatgcagcaactgtgggtttaccatcaccagcgccgactacgacagggtgctggagaagctgaagaagacagcaacaggctggatgaccacaattaacggcaaggagctgaaggtggagggccagattacctactacaacagatacaagagacagaacgtagtcaaggacctgtccgtcgagctggatagactgagcgaagaatctgtgaacaacgacatctcctcctggacaaagggcagaagcggagaagctctgagcctcctgaagaaaagattctcccatagacccgtgcaggagaagttcgtgtgcctgaactgcggcttcgagacacacgcagccgagcaagccgccctgaacatcgccagatcctggctgttcctgcggagccaggagtacaagaaataccagacaaacaagacaaccggcaacaccgataagagagccttcgtcgagacctggcagtccttttaccggaagaagcttaaggaggtgtggaaacctgccgtgcggtctggcggatctggcggaggctccacaagccaggccgaggtgaccttcgaggacgtggccgtgctgctgagccaggaggagtggggcctgctgggccccagccagaagggcctgtacagggaggtgatgctggagacctacaggaacctgctgagcctgggcgtgggcctggccgaccccaagcccgaggtgatcgtgcagctggagaggggcgacgagctgtgggtgctggacatgcacggcgccgagcagcccagcgtggacggcagcgccaccagccccaagaaaaagagaaaagtctaagctgccttctgcggggcttgccttctggccatgcccttcttctctcccttgcacctgtacctcttggtctttgaataaagcctgagtaggaaggctagcaaaaaaaaaaaaaaaaaaaaaaaaaaaaaaaaaaaaaaaaaaaaaaaaaaaaaaaaaaaaaaaaaaaaaaaaaaaaaaaa

SEQ ID NO: 3847 - RNA, 5419 nt, synthetic construct
  source 1..5419: mol_type = other RNA
aggaaataagagagaaaagaagagtaagaagaaatataagagccaccatggcccctaagaagaagcgtaaagtgagccgggtgaacggcagcggcagcggcggcggcatgaaccacgaccaggagttcgacccccctaaggtgtaccctcccgtccccgccgagaagagaaagcccatccgggtcctgagcctgttcgatggcatcgccaccggtctgctggtgctgaaggacctgggcatccaggtggataggtacattgcctccgaggtgtgcgaggactccatcaccgtgggaatggtgcgtcatcagggcaagatcatgtacgtgggcgacgtgcggagcgtgacacagaagcatatccaggagtggggccctttcgacctggtgatcggcggcagcccttgcaatgacctgagcatcgtgaacccagcccggaagggcctgtacgagggaaccggcagactgttcttcgagttttacagactgctgcacgacgcccggcctaaggaaggcgacgaccggcccttcttttggctgttcgagaatgtggtggccatgggagtcagcgacaagcgggatattagccggttcctggagagcaaccccgtgatgatcgatgccaaggaagtgagcgccgcccaccgggccagatacttctggggcaatctgcctggcatgaacagacccctggccagcaccgtgaacgacaagctggagctgcaggagtgcctggagcacggccggatcgccaagttcagcaaggtgagaaccatcaccacccgaagcaacagcatcaaacaaggcaaggaccagcactttcctgtgttcatgaacgagaaggaggacatcctgtggtgtaccgagatggagagagtgttcgggttcccagtccactacacagatgtcagcaacatgtctagactggccagacagagactgctgggaagaagctggtccgtccctgtgatcagacacctgttcgcccctctgaaggagtacttcgcctgcgtgagcagcggcaacagcaacgccaacagccggggccccagcttctctagcggcctggtgccactgtccctgagagggagccacatgggccccatggagatctacaaaaccgtgagcgcctggaagcggcagcctgtgcgcgtgctgagcctgtttcggaatatcgataaagtcctgaaaagcctgggattcctggagagcggctctggctccggcggtggcaccctgaagtacgtggaggatgtgacaaacgtggtcagacgggatgtggagaagtggggccccttcgatctggtgtacggcagcacccaacccctgggcagctcttgtgaccggtgccctggctggtacatgtttcagttccaccggatcctgcagtacgccctgccgagacaggagtcccagcggccattcttttggattttcatggacaacttgctgctgaccgaggatgaccaggaaactaccactcggttcctgcagaccgaagccgtgaccctgcaggacgtgagaggccgggactaccagaacgccatgcgggtgtggtccaacatccctggactgaaaagcaagcacgcacctctgacccctaaagaagaggagtacctgcaggcccaggtgcggagcagaagcaagctggacgcccctaaggtggatctgctggtgaagaattgcctcctgcccctgagagagtacttcaagtatttcagccagaatagtctgcccctgggcggcccaagcagcggcgcccctcctcccagcggcggcagcccagccggctccccaacctctaccgaggagggcacctctgagtccgccacccccgagagcggccctggcacctccaccgagcccagcgagggcagcgcacccggcagccctgccggcagccccacctccacagaggagggaaccagcaccgagcccagcgaaggcagcgccccaggcaccagcaccgagcctagtgagggcggctctggcggcggcagcgcccaggagattaaacggatcaacaagatcagaagaagacttgtgaaagacagcaacaccaagaaggccggcaagacaggccccatgaaaaccctgctggttagagtgatgacacccgatctgagagagcggctggaaaacctgagaaagaagcctgaaaatatcccccagcccatcagcaatacatctagagccaacctgaataagctgctgaccgattacaccgaaatgaagaaggcgatcctgcatgtgtactgggaagagttccagaaggaccctgtgggcctgatgagccgggtggcccagcctgccagcaagaagatcgatcagaacaagctgaaacctgagatggacgagaagggcaacctgaccaccgccggctttgcctgctctcagtgtggccagcccctgttcgtgtacaagctggagcaggtgtctgagaagggcaaggcttacaccaactacttcggacggtgcaatgtggccgagcacgaaaagctgatcctgctggcccagctgaagcccgagaaggatagcgacgaagccgtgacatatagcctgggaaagtttgggcagagggccctggatttctacagcattcatgtgaccaaggagtccacccaccccgtgaagcccctggcccagatcgccggaaacagatacgcctccggacctgtgggaaaggccctgagcgacgcatgtatgggcacaatcgcctccttcctgtctaagtaccaggacatcatcatcgaacaccagaaggtggtgaagggcaaccagaagagactggagagcctgcgggagctggccggcaaggaaaacctggaataccctagcgtgaccctgccacctcagcctcacaccaaggagggcgttgatgcctacaacgaagtgatcgcccgggtgcgaatgtgggtgaacctgaacctgtggcagaagctgaagctaagcagagatgatgccaagcctctgctgagactgaagggattcccttcctttcctctggtcgagagacaggccaacgaagtggactggtgggacatggtgtgtaacgtgaagaagctgatcaacgagaaaaaggaggatggcaaggtgttttggcagaatctggctggctacaagagacaggaagccctgagaccatacctgagcagcgaggaagatcggaagaagggaaagaaattcgctcggtaccagctgggcgacctgctgctgcacctggaaaagaagcacggcgaggactggggaaaggtgtacgacgaggcctgggagcggattgacaagaaagtggaaggcctgagcaagcacatcaagctggaagaggaacggagaagcgaggacgcccagagcaaggccgccctgaccgactggctgcgggctaaggccagcttcgtgatcgagggcctgaaggaggccgacaaggacgagttctgcagatgcgagctgaagctgcagaagtggtacggggacctgcggggaaagcccttcgccatcgaagccgagaacagcatcctggacatcagcggcttcagcaagcagtacaactgtgccttcatctggcagaaggacggcgtgaagaagctgaacctgtacctgatcatcaactacttcaagggcggcaagctgcggttcaagaagatcaaacctgaagccttcgaagccaacagattctacaccgtgatcaacaaaaagagcggcgagatcgtgcccatggaggtgaacttcaacttcgacgaccccaacctgatcatcctgcctctggcctttggcaagagacagggcagagaattcatctggaacgacctgctgtccctggaaaccggcagcctgaagctggccaacggaagagtgatcgagaagacactgtacaacagaagaacccggcaggatgagcctgccctgttcgtggccctgaccttcgagcggcgggaggtcctggactcctccaatatcaaaccaatgaacctgatcggcgtggcaagaggcgaaaacatccccgccgtgatcgccctgaccgaccccgagggctgcccactgagccggtttaaggatagcctgggaaacccaacccacatcctgagaatcggcgagagctataaggagaagcagcggaccatccaggccaagaaggaggtggagcagcggagagccggcggctacagccggaagtacgccagcaaagccaagaatctggcagacgatatggtgagaaacaccgctagagatctgctgtactacgccgtgacccaggatgccatgctgatcttcgccaacctgagccggggcttcggccggcagggcaagcggaccttcatggccgagagacagtacacacggatggaggactggctgaccgccaagctggcctacgagggcctgagcaagacctacctgtccaagacactggcccagtacacctccaagacatgcagcaactgtgggtttaccatcaccagcgccgactacgacagggtgctggagaagctgaagaagacagcaacaggctggatgaccacaattaacggcaaggagctgaaggtggagggccagattacctactacaacagatacaagagacagaacgtagtcaaggacctgtccgtcgagctggatagactgagcgaagaatctgtgaacaacgacatctcctcctggacaaagggcagaagcggagaagctctgagcctcctgaagaaaagattctcccatagacccgtgcaggagaagttcgtgtgcctgaactgcggcttcgagacacacgcagccgagcaagccgccctgaacatcgccagatcctggctgttcctgcggagccaggagtacaagaaataccagacaaacaagacaaccggcaacaccgataagagagccttcgtcgagacctggcagtccttttaccggaagaagcttaaggaggtgtggaaacctgccgtgcggtctggcggatctggcggaggctccacaagcccccagagcctgctgagcttcggcgacgtggccgtggacttcagccaggaggagtgggagtacctggactacgaccagaggaccctgtacatggacgtgatgctggagaactacagcaacctggtgttcgtggagaaccacaggatctacggcaagtacgagaaggacctggaccagggcaccaagcacatcgcccacgaggacgtgatcatccaggagaagagctacaagtgcaacgagctgaccagccccaagaaaaagagaaaagtctaagctgccttctgcggggcttgccttctggccatgcccttcttctctcccttgcacctgtacctcttggtctttgaataaagcctgagtaggaaggctagcaaaaaaaaaaaaaaaaaaaaaaaaaaaaaaaaaaaaaaaaaaaaaaaaaaaaaaaaaaaaaaaaaaaaaaaaaaaaaaaa

SEQ ID NO: 3848 - RNA, 5419 nt, synthetic construct
  source 1..5419: mol_type = other RNA
aggaaataagagagaaaagaagagtaagaagaaatataagagccaccatggcccctaagaagaagcgtaaagtgagccgggtgaacggcagcggcagcggcggcggcatgaaccacgaccaggagttcgacccccctaaggtgtaccctcccgtccccgccgagaagagaaagcccatccgggtcctgagcctgttcgatggcatcgccaccggtctgctggtgctgaaggacctgggcatccaggtggataggtacattgcctccgaggtgtgcgaggactccatcaccgtgggaatggtgcgtcatcagggcaagatcatgtacgtgggcgacgtgcggagcgtgacacagaagcatatccaggagtggggccctttcgacctggtgatcggcggcagcccttgcaatgacctgagcatcgtgaacccagcccggaagggcctgtacgagggaaccggcagactgttcttcgagttttacagactgctgcacgacgcccggcctaaggaaggcgacgaccggcccttcttttggctgttcgagaatgtggtggccatgggagtcagcgacaagcgggatattagccggttcctggagagcaaccccgtgatgatcgatgccaaggaagtgagcgccgcccaccgggccagatacttctggggcaatctgcctggcatgaacagacccctggccagcaccgtgaacgacaagctggagctgcaggagtgcctggagcacggccggatcgccaagttcagcaaggtgagaaccatcaccacccgaagcaacagcatcaaacaaggcaaggaccagcactttcctgtgttcatgaacgagaaggaggacatcctgtggtgtaccgagatggagagagtgttcgggttcccagtccactacacagatgtcagcaacatgtctagactggccagacagagactgctgggaagaagctggtccgtccctgtgatcagacacctgttcgcccctctgaaggagtacttcgcctgcgtgagcagcggcaacagcaacgccaacagccggggccccagcttctctagcggcctggtgccactgtccctgagagggagccacatgggccccatggagatctacaaaaccgtgagcgcctggaagcggcagcctgtgcgcgtgctgagcctgtttcggaatatcgataaagtcctgaaaagcctgggattcctggagagcggctctggctccggcggtggcaccctgaagtacgtggaggatgtgacaaacgtggtcagacgggatgtggagaagtggggccccttcgatctggtgtacggcagcacccaacccctgggcagctcttgtgaccggtgccctggctggtacatgtttcagttccaccggatcctgcagtacgccctgccgagacaggagtcccagcggccattcttttggattttcatggacaacttgctgctgaccgaggatgaccaggaaactaccactcggttcctgcagaccgaagccgtgaccctgcaggacgtgagaggccgggactaccagaacgccatgcgggtgtggtccaacatccctggactgaaaagcaagcacgcacctctgacccctaaagaagaggagtacctgcaggcccaggtgcggagcagaagcaagctggacgcccctaaggtggatctgctggtgaagaattgcctcctgcccctgagagagtacttcaagtatttcagccagaatagtctgcccctgggcggcccaagcagcggcgcccctcctcccagcggcggcagcccagccggctccccaacctctaccgaggagggcacctctgagtccgccacccccgagagcggccctggcacctccaccgagcccagcgagggcagcgcacccggcagccctgccggcagccccacctccacagaggagggaaccagcaccgagcccagcgaaggcagcgccccaggcaccagcaccgagcctagtgagggcggctctggcggcggcagcgcccaggagattaaacggatcaacaagatcagaagaagacttgtgaaagacagcaacaccaagaaggccggcaagacaggccccatgaaaaccctgctggttagagtgatgacacccgatctgagagagcggctggaaaacctgagaaagaagcctgaaaatatcccccagcccatcagcaatacatctagagccaacctgaataagctgctgaccgattacaccgaaatgaagaaggcgatcctgcatgtgtactgggaagagttccagaaggaccctgtgggcctgatgagccgggtggcccagcctgccagcaagaagatcgatcagaacaagctgaaacctgagatggacgagaagggcaacctgaccaccgccggctttgcctgctctcagtgtggccagcccctgttcgtgtacaagctggagcaggtgtctgagaagggcaaggcttacaccaactacttcggacggtgcaatgtggccgagcacgaaaagctgatcctgctggcccagctgaagcccgagaaggatagcgacgaagccgtgacatatagcctgggaaagtttgggcagagggccctggatttctacagcattcatgtgaccaaggagtccacccaccccgtgaagcccctggcccagatcgccggaaacagatacgcctccggacctgtgggaaaggccctgagcgacgcatgtatgggcacaatcgcctccttcctgtctaagtaccaggacatcatcatcgaacaccagaaggtggtgaagggcaaccagaagagactggagagcctgcgggagctggccggcaaggaaaacctggaataccctagcgtgaccctgccacctcagcctcacaccaaggagggcgttgatgcctacaacgaagtgatcgcccgggtgcgaatgtgggtgaacctgaacctgtggcagaagctgaagctaagcagagatgatgccaagcctctgctgagactgaagggattcccttcctttcctctggtcgagagacaggccaacgaagtggactggtgggacatggtgtgtaacgtgaagaagctgatcaacgagaaaaaggaggatggcaaggtgttttggcagaatctggctggctacaagagacaggaagccctgagaccatacctgagcagcgaggaagatcggaagaagggaaagaaattcgctcggtaccagctgggcgacctgctgctgcacctggaaaagaagcacggcgaggactggggaaaggtgtacgacgaggcctgggagcggattgacaagaaagtggaaggcctgagcaagcacatcaagctggaagaggaacggagaagcgaggacgcccagagcaaggccgccctgaccgactggctgcgggctaaggccagcttcgtgatcgagggcctgaaggaggccgacaaggacgagttctgcagatgcgagctgaagctgcagaagtggtacggggacctgcggggaaagcccttcgccatcgaagccgagaacagcatcctggacatcagcggcttcagcaagcagtacaactgtgccttcatctggcagaaggacggcgtgaagaagctgaacctgtacctgatcatcaactacttcaagggcggcaagctgcggttcaagaagatcaaacctgaagccttcgaagccaacagattctacaccgtgatcaacaaaaagagcggcgagatcgtgcccatggaggtgaacttcaacttcgacgaccccaacctgatcatcctgcctctggcctttggcaagagacagggcagagaattcatctggaacgacctgctgtccctggaaaccggcagcctgaagctggccaacggaagagtgatcgagaagacactgtacaacagaagaacccggcaggatgagcctgccctgttcgtggccctgaccttcgagcggcgggaggtcctggactcctccaatatcaaaccaatgaacctgatcggcgtggcaagaggcgaaaacatccccgccgtgatcgccctgaccgaccccgagggctgcccactgagccggtttaaggatagcctgggaaacccaacccacatcctgagaatcggcgagagctataaggagaagcagcggaccatccaggccaagaaggaggtggagcagcggagagccggcggctacagccggaagtacgccagcaaagccaagaatctggcagacgatatggtgagaaacaccgctagagatctgctgtactacgccgtgacccaggatgccatgctgatcttcgccaacctgagccggggcttcggccggcagggcaagcggaccttcatggccgagagacagtacacacggatggaggactggctgaccgccaagctggcctacgagggcctgagcaagacctacctgtccaagacactggcccagtacacctccaagacatgcagcaactgtgggtttaccatcaccagcgccgactacgacagggtgctggagaagctgaagaagacagcaacaggctggatgaccacaattaacggcaaggagctgaaggtggagggccagattacctactacaacagatacaagagacagaacgtagtcaaggacctgtccgtcgagctggatagactgagcgaagaatctgtgaacaacgacatctcctcctggacaaagggcagaagcggagaagctctgagcctcctgaagaaaagattctcccatagacccgtgcaggagaagttcgtgtgcctgaactgcggcttcgagacacacgcagccgagcaagccgccctgaacatcgccagatcctggctgttcctgcggagccaggagtacaagaaataccagacaaacaagacaaccggcaacaccgataagagagccttcgtcgagacctggcagtccttttaccggaagaagcttaaggaggtgtggaaacctgccgtgcggtctggcggatctggcggaggctccacaagcgccaggggcctggtgaccttcgaggacgtggccgtgtacttcagcagggaggagtggggcctgctgaacctgacccagaggagcctgtacagggacgtgatgctggagaacttcgccctgatcggcagcctgggcttcgcccccagcaggagccacgtggtggcccagctggagagcgaggaggagctgtgggtgcccagcatggtggacctgaccctgggcagcagggccgaggccaggaggaccagccccaagaaaaagagaaaagtctaagctgccttctgcggggcttgccttctggccatgcccttcttctctcccttgcacctgtacctcttggtctttgaataaagcctgagtaggaaggctagcaaaaaaaaaaaaaaaaaaaaaaaaaaaaaaaaaaaaaaaaaaaaaaaaaaaaaaaaaaaaaaaaaaaaaaaaaaaaaaaa

SEQ ID NO: 3849 - RNA, 5419 nt, synthetic construct
  source 1..5419: mol_type = other RNA
aggaaataagagagaaaagaagagtaagaagaaatataagagccaccatggcccctaagaagaagcgtaaagtgagccgggtgaacggcagcggcagcggcggcggcatgaaccacgaccaggagttcgacccccctaaggtgtaccctcccgtccccgccgagaagagaaagcccatccgggtcctgagcctgttcgatggcatcgccaccggtctgctggtgctgaaggacctgggcatccaggtggataggtacattgcctccgaggtgtgcgaggactccatcaccgtgggaatggtgcgtcatcagggcaagatcatgtacgtgggcgacgtgcggagcgtgacacagaagcatatccaggagtggggccctttcgacctggtgatcggcggcagcccttgcaatgacctgagcatcgtgaacccagcccggaagggcctgtacgagggaaccggcagactgttcttcgagttttacagactgctgcacgacgcccggcctaaggaaggcgacgaccggcccttcttttggctgttcgagaatgtggtggccatgggagtcagcgacaagcgggatattagccggttcctggagagcaaccccgtgatgatcgatgccaaggaagtgagcgccgcccaccgggccagatacttctggggcaatctgcctggcatgaacagacccctggccagcaccgtgaacgacaagctggagctgcaggagtgcctggagcacggccggatcgccaagttcagcaaggtgagaaccatcaccacccgaagcaacagcatcaaacaaggcaaggaccagcactttcctgtgttcatgaacgagaaggaggacatcctgtggtgtaccgagatggagagagtgttcgggttcccagtccactacacagatgtcagcaacatgtctagactggccagacagagactgctgggaagaagctggtccgtccctgtgatcagacacctgttcgcccctctgaaggagtacttcgcctgcgtgagcagcggcaacagcaacgccaacagccggggccccagcttctctagcggcctggtgccactgtccctgagagggagccacatgggccccatggagatctacaaaaccgtgagcgcctggaagcggcagcctgtgcgcgtgctgagcctgtttcggaatatcgataaagtcctgaaaagcctgggattcctggagagcggctctggctccggcggtggcaccctgaagtacgtggaggatgtgacaaacgtggtcagacgggatgtggagaagtggggccccttcgatctggtgtacggcagcacccaacccctgggcagctcttgtgaccggtgccctggctggtacatgtttcagttccaccggatcctgcagtacgccctgccgagacaggagtcccagcggccattcttttggattttcatggacaacttgctgctgaccgaggatgaccaggaaactaccactcggttcctgcagaccgaagccgtgaccctgcaggacgtgagaggccgggactaccagaacgccatgcgggtgtggtccaacatccctggactgaaaagcaagcacgcacctctgacccctaaagaagaggagtacctgcaggcccaggtgcggagcagaagcaagctggacgcccctaaggtggatctgctggtgaagaattgcctcctgcccctgagagagtacttcaagtatttcagccagaatagtctgcccctgggcggcccaagcagcggcgcccctcctcccagcggcggcagcccagccggctccccaacctctaccgaggagggcacctctgagtccgccacccccgagagcggccctggcacctccaccgagcccagcgagggcagcgcacccggcagccctgccggcagccccacctccacagaggagggaaccagcaccgagcccagcgaaggcagcgccccaggcaccagcaccgagcctagtgagggcggctctggcggcggcagcgcccaggagattaaacggatcaacaagatcagaagaagacttgtgaaagacagcaacaccaagaaggccggcaagacaggccccatgaaaaccctgctggttagagtgatgacacccgatctgagagagcggctggaaaacctgagaaagaagcctgaaaatatcccccagcccatcagcaatacatctagagccaacctgaataagctgctgaccgattacaccgaaatgaagaaggcgatcctgcatgtgtactgggaagagttccagaaggaccctgtgggcctgatgagccgggtggcccagcctgccagcaagaagatcgatcagaacaagctgaaacctgagatggacgagaagggcaacctgaccaccgccggctttgcctgctctcagtgtggccagcccctgttcgtgtacaagctggagcaggtgtctgagaagggcaaggcttacaccaactacttcggacggtgcaatgtggccgagcacgaaaagctgatcctgctggcccagctgaagcccgagaaggatagcgacgaagccgtgacatatagcctgggaaagtttgggcagagggccctggatttctacagcattcatgtgaccaaggagtccacccaccccgtgaagcccctggcccagatcgccggaaacagatacgcctccggacctgtgggaaaggccctgagcgacgcatgtatgggcacaatcgcctccttcctgtctaagtaccaggacatcatcatcgaacaccagaaggtggtgaagggcaaccagaagagactggagagcctgcgggagctggccggcaaggaaaacctggaataccctagcgtgaccctgccacctcagcctcacaccaaggagggcgttgatgcctacaacgaagtgatcgcccgggtgcgaatgtgggtgaacctgaacctgtggcagaagctgaagctaagcagagatgatgccaagcctctgctgagactgaagggattcccttcctttcctctggtcgagagacaggccaacgaagtggactggtgggacatggtgtgtaacgtgaagaagctgatcaacgagaaaaaggaggatggcaaggtgttttggcagaatctggctggctacaagagacaggaagccctgagaccatacctgagcagcgaggaagatcggaagaagggaaagaaattcgctcggtaccagctgggcgacctgctgctgcacctggaaaagaagcacggcgaggactggggaaaggtgtacgacgaggcctgggagcggattgacaagaaagtggaaggcctgagcaagcacatcaagctggaagaggaacggagaagcgaggacgcccagagcaaggccgccctgaccgactggctgcgggctaaggccagcttcgtgatcgagggcctgaaggaggccgacaaggacgagttctgcagatgcgagctgaagctgcagaagtggtacggggacctgcggggaaagcccttcgccatcgaagccgagaacagcatcctggacatcagcggcttcagcaagcagtacaactgtgccttcatctggcagaaggacggcgtgaagaagctgaacctgtacctgatcatcaactacttcaagggcggcaagctgcggttcaagaagatcaaacctgaagccttcgaagccaacagattctacaccgtgatcaacaaaaagagcggcgagatcgtgcccatggaggtgaacttcaacttcgacgaccccaacctgatcatcctgcctctggcctttggcaagagacagggcagagaattcatctggaacgacctgctgtccctggaaaccggcagcctgaagctggccaacggaagagtgatcgagaagacactgtacaacagaagaacccggcaggatgagcctgccctgttcgtggccctgaccttcgagcggcgggaggtcctggactcctccaatatcaaaccaatgaacctgatcggcgtggcaagaggcgaaaacatccccgccgtgatcgccctgaccgaccccgagggctgcccactgagccggtttaaggatagcctgggaaacccaacccacatcctgagaatcggcgagagctataaggagaagcagcggaccatccaggccaagaaggaggtggagcagcggagagccggcggctacagccggaagtacgccagcaaagccaagaatctggcagacgatatggtgagaaacaccgctagagatctgctgtactacgccgtgacccaggatgccatgctgatcttcgccaacctgagccggggcttcggccggcagggcaagcggaccttcatggccgagagacagtacacacggatggaggactggctgaccgccaagctggcctacgagggcctgagcaagacctacctgtccaagacactggcccagtacacctccaagacatgcagcaactgtgggtttaccatcaccagcgccgactacgacagggtgctggagaagctgaagaagacagcaacaggctggatgaccacaattaacggcaaggagctgaaggtggagggccagattacctactacaacagatacaagagacagaacgtagtcaaggacctgtccgtcgagctggatagactgagcgaagaatctgtgaacaacgacatctcctcctggacaaagggcagaagcggagaagctctgagcctcctgaagaaaagattctcccatagacccgtgcaggagaagttcgtgtgcctgaactgcggcttcgagacacacgcagccgagcaagccgccctgaacatcgccagatcctggctgttcctgcggagccaggagtacaagaaataccagacaaacaagacaaccggcaacaccgataagagagccttcgtcgagacctggcagtccttttaccggaagaagcttaaggaggtgtggaaacctgccgtgcggtctggcggatctggcggaggctccacaagcccccaggagagcgtgaccttcaaggacgtggccgtggacttcacctgggaggagtggggctacctggacaccagccagaaggagctgtactgggaggtgatgctggagaactacaggaacctggtgagcctgggcctggccgacagcaacgtggacatgatcagccagctggagagcggcgaggcccagggcatccccgtggacagcgtgctgaccagctgctggcccgacggcgacaggaggaccagccccaagaaaaagagaaaagtctaagctgccttctgcggggcttgccttctggccatgcccttcttctctcccttgcacctgtacctcttggtctttgaataaagcctgagtaggaaggctagcaaaaaaaaaaaaaaaaaaaaaaaaaaaaaaaaaaaaaaaaaaaaaaaaaaaaaaaaaaaaaaaaaaaaaaaaaaaaaaaa

SEQ ID NO: 3850 - RNA, 5419 nt, synthetic construct
  source 1..5419: mol_type = other RNA
aggaaataagagagaaaagaagagtaagaagaaatataagagccaccatggcccctaagaagaagcgtaaagtgagccgggtgaacggcagcggcagcggcggcggcatgaaccacgaccaggagttcgacccccctaaggtgtaccctcccgtccccgccgagaagagaaagcccatccgggtcctgagcctgttcgatggcatcgccaccggtctgctggtgctgaaggacctgggcatccaggtggataggtacattgcctccgaggtgtgcgaggactccatcaccgtgggaatggtgcgtcatcagggcaagatcatgtacgtgggcgacgtgcggagcgtgacacagaagcatatccaggagtggggccctttcgacctggtgatcggcggcagcccttgcaatgacctgagcatcgtgaacccagcccggaagggcctgtacgagggaaccggcagactgttcttcgagttttacagactgctgcacgacgcccggcctaaggaaggcgacgaccggcccttcttttggctgttcgagaatgtggtggccatgggagtcagcgacaagcgggatattagccggttcctggagagcaaccccgtgatgatcgatgccaaggaagtgagcgccgcccaccgggccagatacttctggggcaatctgcctggcatgaacagacccctggccagcaccgtgaacgacaagctggagctgcaggagtgcctggagcacggccggatcgccaagttcagcaaggtgagaaccatcaccacccgaagcaacagcatcaaacaaggcaaggaccagcactttcctgtgttcatgaacgagaaggaggacatcctgtggtgtaccgagatggagagagtgttcgggttcccagtccactacacagatgtcagcaacatgtctagactggccagacagagactgctgggaagaagctggtccgtccctgtgatcagacacctgttcgcccctctgaaggagtacttcgcctgcgtgagcagcggcaacagcaacgccaacagccggggccccagcttctctagcggcctggtgccactgtccctgagagggagccacatgggccccatggagatctacaaaaccgtgagcgcctggaagcggcagcctgtgcgcgtgctgagcctgtttcggaatatcgataaagtcctgaaaagcctgggattcctggagagcggctctggctccggcggtggcaccctgaagtacgtggaggatgtgacaaacgtggtcagacgggatgtggagaagtggggccccttcgatctggtgtacggcagcacccaacccctgggcagctcttgtgaccggtgccctggctggtacatgtttcagttccaccggatcctgcagtacgccctgccgagacaggagtcccagcggccattcttttggattttcatggacaacttgctgctgaccgaggatgaccaggaaactaccactcggttcctgcagaccgaagccgtgaccctgcaggacgtgagaggccgggactaccagaacgccatgcgggtgtggtccaacatccctggactgaaaagcaagcacgcacctctgacccctaaagaagaggagtacctgcaggcccaggtgcggagcagaagcaagctggacgcccctaaggtggatctgctggtgaagaattgcctcctgcccctgagagagtacttcaagtatttcagccagaatagtctgcccctgggcggcccaagcagcggcgcccctcctcccagcggcggcagcccagccggctccccaacctctaccgaggagggcacctctgagtccgccacccccgagagcggccctggcacctccaccgagcccagcgagggcagcgcacccggcagccctgccggcagccccacctccacagaggagggaaccagcaccgagcccagcgaaggcagcgccccaggcaccagcaccgagcctagtgagggcggctctggcggcggcagcgcccaggagattaaacggatcaacaagatcagaagaagacttgtgaaagacagcaacaccaagaaggccggcaagacaggccccatgaaaaccctgctggttagagtgatgacacccgatctgagagagcggctggaaaacctgagaaagaagcctgaaaatatcccccagcccatcagcaatacatctagagccaacctgaataagctgctgaccgattacaccgaaatgaagaaggcgatcctgcatgtgtactgggaagagttccagaaggaccctgtgggcctgatgagccgggtggcccagcctgccagcaagaagatcgatcagaacaagctgaaacctgagatggacgagaagggcaacctgaccaccgccggctttgcctgctctcagtgtggccagcccctgttcgtgtacaagctggagcaggtgtctgagaagggcaaggcttacaccaactacttcggacggtgcaatgtggccgagcacgaaaagctgatcctgctggcccagctgaagcccgagaaggatagcgacgaagccgtgacatatagcctgggaaagtttgggcagagggccctggatttctacagcattcatgtgaccaaggagtccacccaccccgtgaagcccctggcccagatcgccggaaacagatacgcctccggacctgtgggaaaggccctgagcgacgcatgtatgggcacaatcgcctccttcctgtctaagtaccaggacatcatcatcgaacaccagaaggtggtgaagggcaaccagaagagactggagagcctgcgggagctggccggcaaggaaaacctggaataccctagcgtgaccctgccacctcagcctcacaccaaggagggcgttgatgcctacaacgaagtgatcgcccgggtgcgaatgtgggtgaacctgaacctgtggcagaagctgaagctaagcagagatgatgccaagcctctgctgagactgaagggattcccttcctttcctctggtcgagagacaggccaacgaagtggactggtgggacatggtgtgtaacgtgaagaagctgatcaacgagaaaaaggaggatggcaaggtgttttggcagaatctggctggctacaagagacaggaagccctgagaccatacctgagcagcgaggaagatcggaagaagggaaagaaattcgctcggtaccagctgggcgacctgctgctgcacctggaaaagaagcacggcgaggactggggaaaggtgtacgacgaggcctgggagcggattgacaagaaagtggaaggcctgagcaagcacatcaagctggaagaggaacggagaagcgaggacgcccagagcaaggccgccctgaccgactggctgcgggctaaggccagcttcgtgatcgagggcctgaaggaggccgacaaggacgagttctgcagatgcgagctgaagctgcagaagtggtacggggacctgcggggaaagcccttcgccatcgaagccgagaacagcatcctggacatcagcggcttcagcaagcagtacaactgtgccttcatctggcagaaggacggcgtgaagaagctgaacctgtacctgatcatcaactacttcaagggcggcaagctgcggttcaagaagatcaaacctgaagccttcgaagccaacagattctacaccgtgatcaacaaaaagagcggcgagatcgtgcccatggaggtgaacttcaacttcgacgaccccaacctgatcatcctgcctctggcctttggcaagagacagggcagagaattcatctggaacgacctgctgtccctggaaaccggcagcctgaagctggccaacggaagagtgatcgagaagacactgtacaacagaagaacccggcaggatgagcctgccctgttcgtggccctgaccttcgagcggcgggaggtcctggactcctccaatatcaaaccaatgaacctgatcggcgtggcaagaggcgaaaacatccccgccgtgatcgccctgaccgaccccgagggctgcccactgagccggtttaaggatagcctgggaaacccaacccacatcctgagaatcggcgagagctataaggagaagcagcggaccatccaggccaagaaggaggtggagcagcggagagccggcggctacagccggaagtacgccagcaaagccaagaatctggcagacgatatggtgagaaacaccgctagagatctgctgtactacgccgtgacccaggatgccatgctgatcttcgccaacctgagccggggcttcggccggcagggcaagcggaccttcatggccgagagacagtacacacggatggaggactggctgaccgccaagctggcctacgagggcctgagcaagacctacctgtccaagacactggcccagtacacctccaagacatgcagcaactgtgggtttaccatcaccagcgccgactacgacagggtgctggagaagctgaagaagacagcaacaggctggatgaccacaattaacggcaaggagctgaaggtggagggccagattacctactacaacagatacaagagacagaacgtagtcaaggacctgtccgtcgagctggatagactgagcgaagaatctgtgaacaacgacatctcctcctggacaaagggcagaagcggagaagctctgagcctcctgaagaaaagattctcccatagacccgtgcaggagaagttcgtgtgcctgaactgcggcttcgagacacacgcagccgagcaagccgccctgaacatcgccagatcctggctgttcctgcggagccaggagtacaagaaataccagacaaacaagacaaccggcaacaccgataagagagccttcgtcgagacctggcagtccttttaccggaagaagcttaaggaggtgtggaaacctgccgtgcggtctggcggatctggcggaggctccacaagcgcccaggtgctggtgaccttccaggacgtggccgtggacttcacccaggaggagtggaggctgctggacctgggccagaaggagctgtacaaggaggtgatgctggagaacgtgcagaacatgctgttcctgggcctgcccgtgcccagggaggactggatcagccacttcgaccagggcagggccccctggatgctggagggcgagggccccagcaacagcaggctggacggccagaggaggaccagccccaagaaaaagagaaaagtctaagctgccttctgcggggcttgccttctggccatgcccttcttctctcccttgcacctgtacctcttggtctttgaataaagcctgagtaggaaggctagcaaaaaaaaaaaaaaaaaaaaaaaaaaaaaaaaaaaaaaaaaaaaaaaaaaaaaaaaaaaaaaaaaaaaaaaaaaaaaaaa

SEQ ID NO: 3851 - RNA, 5419 nt, synthetic construct
  source 1..5419: mol_type = other RNA
aggaaataagagagaaaagaagagtaagaagaaatataagagccaccatggcccctaagaagaagcgtaaagtgagccgggtgaacggcagcggcagcggcggcggcatgaaccacgaccaggagttcgacccccctaaggtgtaccctcccgtccccgccgagaagagaaagcccatccgggtcctgagcctgttcgatggcatcgccaccggtctgctggtgctgaaggacctgggcatccaggtggataggtacattgcctccgaggtgtgcgaggactccatcaccgtgggaatggtgcgtcatcagggcaagatcatgtacgtgggcgacgtgcggagcgtgacacagaagcatatccaggagtggggccctttcgacctggtgatcggcggcagcccttgcaatgacctgagcatcgtgaacccagcccggaagggcctgtacgagggaaccggcagactgttcttcgagttttacagactgctgcacgacgcccggcctaaggaaggcgacgaccggcccttcttttggctgttcgagaatgtggtggccatgggagtcagcgacaagcgggatattagccggttcctggagagcaaccccgtgatgatcgatgccaaggaagtgagcgccgcccaccgggccagatacttctggggcaatctgcctggcatgaacagacccctggccagcaccgtgaacgacaagctggagctgcaggagtgcctggagcacggccggatcgccaagttcagcaaggtgagaaccatcaccacccgaagcaacagcatcaaacaaggcaaggaccagcactttcctgtgttcatgaacgagaaggaggacatcctgtggtgtaccgagatggagagagtgttcgggttcccagtccactacacagatgtcagcaacatgtctagactggccagacagagactgctgggaagaagctggtccgtccctgtgatcagacacctgttcgcccctctgaaggagtacttcgcctgcgtgagcagcggcaacagcaacgccaacagccggggccccagcttctctagcggcctggtgccactgtccctgagagggagccacatgggccccatggagatctacaaaaccgtgagcgcctggaagcggcagcctgtgcgcgtgctgagcctgtttcggaatatcgataaagtcctgaaaagcctgggattcctggagagcggctctggctccggcggtggcaccctgaagtacgtggaggatgtgacaaacgtggtcagacgggatgtggagaagtggggccccttcgatctggtgtacggcagcacccaacccctgggcagctcttgtgaccggtgccctggctggtacatgtttcagttccaccggatcctgcagtacgccctgccgagacaggagtcccagcggccattcttttggattttcatggacaacttgctgctgaccgaggatgaccaggaaactaccactcggttcctgcagaccgaagccgtgaccctgcaggacgtgagaggccgggactaccagaacgccatgcgggtgtggtccaacatccctggactgaaaagcaagcacgcacctctgacccctaaagaagaggagtacctgcaggcccaggtgcggagcagaagcaagctggacgcccctaaggtggatctgctggtgaagaattgcctcctgcccctgagagagtacttcaagtatttcagccagaatagtctgcccctgggcggcccaagcagcggcgcccctcctcccagcggcggcagcccagccggctccccaacctctaccgaggagggcacctctgagtccgccacccccgagagcggccctggcacctccaccgagcccagcgagggcagcgcacccggcagccctgccggcagccccacctccacagaggagggaaccagcaccgagcccagcgaaggcagcgccccaggcaccagcaccgagcctagtgagggcggctctggcggcggcagcgcccaggagattaaacggatcaacaagatcagaagaagacttgtgaaagacagcaacaccaagaaggccggcaagacaggccccatgaaaaccctgctggttagagtgatgacacccgatctgagagagcggctggaaaacctgagaaagaagcctgaaaatatcccccagcccatcagcaatacatctagagccaacctgaataagctgctgaccgattacaccgaaatgaagaaggcgatcctgcatgtgtactgggaagagttccagaaggaccctgtgggcctgatgagccgggtggcccagcctgccagcaagaagatcgatcagaacaagctgaaacctgagatggacgagaagggcaacctgaccaccgccggctttgcctgctctcagtgtggccagcccctgttcgtgtacaagctggagcaggtgtctgagaagggcaaggcttacaccaactacttcggacggtgcaatgtggccgagcacgaaaagctgatcctgctggcccagctgaagcccgagaaggatagcgacgaagccgtgacatatagcctgggaaagtttgggcagagggccctggatttctacagcattcatgtgaccaaggagtccacccaccccgtgaagcccctggcccagatcgccggaaacagatacgcctccggacctgtgggaaaggccctgagcgacgcatgtatgggcacaatcgcctccttcctgtctaagtaccaggacatcatcatcgaacaccagaaggtggtgaagggcaaccagaagagactggagagcctgcgggagctggccggcaaggaaaacctggaataccctagcgtgaccctgccacctcagcctcacaccaaggagggcgttgatgcctacaacgaagtgatcgcccgggtgcgaatgtgggtgaacctgaacctgtggcagaagctgaagctaagcagagatgatgccaagcctctgctgagactgaagggattcccttcctttcctctggtcgagagacaggccaacgaagtggactggtgggacatggtgtgtaacgtgaagaagctgatcaacgagaaaaaggaggatggcaaggtgttttggcagaatctggctggctacaagagacaggaagccctgagaccatacctgagcagcgaggaagatcggaagaagggaaagaaattcgctcggtaccagctgggcgacctgctgctgcacctggaaaagaagcacggcgaggactggggaaaggtgtacgacgaggcctgggagcggattgacaagaaagtggaaggcctgagcaagcacatcaagctggaagaggaacggagaagcgaggacgcccagagcaaggccgccctgaccgactggctgcgggctaaggccagcttcgtgatcgagggcctgaaggaggccgacaaggacgagttctgcagatgcgagctgaagctgcagaagtggtacggggacctgcggggaaagcccttcgccatcgaagccgagaacagcatcctggacatcagcggcttcagcaagcagtacaactgtgccttcatctggcagaaggacggcgtgaagaagctgaacctgtacctgatcatcaactacttcaagggcggcaagctgcggttcaagaagatcaaacctgaagccttcgaagccaacagattctacaccgtgatcaacaaaaagagcggcgagatcgtgcccatggaggtgaacttcaacttcgacgaccccaacctgatcatcctgcctctggcctttggcaagagacagggcagagaattcatctggaacgacctgctgtccctggaaaccggcagcctgaagctggccaacggaagagtgatcgagaagacactgtacaacagaagaacccggcaggatgagcctgccctgttcgtggccctgaccttcgagcggcgggaggtcctggactcctccaatatcaaaccaatgaacctgatcggcgtggcaagaggcgaaaacatccccgccgtgatcgccctgaccgaccccgagggctgcccactgagccggtttaaggatagcctgggaaacccaacccacatcctgagaatcggcgagagctataaggagaagcagcggaccatccaggccaagaaggaggtggagcagcggagagccggcggctacagccggaagtacgccagcaaagccaagaatctggcagacgatatggtgagaaacaccgctagagatctgctgtactacgccgtgacccaggatgccatgctgatcttcgccaacctgagccggggcttcggccggcagggcaagcggaccttcatggccgagagacagtacacacggatggaggactggctgaccgccaagctggcctacgagggcctgagcaagacctacctgtccaagacactggcccagtacacctccaagacatgcagcaactgtgggtttaccatcaccagcgccgactacgacagggtgctggagaagctgaagaagacagcaacaggctggatgaccacaattaacggcaaggagctgaaggtggagggccagattacctactacaacagatacaagagacagaacgtagtcaaggacctgtccgtcgagctggatagactgagcgaagaatctgtgaacaacgacatctcctcctggacaaagggcagaagcggagaagctctgagcctcctgaagaaaagattctcccatagacccgtgcaggagaagttcgtgtgcctgaactgcggcttcgagacacacgcagccgagcaagccgccctgaacatcgccagatcctggctgttcctgcggagccaggagtacaagaaataccagacaaacaagacaaccggcaacaccgataagagagccttcgtcgagacctggcagtccttttaccggaagaagcttaaggaggtgtggaaacctgccgtgcggtctggcggatctggcggaggctccacaagcatgcccctgaaggccaggtaccaggagatggtgaccttcgaggacgtggccgtgcacttcaccaagaccgagtggaccggcctgagccccgcccagagggccctgtacaggagcgtgatgctggagaacttcggcaacctgaccgccctgggctaccccgtgcccaagcccgccctgatcagcctgctggagggcggcgacatggactggggcctggaggcccaggacgacccccccgccgagaccagccccaagaaaaagagaaaagtctaagctgccttctgcggggcttgccttctggccatgcccttcttctctcccttgcacctgtacctcttggtctttgaataaagcctgagtaggaaggctagcaaaaaaaaaaaaaaaaaaaaaaaaaaaaaaaaaaaaaaaaaaaaaaaaaaaaaaaaaaaaaaaaaaaaaaaaaaaaaaaa

SEQ ID NO: 3852 - RNA, 5419 nt, synthetic construct
  source 1..5419: mol_type = other RNA
aggaaataagagagaaaagaagagtaagaagaaatataagagccaccatggcccctaagaagaagcgtaaagtgagccgggtgaacggcagcggcagcggcggcggcatgaaccacgaccaggagttcgacccccctaaggtgtaccctcccgtccccgccgagaagagaaagcccatccgggtcctgagcctgttcgatggcatcgccaccggtctgctggtgctgaaggacctgggcatccaggtggataggtacattgcctccgaggtgtgcgaggactccatcaccgtgggaatggtgcgtcatcagggcaagatcatgtacgtgggcgacgtgcggagcgtgacacagaagcatatccaggagtggggccctttcgacctggtgatcggcggcagcccttgcaatgacctgagcatcgtgaacccagcccggaagggcctgtacgagggaaccggcagactgttcttcgagttttacagactgctgcacgacgcccggcctaaggaaggcgacgaccggcccttcttttggctgttcgagaatgtggtggccatgggagtcagcgacaagcgggatattagccggttcctggagagcaaccccgtgatgatcgatgccaaggaagtgagcgccgcccaccgggccagatacttctggggcaatctgcctggcatgaacagacccctggccagcaccgtgaacgacaagctggagctgcaggagtgcctggagcacggccggatcgccaagttcagcaaggtgagaaccatcaccacccgaagcaacagcatcaaacaaggcaaggaccagcactttcctgtgttcatgaacgagaaggaggacatcctgtggtgtaccgagatggagagagtgttcgggttcccagtccactacacagatgtcagcaacatgtctagactggccagacagagactgctgggaagaagctggtccgtccctgtgatcagacacctgttcgcccctctgaaggagtacttcgcctgcgtgagcagcggcaacagcaacgccaacagccggggccccagcttctctagcggcctggtgccactgtccctgagagggagccacatgggccccatggagatctacaaaaccgtgagcgcctggaagcggcagcctgtgcgcgtgctgagcctgtttcggaatatcgataaagtcctgaaaagcctgggattcctggagagcggctctggctccggcggtggcaccctgaagtacgtggaggatgtgacaaacgtggtcagacgggatgtggagaagtggggccccttcgatctggtgtacggcagcacccaacccctgggcagctcttgtgaccggtgccctggctggtacatgtttcagttccaccggatcctgcagtacgccctgccgagacaggagtcccagcggccattcttttggattttcatggacaacttgctgctgaccgaggatgaccaggaaactaccactcggttcctgcagaccgaagccgtgaccctgcaggacgtgagaggccgggactaccagaacgccatgcgggtgtggtccaacatccctggactgaaaagcaagcacgcacctctgacccctaaagaagaggagtacctgcaggcccaggtgcggagcagaagcaagctggacgcccctaaggtggatctgctggtgaagaattgcctcctgcccctgagagagtacttcaagtatttcagccagaatagtctgcccctgggcggcccaagcagcggcgcccctcctcccagcggcggcagcccagccggctccccaacctctaccgaggagggcacctctgagtccgccacccccgagagcggccctggcacctccaccgagcccagcgagggcagcgcacccggcagccctgccggcagccccacctccacagaggagggaaccagcaccgagcccagcgaaggcagcgccccaggcaccagcaccgagcctagtgagggcggctctggcggcggcagcgcccaggagattaaacggatcaacaagatcagaagaagacttgtgaaagacagcaacaccaagaaggccggcaagacaggccccatgaaaaccctgctggttagagtgatgacacccgatctgagagagcggctggaaaacctgagaaagaagcctgaaaatatcccccagcccatcagcaatacatctagagccaacctgaataagctgctgaccgattacaccgaaatgaagaaggcgatcctgcatgtgtactgggaagagttccagaaggaccctgtgggcctgatgagccgggtggcccagcctgccagcaagaagatcgatcagaacaagctgaaacctgagatggacgagaagggcaacctgaccaccgccggctttgcctgctctcagtgtggccagcccctgttcgtgtacaagctggagcaggtgtctgagaagggcaaggcttacaccaactacttcggacggtgcaatgtggccgagcacgaaaagctgatcctgctggcccagctgaagcccgagaaggatagcgacgaagccgtgacatatagcctgggaaagtttgggcagagggccctggatttctacagcattcatgtgaccaaggagtccacccaccccgtgaagcccctggcccagatcgccggaaacagatacgcctccggacctgtgggaaaggccctgagcgacgcatgtatgggcacaatcgcctccttcctgtctaagtaccaggacatcatcatcgaacaccagaaggtggtgaagggcaaccagaagagactggagagcctgcgggagctggccggcaaggaaaacctggaataccctagcgtgaccctgccacctcagcctcacaccaaggagggcgttgatgcctacaacgaagtgatcgcccgggtgcgaatgtgggtgaacctgaacctgtggcagaagctgaagctaagcagagatgatgccaagcctctgctgagactgaagggattcccttcctttcctctggtcgagagacaggccaacgaagtggactggtgggacatggtgtgtaacgtgaagaagctgatcaacgagaaaaaggaggatggcaaggtgttttggcagaatctggctggctacaagagacaggaagccctgagaccatacctgagcagcgaggaagatcggaagaagggaaagaaattcgctcggtaccagctgggcgacctgctgctgcacctggaaaagaagcacggcgaggactggggaaaggtgtacgacgaggcctgggagcggattgacaagaaagtggaaggcctgagcaagcacatcaagctggaagaggaacggagaagcgaggacgcccagagcaaggccgccctgaccgactggctgcgggctaaggccagcttcgtgatcgagggcctgaaggaggccgacaaggacgagttctgcagatgcgagctgaagctgcagaagtggtacggggacctgcggggaaagcccttcgccatcgaagccgagaacagcatcctggacatcagcggcttcagcaagcagtacaactgtgccttcatctggcagaaggacggcgtgaagaagctgaacctgtacctgatcatcaactacttcaagggcggcaagctgcggttcaagaagatcaaacctgaagccttcgaagccaacagattctacaccgtgatcaacaaaaagagcggcgagatcgtgcccatggaggtgaacttcaacttcgacgaccccaacctgatcatcctgcctctggcctttggcaagagacagggcagagaattcatctggaacgacctgctgtccctggaaaccggcagcctgaagctggccaacggaagagtgatcgagaagacactgtacaacagaagaacccggcaggatgagcctgccctgttcgtggccctgaccttcgagcggcgggaggtcctggactcctccaatatcaaaccaatgaacctgatcggcgtggcaagaggcgaaaacatccccgccgtgatcgccctgaccgaccccgagggctgcccactgagccggtttaaggatagcctgggaaacccaacccacatcctgagaatcggcgagagctataaggagaagcagcggaccatccaggccaagaaggaggtggagcagcggagagccggcggctacagccggaagtacgccagcaaagccaagaatctggcagacgatatggtgagaaacaccgctagagatctgctgtactacgccgtgacccaggatgccatgctgatcttcgccaacctgagccggggcttcggccggcagggcaagcggaccttcatggccgagagacagtacacacggatggaggactggctgaccgccaagctggcctacgagggcctgagcaagacctacctgtccaagacactggcccagtacacctccaagacatgcagcaactgtgggtttaccatcaccagcgccgactacgacagggtgctggagaagctgaagaagacagcaacaggctggatgaccacaattaacggcaaggagctgaaggtggagggccagattacctactacaacagatacaagagacagaacgtagtcaaggacctgtccgtcgagctggatagactgagcgaagaatctgtgaacaacgacatctcctcctggacaaagggcagaagcggagaagctctgagcctcctgaagaaaagattctcccatagacccgtgcaggagaagttcgtgtgcctgaactgcggcttcgagacacacgcagccgagcaagccgccctgaacatcgccagatcctggctgttcctgcggagccaggagtacaagaaataccagacaaacaagacaaccggcaacaccgataagagagccttcgtcgagacctggcagtccttttaccggaagaagcttaaggaggtgtggaaacctgccgtgcggtctggcggatctggcggaggctccacaagcgagctggtgaccttcagggacgtggtgatcagcttcagccaggaggagtgggagtacctggacagcgcccagagggacctgtactgggacgtgatgatggagaactacagcaacctggtgagcctggacctggagagcaagtacgacaagaagaccctgagcaccgagaaggacatcatcgagaagaacgacagccagtgggaggtgatcgagagcagcaagctggtgggcctggccaacagcaccagccccaagaaaaagagaaaagtctaagctgccttctgcggggcttgccttctggccatgcccttcttctctcccttgcacctgtacctcttggtctttgaataaagcctgagtaggaaggctagcaaaaaaaaaaaaaaaaaaaaaaaaaaaaaaaaaaaaaaaaaaaaaaaaaaaaaaaaaaaaaaaaaaaaaaaaaaaaaaaa

SEQ ID NO: 3853 - RNA, 5419 nt, synthetic construct
  source 1..5419: mol_type = other RNA
aggaaataagagagaaaagaagagtaagaagaaatataagagccaccatggcccctaagaagaagcgtaaagtgagccgggtgaacggcagcggcagcggcggcggcatgaaccacgaccaggagttcgacccccctaaggtgtaccctcccgtccccgccgagaagagaaagcccatccgggtcctgagcctgttcgatggcatcgccaccggtctgctggtgctgaaggacctgggcatccaggtggataggtacattgcctccgaggtgtgcgaggactccatcaccgtgggaatggtgcgtcatcagggcaagatcatgtacgtgggcgacgtgcggagcgtgacacagaagcatatccaggagtggggccctttcgacctggtgatcggcggcagcccttgcaatgacctgagcatcgtgaacccagcccggaagggcctgtacgagggaaccggcagactgttcttcgagttttacagactgctgcacgacgcccggcctaaggaaggcgacgaccggcccttcttttggctgttcgagaatgtggtggccatgggagtcagcgacaagcgggatattagccggttcctggagagcaaccccgtgatgatcgatgccaaggaagtgagcgccgcccaccgggccagatacttctggggcaatctgcctggcatgaacagacccctggccagcaccgtgaacgacaagctggagctgcaggagtgcctggagcacggccggatcgccaagttcagcaaggtgagaaccatcaccacccgaagcaacagcatcaaacaaggcaaggaccagcactttcctgtgttcatgaacgagaaggaggacatcctgtggtgtaccgagatggagagagtgttcgggttcccagtccactacacagatgtcagcaacatgtctagactggccagacagagactgctgggaagaagctggtccgtccctgtgatcagacacctgttcgcccctctgaaggagtacttcgcctgcgtgagcagcggcaacagcaacgccaacagccggggccccagcttctctagcggcctggtgccactgtccctgagagggagccacatgggccccatggagatctacaaaaccgtgagcgcctggaagcggcagcctgtgcgcgtgctgagcctgtttcggaatatcgataaagtcctgaaaagcctgggattcctggagagcggctctggctccggcggtggcaccctgaagtacgtggaggatgtgacaaacgtggtcagacgggatgtggagaagtggggccccttcgatctggtgtacggcagcacccaacccctgggcagctcttgtgaccggtgccctggctggtacatgtttcagttccaccggatcctgcagtacgccctgccgagacaggagtcccagcggccattcttttggattttcatggacaacttgctgctgaccgaggatgaccaggaaactaccactcggttcctgcagaccgaagccgtgaccctgcaggacgtgagaggccgggactaccagaacgccatgcgggtgtggtccaacatccctggactgaaaagcaagcacgcacctctgacccctaaagaagaggagtacctgcaggcccaggtgcggagcagaagcaagctggacgcccctaaggtggatctgctggtgaagaattgcctcctgcccctgagagagtacttcaagtatttcagccagaatagtctgcccctgggcggcccaagcagcggcgcccctcctcccagcggcggcagcccagccggctccccaacctctaccgaggagggcacctctgagtccgccacccccgagagcggccctggcacctccaccgagcccagcgagggcagcgcacccggcagccctgccggcagccccacctccacagaggagggaaccagcaccgagcccagcgaaggcagcgccccaggcaccagcaccgagcctagtgagggcggctctggcggcggcagcgcccaggagattaaacggatcaacaagatcagaagaagacttgtgaaagacagcaacaccaagaaggccggcaagacaggccccatgaaaaccctgctggttagagtgatgacacccgatctgagagagcggctggaaaacctgagaaagaagcctgaaaatatcccccagcccatcagcaatacatctagagccaacctgaataagctgctgaccgattacaccgaaatgaagaaggcgatcctgcatgtgtactgggaagagttccagaaggaccctgtgggcctgatgagccgggtggcccagcctgccagcaagaagatcgatcagaacaagctgaaacctgagatggacgagaagggcaacctgaccaccgccggctttgcctgctctcagtgtggccagcccctgttcgtgtacaagctggagcaggtgtctgagaagggcaaggcttacaccaactacttcggacggtgcaatgtggccgagcacgaaaagctgatcctgctggcccagctgaagcccgagaaggatagcgacgaagccgtgacatatagcctgggaaagtttgggcagagggccctggatttctacagcattcatgtgaccaaggagtccacccaccccgtgaagcccctggcccagatcgccggaaacagatacgcctccggacctgtgggaaaggccctgagcgacgcatgtatgggcacaatcgcctccttcctgtctaagtaccaggacatcatcatcgaacaccagaaggtggtgaagggcaaccagaagagactggagagcctgcgggagctggccggcaaggaaaacctggaataccctagcgtgaccctgccacctcagcctcacaccaaggagggcgttgatgcctacaacgaagtgatcgcccgggtgcgaatgtgggtgaacctgaacctgtggcagaagctgaagctaagcagagatgatgccaagcctctgctgagactgaagggattcccttcctttcctctggtcgagagacaggccaacgaagtggactggtgggacatggtgtgtaacgtgaagaagctgatcaacgagaaaaaggaggatggcaaggtgttttggcagaatctggctggctacaagagacaggaagccctgagaccatacctgagcagcgaggaagatcggaagaagggaaagaaattcgctcggtaccagctgggcgacctgctgctgcacctggaaaagaagcacggcgaggactggggaaaggtgtacgacgaggcctgggagcggattgacaagaaagtggaaggcctgagcaagcacatcaagctggaagaggaacggagaagcgaggacgcccagagcaaggccgccctgaccgactggctgcgggctaaggccagcttcgtgatcgagggcctgaaggaggccgacaaggacgagttctgcagatgcgagctgaagctgcagaagtggtacggggacctgcggggaaagcccttcgccatcgaagccgagaacagcatcctggacatcagcggcttcagcaagcagtacaactgtgccttcatctggcagaaggacggcgtgaagaagctgaacctgtacctgatcatcaactacttcaagggcggcaagctgcggttcaagaagatcaaacctgaagccttcgaagccaacagattctacaccgtgatcaacaaaaagagcggcgagatcgtgcccatggaggtgaacttcaacttcgacgaccccaacctgatcatcctgcctctggcctttggcaagagacagggcagagaattcatctggaacgacctgctgtccctggaaaccggcagcctgaagctggccaacggaagagtgatcgagaagacactgtacaacagaagaacccggcaggatgagcctgccctgttcgtggccctgaccttcgagcggcgggaggtcctggactcctccaatatcaaaccaatgaacctgatcggcgtggcaagaggcgaaaacatccccgccgtgatcgccctgaccgaccccgagggctgcccactgagccggtttaaggatagcctgggaaacccaacccacatcctgagaatcggcgagagctataaggagaagcagcggaccatccaggccaagaaggaggtggagcagcggagagccggcggctacagccggaagtacgccagcaaagccaagaatctggcagacgatatggtgagaaacaccgctagagatctgctgtactacgccgtgacccaggatgccatgctgatcttcgccaacctgagccggggcttcggccggcagggcaagcggaccttcatggccgagagacagtacacacggatggaggactggctgaccgccaagctggcctacgagggcctgagcaagacctacctgtccaagacactggcccagtacacctccaagacatgcagcaactgtgggtttaccatcaccagcgccgactacgacagggtgctggagaagctgaagaagacagcaacaggctggatgaccacaattaacggcaaggagctgaaggtggagggccagattacctactacaacagatacaagagacagaacgtagtcaaggacctgtccgtcgagctggatagactgagcgaagaatctgtgaacaacgacatctcctcctggacaaagggcagaagcggagaagctctgagcctcctgaagaaaagattctcccatagacccgtgcaggagaagttcgtgtgcctgaactgcggcttcgagacacacgcagccgagcaagccgccctgaacatcgccagatcctggctgttcctgcggagccaggagtacaagaaataccagacaaacaagacaaccggcaacaccgataagagagccttcgtcgagacctggcagtccttttaccggaagaagcttaaggaggtgtggaaacctgccgtgcggtctggcggatctggcggaggctccacaagcgcctgcgagagcatcaccttcggcgacgtggccatcgacttcagccaccaggagtgggagtacctgaacctggtgcagaagaccctgtaccaggaggtgatgatggagaactacgacaacctggtgagcctgggccacagcatcagcaagcccgacctgatcaccctgctggagcagggcaaggagccctggatgatcgtgggcgaggagaccaggggcgagtgcaccgacctggacagcaggaccagccccaagaaaaagagaaaagtctaagctgccttctgcggggcttgccttctggccatgcccttcttctctcccttgcacctgtacctcttggtctttgaataaagcctgagtaggaaggctagcaaaaaaaaaaaaaaaaaaaaaaaaaaaaaaaaaaaaaaaaaaaaaaaaaaaaaaaaaaaaaaaaaaaaaaaaaaaaaaaa

SEQ ID NO: 3854 - RNA, 5416 nt, synthetic construct
  source 1..5416: mol_type = other RNA
aggaaataagagagaaaagaagagtaagaagaaatataagagccaccatggcccctaagaagaagcgtaaagtgagccgggtgaacggcagcggcagcggcggcggcatgaaccacgaccaggagttcgacccccctaaggtgtaccctcccgtccccgccgagaagagaaagcccatccgggtcctgagcctgttcgatggcatcgccaccggtctgctggtgctgaaggacctgggcatccaggtggataggtacattgcctccgaggtgtgcgaggactccatcaccgtgggaatggtgcgtcatcagggcaagatcatgtacgtgggcgacgtgcggagcgtgacacagaagcatatccaggagtggggccctttcgacctggtgatcggcggcagcccttgcaatgacctgagcatcgtgaacccagcccggaagggcctgtacgagggaaccggcagactgttcttcgagttttacagactgctgcacgacgcccggcctaaggaaggcgacgaccggcccttcttttggctgttcgagaatgtggtggccatgggagtcagcgacaagcgggatattagccggttcctggagagcaaccccgtgatgatcgatgccaaggaagtgagcgccgcccaccgggccagatacttctggggcaatctgcctggcatgaacagacccctggccagcaccgtgaacgacaagctggagctgcaggagtgcctggagcacggccggatcgccaagttcagcaaggtgagaaccatcaccacccgaagcaacagcatcaaacaaggcaaggaccagcactttcctgtgttcatgaacgagaaggaggacatcctgtggtgtaccgagatggagagagtgttcgggttcccagtccactacacagatgtcagcaacatgtctagactggccagacagagactgctgggaagaagctggtccgtccctgtgatcagacacctgttcgcccctctgaaggagtacttcgcctgcgtgagcagcggcaacagcaacgccaacagccggggccccagcttctctagcggcctggtgccactgtccctgagagggagccacatgggccccatggagatctacaaaaccgtgagcgcctggaagcggcagcctgtgcgcgtgctgagcctgtttcggaatatcgataaagtcctgaaaagcctgggattcctggagagcggctctggctccggcggtggcaccctgaagtacgtggaggatgtgacaaacgtggtcagacgggatgtggagaagtggggccccttcgatctggtgtacggcagcacccaacccctgggcagctcttgtgaccggtgccctggctggtacatgtttcagttccaccggatcctgcagtacgccctgccgagacaggagtcccagcggccattcttttggattttcatggacaacttgctgctgaccgaggatgaccaggaaactaccactcggttcctgcagaccgaagccgtgaccctgcaggacgtgagaggccgggactaccagaacgccatgcgggtgtggtccaacatccctggactgaaaagcaagcacgcacctctgacccctaaagaagaggagtacctgcaggcccaggtgcggagcagaagcaagctggacgcccctaaggtggatctgctggtgaagaattgcctcctgcccctgagagagtacttcaagtatttcagccagaatagtctgcccctgggcggcccaagcagcggcgcccctcctcccagcggcggcagcccagccggctccccaacctctaccgaggagggcacctctgagtccgccacccccgagagcggccctggcacctccaccgagcccagcgagggcagcgcacccggcagccctgccggcagccccacctccacagaggagggaaccagcaccgagcccagcgaaggcagcgccccaggcaccagcaccgagcctagtgagggcggctctggcggcggcagcgcccaggagattaaacggatcaacaagatcagaagaagacttgtgaaagacagcaacaccaagaaggccggcaagacaggccccatgaaaaccctgctggttagagtgatgacacccgatctgagagagcggctggaaaacctgagaaagaagcctgaaaatatcccccagcccatcagcaatacatctagagccaacctgaataagctgctgaccgattacaccgaaatgaagaaggcgatcctgcatgtgtactgggaagagttccagaaggaccctgtgggcctgatgagccgggtggcccagcctgccagcaagaagatcgatcagaacaagctgaaacctgagatggacgagaagggcaacctgaccaccgccggctttgcctgctctcagtgtggccagcccctgttcgtgtacaagctggagcaggtgtctgagaagggcaaggcttacaccaactacttcggacggtgcaatgtggccgagcacgaaaagctgatcctgctggcccagctgaagcccgagaaggatagcgacgaagccgtgacatatagcctgggaaagtttgggcagagggccctggatttctacagcattcatgtgaccaaggagtccacccaccccgtgaagcccctggcccagatcgccggaaacagatacgcctccggacctgtgggaaaggccctgagcgacgcatgtatgggcacaatcgcctccttcctgtctaagtaccaggacatcatcatcgaacaccagaaggtggtgaagggcaaccagaagagactggagagcctgcgggagctggccggcaaggaaaacctggaataccctagcgtgaccctgccacctcagcctcacaccaaggagggcgttgatgcctacaacgaagtgatcgcccgggtgcgaatgtgggtgaacctgaacctgtggcagaagctgaagctaagcagagatgatgccaagcctctgctgagactgaagggattcccttcctttcctctggtcgagagacaggccaacgaagtggactggtgggacatggtgtgtaacgtgaagaagctgatcaacgagaaaaaggaggatggcaaggtgttttggcagaatctggctggctacaagagacaggaagccctgagaccatacctgagcagcgaggaagatcggaagaagggaaagaaattcgctcggtaccagctgggcgacctgctgctgcacctggaaaagaagcacggcgaggactggggaaaggtgtacgacgaggcctgggagcggattgacaagaaagtggaaggcctgagcaagcacatcaagctggaagaggaacggagaagcgaggacgcccagagcaaggccgccctgaccgactggctgcgggctaaggccagcttcgtgatcgagggcctgaaggaggccgacaaggacgagttctgcagatgcgagctgaagctgcagaagtggtacggggacctgcggggaaagcccttcgccatcgaagccgagaacagcatcctggacatcagcggcttcagcaagcagtacaactgtgccttcatctggcagaaggacggcgtgaagaagctgaacctgtacctgatcatcaactacttcaagggcggcaagctgcggttcaagaagatcaaacctgaagccttcgaagccaacagattctacaccgtgatcaacaaaaagagcggcgagatcgtgcccatggaggtgaacttcaacttcgacgaccccaacctgatcatcctgcctctggcctttggcaagagacagggcagagaattcatctggaacgacctgctgtccctggaaaccggcagcctgaagctggccaacggaagagtgatcgagaagacactgtacaacagaagaacccggcaggatgagcctgccctgttcgtggccctgaccttcgagcggcgggaggtcctggactcctccaatatcaaaccaatgaacctgatcggcgtggcaagaggcgaaaacatccccgccgtgatcgccctgaccgaccccgagggctgcccactgagccggtttaaggatagcctgggaaacccaacccacatcctgagaatcggcgagagctataaggagaagcagcggaccatccaggccaagaaggaggtggagcagcggagagccggcggctacagccggaagtacgccagcaaagccaagaatctggcagacgatatggtgagaaacaccgctagagatctgctgtactacgccgtgacccaggatgccatgctgatcttcgccaacctgagccggggcttcggccggcagggcaagcggaccttcatggccgagagacagtacacacggatggaggactggctgaccgccaagctggcctacgagggcctgagcaagacctacctgtccaagacactggcccagtacacctccaagacatgcagcaactgtgggtttaccatcaccagcgccgactacgacagggtgctggagaagctgaagaagacagcaacaggctggatgaccacaattaacggcaaggagctgaaggtggagggccagattacctactacaacagatacaagagacagaacgtagtcaaggacctgtccgtcgagctggatagactgagcgaagaatctgtgaacaacgacatctcctcctggacaaagggcagaagcggagaagctctgagcctcctgaagaaaagattctcccatagacccgtgcaggagaagttcgtgtgcctgaactgcggcttcgagacacacgcagccgagcaagccgccctgaacatcgccagatcctggctgttcctgcggagccaggagtacaagaaataccagacaaacaagacaaccggcaacaccgataagagagccttcgtcgagacctggcagtccttttaccggaagaagcttaaggaggtgtggaaacctgccgtgcggtctggcggatctggcggaggctccacaagcctgcagggcctgctgaccttcggcgacgtggccatcgagttcagccaggaggagtggaggtgcctgagccacacccagagggagctgtacagggacgtgatgctggagaactacggccacctgctgttcctgggcctgaccgtgagcaagcccgacctggtgagcttcctggagcagaggaaggagccctgggacgagaagaggaacaagaccgccggcttcgacgccagcaggtgggagaccagccccaagaaaaagagaaaagtctaagctgccttctgcggggcttgccttctggccatgcccttcttctctcccttgcacctgtacctcttggtctttgaataaagcctgagtaggaaggctagcaaaaaaaaaaaaaaaaaaaaaaaaaaaaaaaaaaaaaaaaaaaaaaaaaaaaaaaaaaaaaaaaaaaaaaaaaaaaaaaa

SEQ ID NO: 3855 - RNA, 5419 nt, synthetic construct
  source 1..5419: mol_type = other RNA
aggaaataagagagaaaagaagagtaagaagaaatataagagccaccatggcccctaagaagaagcgtaaagtgagccgggtgaacggcagcggcagcggcggcggcatgaaccacgaccaggagttcgacccccctaaggtgtaccctcccgtccccgccgagaagagaaagcccatccgggtcctgagcctgttcgatggcatcgccaccggtctgctggtgctgaaggacctgggcatccaggtggataggtacattgcctccgaggtgtgcgaggactccatcaccgtgggaatggtgcgtcatcagggcaagatcatgtacgtgggcgacgtgcggagcgtgacacagaagcatatccaggagtggggccctttcgacctggtgatcggcggcagcccttgcaatgacctgagcatcgtgaacccagcccggaagggcctgtacgagggaaccggcagactgttcttcgagttttacagactgctgcacgacgcccggcctaaggaaggcgacgaccggcccttcttttggctgttcgagaatgtggtggccatgggagtcagcgacaagcgggatattagccggttcctggagagcaaccccgtgatgatcgatgccaaggaagtgagcgccgcccaccgggccagatacttctggggcaatctgcctggcatgaacagacccctggccagcaccgtgaacgacaagctggagctgcaggagtgcctggagcacggccggatcgccaagttcagcaaggtgagaaccatcaccacccgaagcaacagcatcaaacaaggcaaggaccagcactttcctgtgttcatgaacgagaaggaggacatcctgtggtgtaccgagatggagagagtgttcgggttcccagtccactacacagatgtcagcaacatgtctagactggccagacagagactgctgggaagaagctggtccgtccctgtgatcagacacctgttcgcccctctgaaggagtacttcgcctgcgtgagcagcggcaacagcaacgccaacagccggggccccagcttctctagcggcctggtgccactgtccctgagagggagccacatgggccccatggagatctacaaaaccgtgagcgcctggaagcggcagcctgtgcgcgtgctgagcctgtttcggaatatcgataaagtcctgaaaagcctgggattcctggagagcggctctggctccggcggtggcaccctgaagtacgtggaggatgtgacaaacgtggtcagacgggatgtggagaagtggggccccttcgatctggtgtacggcagcacccaacccctgggcagctcttgtgaccggtgccctggctggtacatgtttcagttccaccggatcctgcagtacgccctgccgagacaggagtcccagcggccattcttttggattttcatggacaacttgctgctgaccgaggatgaccaggaaactaccactcggttcctgcagaccgaagccgtgaccctgcaggacgtgagaggccgggactaccagaacgccatgcgggtgtggtccaacatccctggactgaaaagcaagcacgcacctctgacccctaaagaagaggagtacctgcaggcccaggtgcggagcagaagcaagctggacgcccctaaggtggatctgctggtgaagaattgcctcctgcccctgagagagtacttcaagtatttcagccagaatagtctgcccctgggcggcccaagcagcggcgcccctcctcccagcggcggcagcccagccggctccccaacctctaccgaggagggcacctctgagtccgccacccccgagagcggccctggcacctccaccgagcccagcgagggcagcgcacccggcagccctgccggcagccccacctccacagaggagggaaccagcaccgagcccagcgaaggcagcgccccaggcaccagcaccgagcctagtgagggcggctctggcggcggcagcgcccaggagattaaacggatcaacaagatcagaagaagacttgtgaaagacagcaacaccaagaaggccggcaagacaggccccatgaaaaccctgctggttagagtgatgacacccgatctgagagagcggctggaaaacctgagaaagaagcctgaaaatatcccccagcccatcagcaatacatctagagccaacctgaataagctgctgaccgattacaccgaaatgaagaaggcgatcctgcatgtgtactgggaagagttccagaaggaccctgtgggcctgatgagccgggtggcccagcctgccagcaagaagatcgatcagaacaagctgaaacctgagatggacgagaagggcaacctgaccaccgccggctttgcctgctctcagtgtggccagcccctgttcgtgtacaagctggagcaggtgtctgagaagggcaaggcttacaccaactacttcggacggtgcaatgtggccgagcacgaaaagctgatcctgctggcccagctgaagcccgagaaggatagcgacgaagccgtgacatatagcctgggaaagtttgggcagagggccctggatttctacagcattcatgtgaccaaggagtccacccaccccgtgaagcccctggcccagatcgccggaaacagatacgcctccggacctgtgggaaaggccctgagcgacgcatgtatgggcacaatcgcctccttcctgtctaagtaccaggacatcatcatcgaacaccagaaggtggtgaagggcaaccagaagagactggagagcctgcgggagctggccggcaaggaaaacctggaataccctagcgtgaccctgccacctcagcctcacaccaaggagggcgttgatgcctacaacgaagtgatcgcccgggtgcgaatgtgggtgaacctgaacctgtggcagaagctgaagctaagcagagatgatgccaagcctctgctgagactgaagggattcccttcctttcctctggtcgagagacaggccaacgaagtggactggtgggacatggtgtgtaacgtgaagaagctgatcaacgagaaaaaggaggatggcaaggtgttttggcagaatctggctggctacaagagacaggaagccctgagaccatacctgagcagcgaggaagatcggaagaagggaaagaaattcgctcggtaccagctgggcgacctgctgctgcacctggaaaagaagcacggcgaggactggggaaaggtgtacgacgaggcctgggagcggattgacaagaaagtggaaggcctgagcaagcacatcaagctggaagaggaacggagaagcgaggacgcccagagcaaggccgccctgaccgactggctgcgggctaaggccagcttcgtgatcgagggcctgaaggaggccgacaaggacgagttctgcagatgcgagctgaagctgcagaagtggtacggggacctgcggggaaagcccttcgccatcgaagccgagaacagcatcctggacatcagcggcttcagcaagcagtacaactgtgccttcatctggcagaaggacggcgtgaagaagctgaacctgtacctgatcatcaactacttcaagggcggcaagctgcggttcaagaagatcaaacctgaagccttcgaagccaacagattctacaccgtgatcaacaaaaagagcggcgagatcgtgcccatggaggtgaacttcaacttcgacgaccccaacctgatcatcctgcctctggcctttggcaagagacagggcagagaattcatctggaacgacctgctgtccctggaaaccggcagcctgaagctggccaacggaagagtgatcgagaagacactgtacaacagaagaacccggcaggatgagcctgccctgttcgtggccctgaccttcgagcggcgggaggtcctggactcctccaatatcaaaccaatgaacctgatcggcgtggcaagaggcgaaaacatccccgccgtgatcgccctgaccgaccccgagggctgcccactgagccggtttaaggatagcctgggaaacccaacccacatcctgagaatcggcgagagctataaggagaagcagcggaccatccaggccaagaaggaggtggagcagcggagagccggcggctacagccggaagtacgccagcaaagccaagaatctggcagacgatatggtgagaaacaccgctagagatctgctgtactacgccgtgacccaggatgccatgctgatcttcgccaacctgagccggggcttcggccggcagggcaagcggaccttcatggccgagagacagtacacacggatggaggactggctgaccgccaagctggcctacgagggcctgagcaagacctacctgtccaagacactggcccagtacacctccaagacatgcagcaactgtgggtttaccatcaccagcgccgactacgacagggtgctggagaagctgaagaagacagcaacaggctggatgaccacaattaacggcaaggagctgaaggtggagggccagattacctactacaacagatacaagagacagaacgtagtcaaggacctgtccgtcgagctggatagactgagcgaagaatctgtgaacaacgacatctcctcctggacaaagggcagaagcggagaagctctgagcctcctgaagaaaagattctcccatagacccgtgcaggagaagttcgtgtgcctgaactgcggcttcgagacacacgcagccgagcaagccgccctgaacatcgccagatcctggctgttcctgcggagccaggagtacaagaaataccagacaaacaagacaaccggcaacaccgataagagagccttcgtcgagacctggcagtccttttaccggaagaagcttaaggaggtgtggaaacctgccgtgcggtctggcggatctggcggaggctccacaagcgtgcacggcagcgtgaccttcagggacgtggccatcgacttcagccaggaggagtgggagtgcctgcagcccgaccagaggaacctgtacagggacgtgatgctggagaactacagccacctgatcagcctgggcagcagcatcagcaagcccgacgtgatcaccctgctggagcaggagaaggagccctggatcgtggtgaggaaggagaccagcaggtggtaccccgacctggagagcaagaccagccccaagaaaaagagaaaagtctaagctgccttctgcggggcttgccttctggccatgcccttcttctctcccttgcacctgtacctcttggtctttgaataaagcctgagtaggaaggctagcaaaaaaaaaaaaaaaaaaaaaaaaaaaaaaaaaaaaaaaaaaaaaaaaaaaaaaaaaaaaaaaaaaaaaaaaaaaaaaaa

SEQ ID NO: 3856 - RNA, 5419 nt, synthetic construct
  source 1..5419: mol_type = other RNA
aggaaataagagagaaaagaagagtaagaagaaatataagagccaccatggcccctaagaagaagcgtaaagtgagccgggtgaacggcagcggcagcggcggcggcatgaaccacgaccaggagttcgacccccctaaggtgtaccctcccgtccccgccgagaagagaaagcccatccgggtcctgagcctgttcgatggcatcgccaccggtctgctggtgctgaaggacctgggcatccaggtggataggtacattgcctccgaggtgtgcgaggactccatcaccgtgggaatggtgcgtcatcagggcaagatcatgtacgtgggcgacgtgcggagcgtgacacagaagcatatccaggagtggggccctttcgacctggtgatcggcggcagcccttgcaatgacctgagcatcgtgaacccagcccggaagggcctgtacgagggaaccggcagactgttcttcgagttttacagactgctgcacgacgcccggcctaaggaaggcgacgaccggcccttcttttggctgttcgagaatgtggtggccatgggagtcagcgacaagcgggatattagccggttcctggagagcaaccccgtgatgatcgatgccaaggaagtgagcgccgcccaccgggccagatacttctggggcaatctgcctggcatgaacagacccctggccagcaccgtgaacgacaagctggagctgcaggagtgcctggagcacggccggatcgccaagttcagcaaggtgagaaccatcaccacccgaagcaacagcatcaaacaaggcaaggaccagcactttcctgtgttcatgaacgagaaggaggacatcctgtggtgtaccgagatggagagagtgttcgggttcccagtccactacacagatgtcagcaacatgtctagactggccagacagagactgctgggaagaagctggtccgtccctgtgatcagacacctgttcgcccctctgaaggagtacttcgcctgcgtgagcagcggcaacagcaacgccaacagccggggccccagcttctctagcggcctggtgccactgtccctgagagggagccacatgggccccatggagatctacaaaaccgtgagcgcctggaagcggcagcctgtgcgcgtgctgagcctgtttcggaatatcgataaagtcctgaaaagcctgggattcctggagagcggctctggctccggcggtggcaccctgaagtacgtggaggatgtgacaaacgtggtcagacgggatgtggagaagtggggccccttcgatctggtgtacggcagcacccaacccctgggcagctcttgtgaccggtgccctggctggtacatgtttcagttccaccggatcctgcagtacgccctgccgagacaggagtcccagcggccattcttttggattttcatggacaacttgctgctgaccgaggatgaccaggaaactaccactcggttcctgcagaccgaagccgtgaccctgcaggacgtgagaggccgggactaccagaacgccatgcgggtgtggtccaacatccctggactgaaaagcaagcacgcacctctgacccctaaagaagaggagtacctgcaggcccaggtgcggagcagaagcaagctggacgcccctaaggtggatctgctggtgaagaattgcctcctgcccctgagagagtacttcaagtatttcagccagaatagtctgcccctgggcggcccaagcagcggcgcccctcctcccagcggcggcagcccagccggctccccaacctctaccgaggagggcacctctgagtccgccacccccgagagcggccctggcacctccaccgagcccagcgagggcagcgcacccggcagccctgccggcagccccacctccacagaggagggaaccagcaccgagcccagcgaaggcagcgccccaggcaccagcaccgagcctagtgagggcggctctggcggcggcagcgcccaggagattaaacggatcaacaagatcagaagaagacttgtgaaagacagcaacaccaagaaggccggcaagacaggccccatgaaaaccctgctggttagagtgatgacacccgatctgagagagcggctggaaaacctgagaaagaagcctgaaaatatcccccagcccatcagcaatacatctagagccaacctgaataagctgctgaccgattacaccgaaatgaagaaggcgatcctgcatgtgtactgggaagagttccagaaggaccctgtgggcctgatgagccgggtggcccagcctgccagcaagaagatcgatcagaacaagctgaaacctgagatggacgagaagggcaacctgaccaccgccggctttgcctgctctcagtgtggccagcccctgttcgtgtacaagctggagcaggtgtctgagaagggcaaggcttacaccaactacttcggacggtgcaatgtggccgagcacgaaaagctgatcctgctggcccagctgaagcccgagaaggatagcgacgaagccgtgacatatagcctgggaaagtttgggcagagggccctggatttctacagcattcatgtgaccaaggagtccacccaccccgtgaagcccctggcccagatcgccggaaacagatacgcctccggacctgtgggaaaggccctgagcgacgcatgtatgggcacaatcgcctccttcctgtctaagtaccaggacatcatcatcgaacaccagaaggtggtgaagggcaaccagaagagactggagagcctgcgggagctggccggcaaggaaaacctggaataccctagcgtgaccctgccacctcagcctcacaccaaggagggcgttgatgcctacaacgaagtgatcgcccgggtgcgaatgtgggtgaacctgaacctgtggcagaagctgaagctaagcagagatgatgccaagcctctgctgagactgaagggattcccttcctttcctctggtcgagagacaggccaacgaagtggactggtgggacatggtgtgtaacgtgaagaagctgatcaacgagaaaaaggaggatggcaaggtgttttggcagaatctggctggctacaagagacaggaagccctgagaccatacctgagcagcgaggaagatcggaagaagggaaagaaattcgctcggtaccagctgggcgacctgctgctgcacctggaaaagaagcacggcgaggactggggaaaggtgtacgacgaggcctgggagcggattgacaagaaagtggaaggcctgagcaagcacatcaagctggaagaggaacggagaagcgaggacgcccagagcaaggccgccctgaccgactggctgcgggctaaggccagcttcgtgatcgagggcctgaaggaggccgacaaggacgagttctgcagatgcgagctgaagctgcagaagtggtacggggacctgcggggaaagcccttcgccatcgaagccgagaacagcatcctggacatcagcggcttcagcaagcagtacaactgtgccttcatctggcagaaggacggcgtgaagaagctgaacctgtacctgatcatcaactacttcaagggcggcaagctgcggttcaagaagatcaaacctgaagccttcgaagccaacagattctacaccgtgatcaacaaaaagagcggcgagatcgtgcccatggaggtgaacttcaacttcgacgaccccaacctgatcatcctgcctctggcctttggcaagagacagggcagagaattcatctggaacgacctgctgtccctggaaaccggcagcctgaagctggccaacggaagagtgatcgagaagacactgtacaacagaagaacccggcaggatgagcctgccctgttcgtggccctgaccttcgagcggcgggaggtcctggactcctccaatatcaaaccaatgaacctgatcggcgtggcaagaggcgaaaacatccccgccgtgatcgccctgaccgaccccgagggctgcccactgagccggtttaaggatagcctgggaaacccaacccacatcctgagaatcggcgagagctataaggagaagcagcggaccatccaggccaagaaggaggtggagcagcggagagccggcggctacagccggaagtacgccagcaaagccaagaatctggcagacgatatggtgagaaacaccgctagagatctgctgtactacgccgtgacccaggatgccatgctgatcttcgccaacctgagccggggcttcggccggcagggcaagcggaccttcatggccgagagacagtacacacggatggaggactggctgaccgccaagctggcctacgagggcctgagcaagacctacctgtccaagacactggcccagtacacctccaagacatgcagcaactgtgggtttaccatcaccagcgccgactacgacagggtgctggagaagctgaagaagacagcaacaggctggatgaccacaattaacggcaaggagctgaaggtggagggccagattacctactacaacagatacaagagacagaacgtagtcaaggacctgtccgtcgagctggatagactgagcgaagaatctgtgaacaacgacatctcctcctggacaaagggcagaagcggagaagctctgagcctcctgaagaaaagattctcccatagacccgtgcaggagaagttcgtgtgcctgaactgcggcttcgagacacacgcagccgagcaagccgccctgaacatcgccagatcctggctgttcctgcggagccaggagtacaagaaataccagacaaacaagacaaccggcaacaccgataagagagccttcgtcgagacctggcagtccttttaccggaagaagcttaaggaggtgtggaaacctgccgtgcggtctggcggatctggcggaggctccacaagcatgggccccctgcagttcagggacgtggccatcgagttcagcctggaggagtggcactgcctggacaccacccagaggaacctgtacagggacgtgatgctggagaactacaggaacctggtgttcctgggcatcgtggtgagcaagcccgacctgatcacctgcctggagcagggcaagaagcccctgaccatgaagaggcacgagatgatcgccaagccccccggccaggcccagtggctgaccagccccaagaaaaagagaaaagtctaagctgccttctgcggggcttgccttctggccatgcccttcttctctcccttgcacctgtacctcttggtctttgaataaagcctgagtaggaaggctagcaaaaaaaaaaaaaaaaaaaaaaaaaaaaaaaaaaaaaaaaaaaaaaaaaaaaaaaaaaaaaaaaaaaaaaaaaaaaaaaa

SEQ ID NO: 3857 - RNA, 5419 nt, synthetic construct
  source 1..5419: mol_type = other RNA
aggaaataagagagaaaagaagagtaagaagaaatataagagccaccatggcccctaagaagaagcgtaaagtgagccgggtgaacggcagcggcagcggcggcggcatgaaccacgaccaggagttcgacccccctaaggtgtaccctcccgtccccgccgagaagagaaagcccatccgggtcctgagcctgttcgatggcatcgccaccggtctgctggtgctgaaggacctgggcatccaggtggataggtacattgcctccgaggtgtgcgaggactccatcaccgtgggaatggtgcgtcatcagggcaagatcatgtacgtgggcgacgtgcggagcgtgacacagaagcatatccaggagtggggccctttcgacctggtgatcggcggcagcccttgcaatgacctgagcatcgtgaacccagcccggaagggcctgtacgagggaaccggcagactgttcttcgagttttacagactgctgcacgacgcccggcctaaggaaggcgacgaccggcccttcttttggctgttcgagaatgtggtggccatgggagtcagcgacaagcgggatattagccggttcctggagagcaaccccgtgatgatcgatgccaaggaagtgagcgccgcccaccgggccagatacttctggggcaatctgcctggcatgaacagacccctggccagcaccgtgaacgacaagctggagctgcaggagtgcctggagcacggccggatcgccaagttcagcaaggtgagaaccatcaccacccgaagcaacagcatcaaacaaggcaaggaccagcactttcctgtgttcatgaacgagaaggaggacatcctgtggtgtaccgagatggagagagtgttcgggttcccagtccactacacagatgtcagcaacatgtctagactggccagacagagactgctgggaagaagctggtccgtccctgtgatcagacacctgttcgcccctctgaaggagtacttcgcctgcgtgagcagcggcaacagcaacgccaacagccggggccccagcttctctagcggcctggtgccactgtccctgagagggagccacatgggccccatggagatctacaaaaccgtgagcgcctggaagcggcagcctgtgcgcgtgctgagcctgtttcggaatatcgataaagtcctgaaaagcctgggattcctggagagcggctctggctccggcggtggcaccctgaagtacgtggaggatgtgacaaacgtggtcagacgggatgtggagaagtggggccccttcgatctggtgtacggcagcacccaacccctgggcagctcttgtgaccggtgccctggctggtacatgtttcagttccaccggatcctgcagtacgccctgccgagacaggagtcccagcggccattcttttggattttcatggacaacttgctgctgaccgaggatgaccaggaaactaccactcggttcctgcagaccgaagccgtgaccctgcaggacgtgagaggccgggactaccagaacgccatgcgggtgtggtccaacatccctggactgaaaagcaagcacgcacctctgacccctaaagaagaggagtacctgcaggcccaggtgcggagcagaagcaagctggacgcccctaaggtggatctgctggtgaagaattgcctcctgcccctgagagagtacttcaagtatttcagccagaatagtctgcccctgggcggcccaagcagcggcgcccctcctcccagcggcggcagcccagccggctccccaacctctaccgaggagggcacctctgagtccgccacccccgagagcggccctggcacctccaccgagcccagcgagggcagcgcacccggcagccctgccggcagccccacctccacagaggagggaaccagcaccgagcccagcgaaggcagcgccccaggcaccagcaccgagcctagtgagggcggctctggcggcggcagcgcccaggagattaaacggatcaacaagatcagaagaagacttgtgaaagacagcaacaccaagaaggccggcaagacaggccccatgaaaaccctgctggttagagtgatgacacccgatctgagagagcggctggaaaacctgagaaagaagcctgaaaatatcccccagcccatcagcaatacatctagagccaacctgaataagctgctgaccgattacaccgaaatgaagaaggcgatcctgcatgtgtactgggaagagttccagaaggaccctgtgggcctgatgagccgggtggcccagcctgccagcaagaagatcgatcagaacaagctgaaacctgagatggacgagaagggcaacctgaccaccgccggctttgcctgctctcagtgtggccagcccctgttcgtgtacaagctggagcaggtgtctgagaagggcaaggcttacaccaactacttcggacggtgcaatgtggccgagcacgaaaagctgatcctgctggcccagctgaagcccgagaaggatagcgacgaagccgtgacatatagcctgggaaagtttgggcagagggccctggatttctacagcattcatgtgaccaaggagtccacccaccccgtgaagcccctggcccagatcgccggaaacagatacgcctccggacctgtgggaaaggccctgagcgacgcatgtatgggcacaatcgcctccttcctgtctaagtaccaggacatcatcatcgaacaccagaaggtggtgaagggcaaccagaagagactggagagcctgcgggagctggccggcaaggaaaacctggaataccctagcgtgaccctgccacctcagcctcacaccaaggagggcgttgatgcctacaacgaagtgatcgcccgggtgcgaatgtgggtgaacctgaacctgtggcagaagctgaagctaagcagagatgatgccaagcctctgctgagactgaagggattcccttcctttcctctggtcgagagacaggccaacgaagtggactggtgggacatggtgtgtaacgtgaagaagctgatcaacgagaaaaaggaggatggcaaggtgttttggcagaatctggctggctacaagagacaggaagccctgagaccatacctgagcagcgaggaagatcggaagaagggaaagaaattcgctcggtaccagctgggcgacctgctgctgcacctggaaaagaagcacggcgaggactggggaaaggtgtacgacgaggcctgggagcggattgacaagaaagtggaaggcctgagcaagcacatcaagctggaagaggaacggagaagcgaggacgcccagagcaaggccgccctgaccgactggctgcgggctaaggccagcttcgtgatcgagggcctgaaggaggccgacaaggacgagttctgcagatgcgagctgaagctgcagaagtggtacggggacctgcggggaaagcccttcgccatcgaagccgagaacagcatcctggacatcagcggcttcagcaagcagtacaactgtgccttcatctggcagaaggacggcgtgaagaagctgaacctgtacctgatcatcaactacttcaagggcggcaagctgcggttcaagaagatcaaacctgaagccttcgaagccaacagattctacaccgtgatcaacaaaaagagcggcgagatcgtgcccatggaggtgaacttcaacttcgacgaccccaacctgatcatcctgcctctggcctttggcaagagacagggcagagaattcatctggaacgacctgctgtccctggaaaccggcagcctgaagctggccaacggaagagtgatcgagaagacactgtacaacagaagaacccggcaggatgagcctgccctgttcgtggccctgaccttcgagcggcgggaggtcctggactcctccaatatcaaaccaatgaacctgatcggcgtggcaagaggcgaaaacatccccgccgtgatcgccctgaccgaccccgagggctgcccactgagccggtttaaggatagcctgggaaacccaacccacatcctgagaatcggcgagagctataaggagaagcagcggaccatccaggccaagaaggaggtggagcagcggagagccggcggctacagccggaagtacgccagcaaagccaagaatctggcagacgatatggtgagaaacaccgctagagatctgctgtactacgccgtgacccaggatgccatgctgatcttcgccaacctgagccggggcttcggccggcagggcaagcggaccttcatggccgagagacagtacacacggatggaggactggctgaccgccaagctggcctacgagggcctgagcaagacctacctgtccaagacactggcccagtacacctccaagacatgcagcaactgtgggtttaccatcaccagcgccgactacgacagggtgctggagaagctgaagaagacagcaacaggctggatgaccacaattaacggcaaggagctgaaggtggagggccagattacctactacaacagatacaagagacagaacgtagtcaaggacctgtccgtcgagctggatagactgagcgaagaatctgtgaacaacgacatctcctcctggacaaagggcagaagcggagaagctctgagcctcctgaagaaaagattctcccatagacccgtgcaggagaagttcgtgtgcctgaactgcggcttcgagacacacgcagccgagcaagccgccctgaacatcgccagatcctggctgttcctgcggagccaggagtacaagaaataccagacaaacaagacaaccggcaacaccgataagagagccttcgtcgagacctggcagtccttttaccggaagaagcttaaggaggtgtggaaacctgccgtgcggtctggcggatctggcggaggctccacaagcgccagcggcaccctgaccttcgacgacgtggccctgtacttcagcgagcaggagtgggagatcctggagaagtggcagaagcagatgtacaagcaggagatgaagaccaactacgagaccctggacagcctgggctacgccttcagcaagcccgacctgatcacctggatggagaagggcaggatgctgctgatcagcgaccagggcaggctgcacaagaccaagaggaccgccggcccccccaccagccccaagaaaaagagaaaagtctaagctgccttctgcggggcttgccttctggccatgcccttcttctctcccttgcacctgtacctcttggtctttgaataaagcctgagtaggaaggctagcaaaaaaaaaaaaaaaaaaaaaaaaaaaaaaaaaaaaaaaaaaaaaaaaaaaaaaaaaaaaaaaaaaaaaaaaaaaaaaaa

SEQ ID NO: 3858 - RNA, 5419 nt, synthetic construct
  source 1..5419: mol_type = other RNA
aggaaataagagagaaaagaagagtaagaagaaatataagagccaccatggcccctaagaagaagcgtaaagtgagccgggtgaacggcagcggcagcggcggcggcatgaaccacgaccaggagttcgacccccctaaggtgtaccctcccgtccccgccgagaagagaaagcccatccgggtcctgagcctgttcgatggcatcgccaccggtctgctggtgctgaaggacctgggcatccaggtggataggtacattgcctccgaggtgtgcgaggactccatcaccgtgggaatggtgcgtcatcagggcaagatcatgtacgtgggcgacgtgcggagcgtgacacagaagcatatccaggagtggggccctttcgacctggtgatcggcggcagcccttgcaatgacctgagcatcgtgaacccagcccggaagggcctgtacgagggaaccggcagactgttcttcgagttttacagactgctgcacgacgcccggcctaaggaaggcgacgaccggcccttcttttggctgttcgagaatgtggtggccatgggagtcagcgacaagcgggatattagccggttcctggagagcaaccccgtgatgatcgatgccaaggaagtgagcgccgcccaccgggccagatacttctggggcaatctgcctggcatgaacagacccctggccagcaccgtgaacgacaagctggagctgcaggagtgcctggagcacggccggatcgccaagttcagcaaggtgagaaccatcaccacccgaagcaacagcatcaaacaaggcaaggaccagcactttcctgtgttcatgaacgagaaggaggacatcctgtggtgtaccgagatggagagagtgttcgggttcccagtccactacacagatgtcagcaacatgtctagactggccagacagagactgctgggaagaagctggtccgtccctgtgatcagacacctgttcgcccctctgaaggagtacttcgcctgcgtgagcagcggcaacagcaacgccaacagccggggccccagcttctctagcggcctggtgccactgtccctgagagggagccacatgggccccatggagatctacaaaaccgtgagcgcctggaagcggcagcctgtgcgcgtgctgagcctgtttcggaatatcgataaagtcctgaaaagcctgggattcctggagagcggctctggctccggcggtggcaccctgaagtacgtggaggatgtgacaaacgtggtcagacgggatgtggagaagtggggccccttcgatctggtgtacggcagcacccaacccctgggcagctcttgtgaccggtgccctggctggtacatgtttcagttccaccggatcctgcagtacgccctgccgagacaggagtcccagcggccattcttttggattttcatggacaacttgctgctgaccgaggatgaccaggaaactaccactcggttcctgcagaccgaagccgtgaccctgcaggacgtgagaggccgggactaccagaacgccatgcgggtgtggtccaacatccctggactgaaaagcaagcacgcacctctgacccctaaagaagaggagtacctgcaggcccaggtgcggagcagaagcaagctggacgcccctaaggtggatctgctggtgaagaattgcctcctgcccctgagagagtacttcaagtatttcagccagaatagtctgcccctgggcggcccaagcagcggcgcccctcctcccagcggcggcagcccagccggctccccaacctctaccgaggagggcacctctgagtccgccacccccgagagcggccctggcacctccaccgagcccagcgagggcagcgcacccggcagccctgccggcagccccacctccacagaggagggaaccagcaccgagcccagcgaaggcagcgccccaggcaccagcaccgagcctagtgagggcggctctggcggcggcagcgcccaggagattaaacggatcaacaagatcagaagaagacttgtgaaagacagcaacaccaagaaggccggcaagacaggccccatgaaaaccctgctggttagagtgatgacacccgatctgagagagcggctggaaaacctgagaaagaagcctgaaaatatcccccagcccatcagcaatacatctagagccaacctgaataagctgctgaccgattacaccgaaatgaagaaggcgatcctgcatgtgtactgggaagagttccagaaggaccctgtgggcctgatgagccgggtggcccagcctgccagcaagaagatcgatcagaacaagctgaaacctgagatggacgagaagggcaacctgaccaccgccggctttgcctgctctcagtgtggccagcccctgttcgtgtacaagctggagcaggtgtctgagaagggcaaggcttacaccaactacttcggacggtgcaatgtggccgagcacgaaaagctgatcctgctggcccagctgaagcccgagaaggatagcgacgaagccgtgacatatagcctgggaaagtttgggcagagggccctggatttctacagcattcatgtgaccaaggagtccacccaccccgtgaagcccctggcccagatcgccggaaacagatacgcctccggacctgtgggaaaggccctgagcgacgcatgtatgggcacaatcgcctccttcctgtctaagtaccaggacatcatcatcgaacaccagaaggtggtgaagggcaaccagaagagactggagagcctgcgggagctggccggcaaggaaaacctggaataccctagcgtgaccctgccacctcagcctcacaccaaggagggcgttgatgcctacaacgaagtgatcgcccgggtgcgaatgtgggtgaacctgaacctgtggcagaagctgaagctaagcagagatgatgccaagcctctgctgagactgaagggattcccttcctttcctctggtcgagagacaggccaacgaagtggactggtgggacatggtgtgtaacgtgaagaagctgatcaacgagaaaaaggaggatggcaaggtgttttggcagaatctggctggctacaagagacaggaagccctgagaccatacctgagcagcgaggaagatcggaagaagggaaagaaattcgctcggtaccagctgggcgacctgctgctgcacctggaaaagaagcacggcgaggactggggaaaggtgtacgacgaggcctgggagcggattgacaagaaagtggaaggcctgagcaagcacatcaagctggaagaggaacggagaagcgaggacgcccagagcaaggccgccctgaccgactggctgcgggctaaggccagcttcgtgatcgagggcctgaaggaggccgacaaggacgagttctgcagatgcgagctgaagctgcagaagtggtacggggacctgcggggaaagcccttcgccatcgaagccgagaacagcatcctggacatcagcggcttcagcaagcagtacaactgtgccttcatctggcagaaggacggcgtgaagaagctgaacctgtacctgatcatcaactacttcaagggcggcaagctgcggttcaagaagatcaaacctgaagccttcgaagccaacagattctacaccgtgatcaacaaaaagagcggcgagatcgtgcccatggaggtgaacttcaacttcgacgaccccaacctgatcatcctgcctctggcctttggcaagagacagggcagagaattcatctggaacgacctgctgtccctggaaaccggcagcctgaagctggccaacggaagagtgatcgagaagacactgtacaacagaagaacccggcaggatgagcctgccctgttcgtggccctgaccttcgagcggcgggaggtcctggactcctccaatatcaaaccaatgaacctgatcggcgtggcaagaggcgaaaacatccccgccgtgatcgccctgaccgaccccgagggctgcccactgagccggtttaaggatagcctgggaaacccaacccacatcctgagaatcggcgagagctataaggagaagcagcggaccatccaggccaagaaggaggtggagcagcggagagccggcggctacagccggaagtacgccagcaaagccaagaatctggcagacgatatggtgagaaacaccgctagagatctgctgtactacgccgtgacccaggatgccatgctgatcttcgccaacctgagccggggcttcggccggcagggcaagcggaccttcatggccgagagacagtacacacggatggaggactggctgaccgccaagctggcctacgagggcctgagcaagacctacctgtccaagacactggcccagtacacctccaagacatgcagcaactgtgggtttaccatcaccagcgccgactacgacagggtgctggagaagctgaagaagacagcaacaggctggatgaccacaattaacggcaaggagctgaaggtggagggccagattacctactacaacagatacaagagacagaacgtagtcaaggacctgtccgtcgagctggatagactgagcgaagaatctgtgaacaacgacatctcctcctggacaaagggcagaagcggagaagctctgagcctcctgaagaaaagattctcccatagacccgtgcaggagaagttcgtgtgcctgaactgcggcttcgagacacacgcagccgagcaagccgccctgaacatcgccagatcctggctgttcctgcggagccaggagtacaagaaataccagacaaacaagacaaccggcaacaccgataagagagccttcgtcgagacctggcagtccttttaccggaagaagcttaaggaggtgtggaaacctgccgtgcggtctggcggatctggcggaggctccacaagcggccccctgaccttcagggacgtggccatcgagttcagccaggaggagtggaagagcctggaccccgtgcagaaggccctgtactgggacgtgatgctggagaactacaggaacctggtgttcctgggcatcctgcccaagtgcatgaccaaggagctgccccccatcggcaacagcaacaccggcgagaagttccagagggtgatgctggagaggcacgagtgctacgacatcgagaacttcaccagccccaagaaaaagagaaaagtctaagctgccttctgcggggcttgccttctggccatgcccttcttctctcccttgcacctgtacctcttggtctttgaataaagcctgagtaggaaggctagcaaaaaaaaaaaaaaaaaaaaaaaaaaaaaaaaaaaaaaaaaaaaaaaaaaaaaaaaaaaaaaaaaaaaaaaaaaaaaaaa

SEQ ID NO: 3859 - RNA, 5419 nt, synthetic construct
  source 1..5419: mol_type = other RNA
aggaaataagagagaaaagaagagtaagaagaaatataagagccaccatggcccctaagaagaagcgtaaagtgagccgggtgaacggcagcggcagcggcggcggcatgaaccacgaccaggagttcgacccccctaaggtgtaccctcccgtccccgccgagaagagaaagcccatccgggtcctgagcctgttcgatggcatcgccaccggtctgctggtgctgaaggacctgggcatccaggtggataggtacattgcctccgaggtgtgcgaggactccatcaccgtgggaatggtgcgtcatcagggcaagatcatgtacgtgggcgacgtgcggagcgtgacacagaagcatatccaggagtggggccctttcgacctggtgatcggcggcagcccttgcaatgacctgagcatcgtgaacccagcccggaagggcctgtacgagggaaccggcagactgttcttcgagttttacagactgctgcacgacgcccggcctaaggaaggcgacgaccggcccttcttttggctgttcgagaatgtggtggccatgggagtcagcgacaagcgggatattagccggttcctggagagcaaccccgtgatgatcgatgccaaggaagtgagcgccgcccaccgggccagatacttctggggcaatctgcctggcatgaacagacccctggccagcaccgtgaacgacaagctggagctgcaggagtgcctggagcacggccggatcgccaagttcagcaaggtgagaaccatcaccacccgaagcaacagcatcaaacaaggcaaggaccagcactttcctgtgttcatgaacgagaaggaggacatcctgtggtgtaccgagatggagagagtgttcgggttcccagtccactacacagatgtcagcaacatgtctagactggccagacagagactgctgggaagaagctggtccgtccctgtgatcagacacctgttcgcccctctgaaggagtacttcgcctgcgtgagcagcggcaacagcaacgccaacagccggggccccagcttctctagcggcctggtgccactgtccctgagagggagccacatgggccccatggagatctacaaaaccgtgagcgcctggaagcggcagcctgtgcgcgtgctgagcctgtttcggaatatcgataaagtcctgaaaagcctgggattcctggagagcggctctggctccggcggtggcaccctgaagtacgtggaggatgtgacaaacgtggtcagacgggatgtggagaagtggggccccttcgatctggtgtacggcagcacccaacccctgggcagctcttgtgaccggtgccctggctggtacatgtttcagttccaccggatcctgcagtacgccctgccgagacaggagtcccagcggccattcttttggattttcatggacaacttgctgctgaccgaggatgaccaggaaactaccactcggttcctgcagaccgaagccgtgaccctgcaggacgtgagaggccgggactaccagaacgccatgcgggtgtggtccaacatccctggactgaaaagcaagcacgcacctctgacccctaaagaagaggagtacctgcaggcccaggtgcggagcagaagcaagctggacgcccctaaggtggatctgctggtgaagaattgcctcctgcccctgagagagtacttcaagtatttcagccagaatagtctgcccctgggcggcccaagcagcggcgcccctcctcccagcggcggcagcccagccggctccccaacctctaccgaggagggcacctctgagtccgccacccccgagagcggccctggcacctccaccgagcccagcgagggcagcgcacccggcagccctgccggcagccccacctccacagaggagggaaccagcaccgagcccagcgaaggcagcgccccaggcaccagcaccgagcctagtgagggcggctctggcggcggcagcgcccaggagattaaacggatcaacaagatcagaagaagacttgtgaaagacagcaacaccaagaaggccggcaagacaggccccatgaaaaccctgctggttagagtgatgacacccgatctgagagagcggctggaaaacctgagaaagaagcctgaaaatatcccccagcccatcagcaatacatctagagccaacctgaataagctgctgaccgattacaccgaaatgaagaaggcgatcctgcatgtgtactgggaagagttccagaaggaccctgtgggcctgatgagccgggtggcccagcctgccagcaagaagatcgatcagaacaagctgaaacctgagatggacgagaagggcaacctgaccaccgccggctttgcctgctctcagtgtggccagcccctgttcgtgtacaagctggagcaggtgtctgagaagggcaaggcttacaccaactacttcggacggtgcaatgtggccgagcacgaaaagctgatcctgctggcccagctgaagcccgagaaggatagcgacgaagccgtgacatatagcctgggaaagtttgggcagagggccctggatttctacagcattcatgtgaccaaggagtccacccaccccgtgaagcccctggcccagatcgccggaaacagatacgcctccggacctgtgggaaaggccctgagcgacgcatgtatgggcacaatcgcctccttcctgtctaagtaccaggacatcatcatcgaacaccagaaggtggtgaagggcaaccagaagagactggagagcctgcgggagctggccggcaaggaaaacctggaataccctagcgtgaccctgccacctcagcctcacaccaaggagggcgttgatgcctacaacgaagtgatcgcccgggtgcgaatgtgggtgaacctgaacctgtggcagaagctgaagctaagcagagatgatgccaagcctctgctgagactgaagggattcccttcctttcctctggtcgagagacaggccaacgaagtggactggtgggacatggtgtgtaacgtgaagaagctgatcaacgagaaaaaggaggatggcaaggtgttttggcagaatctggctggctacaagagacaggaagccctgagaccatacctgagcagcgaggaagatcggaagaagggaaagaaattcgctcggtaccagctgggcgacctgctgctgcacctggaaaagaagcacggcgaggactggggaaaggtgtacgacgaggcctgggagcggattgacaagaaagtggaaggcctgagcaagcacatcaagctggaagaggaacggagaagcgaggacgcccagagcaaggccgccctgaccgactggctgcgggctaaggccagcttcgtgatcgagggcctgaaggaggccgacaaggacgagttctgcagatgcgagctgaagctgcagaagtggtacggggacctgcggggaaagcccttcgccatcgaagccgagaacagcatcctggacatcagcggcttcagcaagcagtacaactgtgccttcatctggcagaaggacggcgtgaagaagctgaacctgtacctgatcatcaactacttcaagggcggcaagctgcggttcaagaagatcaaacctgaagccttcgaagccaacagattctacaccgtgatcaacaaaaagagcggcgagatcgtgcccatggaggtgaacttcaacttcgacgaccccaacctgatcatcctgcctctggcctttggcaagagacagggcagagaattcatctggaacgacctgctgtccctggaaaccggcagcctgaagctggccaacggaagagtgatcgagaagacactgtacaacagaagaacccggcaggatgagcctgccctgttcgtggccctgaccttcgagcggcgggaggtcctggactcctccaatatcaaaccaatgaacctgatcggcgtggcaagaggcgaaaacatccccgccgtgatcgccctgaccgaccccgagggctgcccactgagccggtttaaggatagcctgggaaacccaacccacatcctgagaatcggcgagagctataaggagaagcagcggaccatccaggccaagaaggaggtggagcagcggagagccggcggctacagccggaagtacgccagcaaagccaagaatctggcagacgatatggtgagaaacaccgctagagatctgctgtactacgccgtgacccaggatgccatgctgatcttcgccaacctgagccggggcttcggccggcagggcaagcggaccttcatggccgagagacagtacacacggatggaggactggctgaccgccaagctggcctacgagggcctgagcaagacctacctgtccaagacactggcccagtacacctccaagacatgcagcaactgtgggtttaccatcaccagcgccgactacgacagggtgctggagaagctgaagaagacagcaacaggctggatgaccacaattaacggcaaggagctgaaggtggagggccagattacctactacaacagatacaagagacagaacgtagtcaaggacctgtccgtcgagctggatagactgagcgaagaatctgtgaacaacgacatctcctcctggacaaagggcagaagcggagaagctctgagcctcctgaagaaaagattctcccatagacccgtgcaggagaagttcgtgtgcctgaactgcggcttcgagacacacgcagccgagcaagccgccctgaacatcgccagatcctggctgttcctgcggagccaggagtacaagaaataccagacaaacaagacaaccggcaacaccgataagagagccttcgtcgagacctggcagtccttttaccggaagaagcttaaggaggtgtggaaacctgccgtgcggtctggcggatctggcggaggctccacaagcttccagggcagcgtgaccttcagggacgtgagcatcgacttcagccaggaggagtgggagtggctgcagcccgcccagagggacctgtacaggcacgtgatgctggagaactacggccacctggtgagcctgggcctgaacatgagcaagcccgacgtggtgagcctgctggagcagggcaaggagccctggctgggcaacggcgacgtgagcagggagctgttccccgccagcaagagcaacaccagccccaagaaaaagagaaaagtctaagctgccttctgcggggcttgccttctggccatgcccttcttctctcccttgcacctgtacctcttggtctttgaataaagcctgagtaggaaggctagcaaaaaaaaaaaaaaaaaaaaaaaaaaaaaaaaaaaaaaaaaaaaaaaaaaaaaaaaaaaaaaaaaaaaaaaaaaaaaaaa

SEQ ID NO: 3860 - RNA, 5419 nt, synthetic construct
  source 1..5419: mol_type = other RNA
aggaaataagagagaaaagaagagtaagaagaaatataagagccaccatggcccctaagaagaagcgtaaagtgagccgggtgaacggcagcggcagcggcggcggcatgaaccacgaccaggagttcgacccccctaaggtgtaccctcccgtccccgccgagaagagaaagcccatccgggtcctgagcctgttcgatggcatcgccaccggtctgctggtgctgaaggacctgggcatccaggtggataggtacattgcctccgaggtgtgcgaggactccatcaccgtgggaatggtgcgtcatcagggcaagatcatgtacgtgggcgacgtgcggagcgtgacacagaagcatatccaggagtggggccctttcgacctggtgatcggcggcagcccttgcaatgacctgagcatcgtgaacccagcccggaagggcctgtacgagggaaccggcagactgttcttcgagttttacagactgctgcacgacgcccggcctaaggaaggcgacgaccggcccttcttttggctgttcgagaatgtggtggccatgggagtcagcgacaagcgggatattagccggttcctggagagcaaccccgtgatgatcgatgccaaggaagtgagcgccgcccaccgggccagatacttctggggcaatctgcctggcatgaacagacccctggccagcaccgtgaacgacaagctggagctgcaggagtgcctggagcacggccggatcgccaagttcagcaaggtgagaaccatcaccacccgaagcaacagcatcaaacaaggcaaggaccagcactttcctgtgttcatgaacgagaaggaggacatcctgtggtgtaccgagatggagagagtgttcgggttcccagtccactacacagatgtcagcaacatgtctagactggccagacagagactgctgggaagaagctggtccgtccctgtgatcagacacctgttcgcccctctgaaggagtacttcgcctgcgtgagcagcggcaacagcaacgccaacagccggggccccagcttctctagcggcctggtgccactgtccctgagagggagccacatgggccccatggagatctacaaaaccgtgagcgcctggaagcggcagcctgtgcgcgtgctgagcctgtttcggaatatcgataaagtcctgaaaagcctgggattcctggagagcggctctggctccggcggtggcaccctgaagtacgtggaggatgtgacaaacgtggtcagacgggatgtggagaagtggggccccttcgatctggtgtacggcagcacccaacccctgggcagctcttgtgaccggtgccctggctggtacatgtttcagttccaccggatcctgcagtacgccctgccgagacaggagtcccagcggccattcttttggattttcatggacaacttgctgctgaccgaggatgaccaggaaactaccactcggttcctgcagaccgaagccgtgaccctgcaggacgtgagaggccgggactaccagaacgccatgcgggtgtggtccaacatccctggactgaaaagcaagcacgcacctctgacccctaaagaagaggagtacctgcaggcccaggtgcggagcagaagcaagctggacgcccctaaggtggatctgctggtgaagaattgcctcctgcccctgagagagtacttcaagtatttcagccagaatagtctgcccctgggcggcccaagcagcggcgcccctcctcccagcggcggcagcccagccggctccccaacctctaccgaggagggcacctctgagtccgccacccccgagagcggccctggcacctccaccgagcccagcgagggcagcgcacccggcagccctgccggcagccccacctccacagaggagggaaccagcaccgagcccagcgaaggcagcgccccaggcaccagcaccgagcctagtgagggcggctctggcggcggcagcgcccaggagattaaacggatcaacaagatcagaagaagacttgtgaaagacagcaacaccaagaaggccggcaagacaggccccatgaaaaccctgctggttagagtgatgacacccgatctgagagagcggctggaaaacctgagaaagaagcctgaaaatatcccccagcccatcagcaatacatctagagccaacctgaataagctgctgaccgattacaccgaaatgaagaaggcgatcctgcatgtgtactgggaagagttccagaaggaccctgtgggcctgatgagccgggtggcccagcctgccagcaagaagatcgatcagaacaagctgaaacctgagatggacgagaagggcaacctgaccaccgccggctttgcctgctctcagtgtggccagcccctgttcgtgtacaagctggagcaggtgtctgagaagggcaaggcttacaccaactacttcggacggtgcaatgtggccgagcacgaaaagctgatcctgctggcccagctgaagcccgagaaggatagcgacgaagccgtgacatatagcctgggaaagtttgggcagagggccctggatttctacagcattcatgtgaccaaggagtccacccaccccgtgaagcccctggcccagatcgccggaaacagatacgcctccggacctgtgggaaaggccctgagcgacgcatgtatgggcacaatcgcctccttcctgtctaagtaccaggacatcatcatcgaacaccagaaggtggtgaagggcaaccagaagagactggagagcctgcgggagctggccggcaaggaaaacctggaataccctagcgtgaccctgccacctcagcctcacaccaaggagggcgttgatgcctacaacgaagtgatcgcccgggtgcgaatgtgggtgaacctgaacctgtggcagaagctgaagctaagcagagatgatgccaagcctctgctgagactgaagggattcccttcctttcctctggtcgagagacaggccaacgaagtggactggtgggacatggtgtgtaacgtgaagaagctgatcaacgagaaaaaggaggatggcaaggtgttttggcagaatctggctggctacaagagacaggaagccctgagaccatacctgagcagcgaggaagatcggaagaagggaaagaaattcgctcggtaccagctgggcgacctgctgctgcacctggaaaagaagcacggcgaggactggggaaaggtgtacgacgaggcctgggagcggattgacaagaaagtggaaggcctgagcaagcacatcaagctggaagaggaacggagaagcgaggacgcccagagcaaggccgccctgaccgactggctgcgggctaaggccagcttcgtgatcgagggcctgaaggaggccgacaaggacgagttctgcagatgcgagctgaagctgcagaagtggtacggggacctgcggggaaagcccttcgccatcgaagccgagaacagcatcctggacatcagcggcttcagcaagcagtacaactgtgccttcatctggcagaaggacggcgtgaagaagctgaacctgtacctgatcatcaactacttcaagggcggcaagctgcggttcaagaagatcaaacctgaagccttcgaagccaacagattctacaccgtgatcaacaaaaagagcggcgagatcgtgcccatggaggtgaacttcaacttcgacgaccccaacctgatcatcctgcctctggcctttggcaagagacagggcagagaattcatctggaacgacctgctgtccctggaaaccggcagcctgaagctggccaacggaagagtgatcgagaagacactgtacaacagaagaacccggcaggatgagcctgccctgttcgtggccctgaccttcgagcggcgggaggtcctggactcctccaatatcaaaccaatgaacctgatcggcgtggcaagaggcgaaaacatccccgccgtgatcgccctgaccgaccccgagggctgcccactgagccggtttaaggatagcctgggaaacccaacccacatcctgagaatcggcgagagctataaggagaagcagcggaccatccaggccaagaaggaggtggagcagcggagagccggcggctacagccggaagtacgccagcaaagccaagaatctggcagacgatatggtgagaaacaccgctagagatctgctgtactacgccgtgacccaggatgccatgctgatcttcgccaacctgagccggggcttcggccggcagggcaagcggaccttcatggccgagagacagtacacacggatggaggactggctgaccgccaagctggcctacgagggcctgagcaagacctacctgtccaagacactggcccagtacacctccaagacatgcagcaactgtgggtttaccatcaccagcgccgactacgacagggtgctggagaagctgaagaagacagcaacaggctggatgaccacaattaacggcaaggagctgaaggtggagggccagattacctactacaacagatacaagagacagaacgtagtcaaggacctgtccgtcgagctggatagactgagcgaagaatctgtgaacaacgacatctcctcctggacaaagggcagaagcggagaagctctgagcctcctgaagaaaagattctcccatagacccgtgcaggagaagttcgtgtgcctgaactgcggcttcgagacacacgcagccgagcaagccgccctgaacatcgccagatcctggctgttcctgcggagccaggagtacaagaaataccagacaaacaagacaaccggcaacaccgataagagagccttcgtcgagacctggcagtccttttaccggaagaagcttaaggaggtgtggaaacctgccgtgcggtctggcggatctggcggaggctccacaagccagggcagcgtgaccttcgaggacgtggccgtgcacttcagctgggacgagtggcacctgctggacaaggcccagaggtgcctgtacagggacgtgatggccgagaacctggccctgatcaccagcctgggcctgtggcccggcgtgggcgacgccgaggccagcagcgagcagagcgccagcctgaagggcatgagccaggtgaggaccttcagggagggcctgagcccccagagggcccagaccagccccaagaaaaagagaaaagtctaagctgccttctgcggggcttgccttctggccatgcccttcttctctcccttgcacctgtacctcttggtctttgaataaagcctgagtaggaaggctagcaaaaaaaaaaaaaaaaaaaaaaaaaaaaaaaaaaaaaaaaaaaaaaaaaaaaaaaaaaaaaaaaaaaaaaaaaaaaaaaa

SEQ ID NO: 3861 - RNA, 5419 nt, synthetic construct
  source 1..5419: mol_type = other RNA
aggaaataagagagaaaagaagagtaagaagaaatataagagccaccatggcccctaagaagaagcgtaaagtgagccgggtgaacggcagcggcagcggcggcggcatgaaccacgaccaggagttcgacccccctaaggtgtaccctcccgtccccgccgagaagagaaagcccatccgggtcctgagcctgttcgatggcatcgccaccggtctgctggtgctgaaggacctgggcatccaggtggataggtacattgcctccgaggtgtgcgaggactccatcaccgtgggaatggtgcgtcatcagggcaagatcatgtacgtgggcgacgtgcggagcgtgacacagaagcatatccaggagtggggccctttcgacctggtgatcggcggcagcccttgcaatgacctgagcatcgtgaacccagcccggaagggcctgtacgagggaaccggcagactgttcttcgagttttacagactgctgcacgacgcccggcctaaggaaggcgacgaccggcccttcttttggctgttcgagaatgtggtggccatgggagtcagcgacaagcgggatattagccggttcctggagagcaaccccgtgatgatcgatgccaaggaagtgagcgccgcccaccgggccagatacttctggggcaatctgcctggcatgaacagacccctggccagcaccgtgaacgacaagctggagctgcaggagtgcctggagcacggccggatcgccaagttcagcaaggtgagaaccatcaccacccgaagcaacagcatcaaacaaggcaaggaccagcactttcctgtgttcatgaacgagaaggaggacatcctgtggtgtaccgagatggagagagtgttcgggttcccagtccactacacagatgtcagcaacatgtctagactggccagacagagactgctgggaagaagctggtccgtccctgtgatcagacacctgttcgcccctctgaaggagtacttcgcctgcgtgagcagcggcaacagcaacgccaacagccggggccccagcttctctagcggcctggtgccactgtccctgagagggagccacatgggccccatggagatctacaaaaccgtgagcgcctggaagcggcagcctgtgcgcgtgctgagcctgtttcggaatatcgataaagtcctgaaaagcctgggattcctggagagcggctctggctccggcggtggcaccctgaagtacgtggaggatgtgacaaacgtggtcagacgggatgtggagaagtggggccccttcgatctggtgtacggcagcacccaacccctgggcagctcttgtgaccggtgccctggctggtacatgtttcagttccaccggatcctgcagtacgccctgccgagacaggagtcccagcggccattcttttggattttcatggacaacttgctgctgaccgaggatgaccaggaaactaccactcggttcctgcagaccgaagccgtgaccctgcaggacgtgagaggccgggactaccagaacgccatgcgggtgtggtccaacatccctggactgaaaagcaagcacgcacctctgacccctaaagaagaggagtacctgcaggcccaggtgcggagcagaagcaagctggacgcccctaaggtggatctgctggtgaagaattgcctcctgcccctgagagagtacttcaagtatttcagccagaatagtctgcccctgggcggcccaagcagcggcgcccctcctcccagcggcggcagcccagccggctccccaacctctaccgaggagggcacctctgagtccgccacccccgagagcggccctggcacctccaccgagcccagcgagggcagcgcacccggcagccctgccggcagccccacctccacagaggagggaaccagcaccgagcccagcgaaggcagcgccccaggcaccagcaccgagcctagtgagggcggctctggcggcggcagcgcccaggagattaaacggatcaacaagatcagaagaagacttgtgaaagacagcaacaccaagaaggccggcaagacaggccccatgaaaaccctgctggttagagtgatgacacccgatctgagagagcggctggaaaacctgagaaagaagcctgaaaatatcccccagcccatcagcaatacatctagagccaacctgaataagctgctgaccgattacaccgaaatgaagaaggcgatcctgcatgtgtactgggaagagttccagaaggaccctgtgggcctgatgagccgggtggcccagcctgccagcaagaagatcgatcagaacaagctgaaacctgagatggacgagaagggcaacctgaccaccgccggctttgcctgctctcagtgtggccagcccctgttcgtgtacaagctggagcaggtgtctgagaagggcaaggcttacaccaactacttcggacggtgcaatgtggccgagcacgaaaagctgatcctgctggcccagctgaagcccgagaaggatagcgacgaagccgtgacatatagcctgggaaagtttgggcagagggccctggatttctacagcattcatgtgaccaaggagtccacccaccccgtgaagcccctggcccagatcgccggaaacagatacgcctccggacctgtgggaaaggccctgagcgacgcatgtatgggcacaatcgcctccttcctgtctaagtaccaggacatcatcatcgaacaccagaaggtggtgaagggcaaccagaagagactggagagcctgcgggagctggccggcaaggaaaacctggaataccctagcgtgaccctgccacctcagcctcacaccaaggagggcgttgatgcctacaacgaagtgatcgcccgggtgcgaatgtgggtgaacctgaacctgtggcagaagctgaagctaagcagagatgatgccaagcctctgctgagactgaagggattcccttcctttcctctggtcgagagacaggccaacgaagtggactggtgggacatggtgtgtaacgtgaagaagctgatcaacgagaaaaaggaggatggcaaggtgttttggcagaatctggctggctacaagagacaggaagccctgagaccatacctgagcagcgaggaagatcggaagaagggaaagaaattcgctcggtaccagctgggcgacctgctgctgcacctggaaaagaagcacggcgaggactggggaaaggtgtacgacgaggcctgggagcggattgacaagaaagtggaaggcctgagcaagcacatcaagctggaagaggaacggagaagcgaggacgcccagagcaaggccgccctgaccgactggctgcgggctaaggccagcttcgtgatcgagggcctgaaggaggccgacaaggacgagttctgcagatgcgagctgaagctgcagaagtggtacggggacctgcggggaaagcccttcgccatcgaagccgagaacagcatcctggacatcagcggcttcagcaagcagtacaactgtgccttcatctggcagaaggacggcgtgaagaagctgaacctgtacctgatcatcaactacttcaagggcggcaagctgcggttcaagaagatcaaacctgaagccttcgaagccaacagattctacaccgtgatcaacaaaaagagcggcgagatcgtgcccatggaggtgaacttcaacttcgacgaccccaacctgatcatcctgcctctggcctttggcaagagacagggcagagaattcatctggaacgacctgctgtccctggaaaccggcagcctgaagctggccaacggaagagtgatcgagaagacactgtacaacagaagaacccggcaggatgagcctgccctgttcgtggccctgaccttcgagcggcgggaggtcctggactcctccaatatcaaaccaatgaacctgatcggcgtggcaagaggcgaaaacatccccgccgtgatcgccctgaccgaccccgagggctgcccactgagccggtttaaggatagcctgggaaacccaacccacatcctgagaatcggcgagagctataaggagaagcagcggaccatccaggccaagaaggaggtggagcagcggagagccggcggctacagccggaagtacgccagcaaagccaagaatctggcagacgatatggtgagaaacaccgctagagatctgctgtactacgccgtgacccaggatgccatgctgatcttcgccaacctgagccggggcttcggccggcagggcaagcggaccttcatggccgagagacagtacacacggatggaggactggctgaccgccaagctggcctacgagggcctgagcaagacctacctgtccaagacactggcccagtacacctccaagacatgcagcaactgtgggtttaccatcaccagcgccgactacgacagggtgctggagaagctgaagaagacagcaacaggctggatgaccacaattaacggcaaggagctgaaggtggagggccagattacctactacaacagatacaagagacagaacgtagtcaaggacctgtccgtcgagctggatagactgagcgaagaatctgtgaacaacgacatctcctcctggacaaagggcagaagcggagaagctctgagcctcctgaagaaaagattctcccatagacccgtgcaggagaagttcgtgtgcctgaactgcggcttcgagacacacgcagccgagcaagccgccctgaacatcgccagatcctggctgttcctgcggagccaggagtacaagaaataccagacaaacaagacaaccggcaacaccgataagagagccttcgtcgagacctggcagtccttttaccggaagaagcttaaggaggtgtggaaacctgccgtgcggtctggcggatctggcggaggctccacaagccaccagatcagcgtgaccttcgacgacgtggccctggacttcacccaggaggagtggatcctgctggacctgagccagaggaacctgtacaggaacgtgatgctggagaactaccagaacctggtgaccgtggagtaccagctgagcaagcccaagctgatcgcctggctggagcagcaggagctgagggccgtggagcagggcatcctgcaggagtgggagaccggcctgcagaccaagggcaccagccccaagaaaaagagaaaagtctaagctgccttctgcggggcttgccttctggccatgcccttcttctctcccttgcacctgtacctcttggtctttgaataaagcctgagtaggaaggctagcaaaaaaaaaaaaaaaaaaaaaaaaaaaaaaaaaaaaaaaaaaaaaaaaaaaaaaaaaaaaaaaaaaaaaaaaaaaaaaaa

SEQ ID NO: 3862 - RNA, 5419 nt, synthetic construct
  source 1..5419: mol_type = other RNA
aggaaataagagagaaaagaagagtaagaagaaatataagagccaccatggcccctaagaagaagcgtaaagtgagccgggtgaacggcagcggcagcggcggcggcatgaaccacgaccaggagttcgacccccctaaggtgtaccctcccgtccccgccgagaagagaaagcccatccgggtcctgagcctgttcgatggcatcgccaccggtctgctggtgctgaaggacctgggcatccaggtggataggtacattgcctccgaggtgtgcgaggactccatcaccgtgggaatggtgcgtcatcagggcaagatcatgtacgtgggcgacgtgcggagcgtgacacagaagcatatccaggagtggggccctttcgacctggtgatcggcggcagcccttgcaatgacctgagcatcgtgaacccagcccggaagggcctgtacgagggaaccggcagactgttcttcgagttttacagactgctgcacgacgcccggcctaaggaaggcgacgaccggcccttcttttggctgttcgagaatgtggtggccatgggagtcagcgacaagcgggatattagccggttcctggagagcaaccccgtgatgatcgatgccaaggaagtgagcgccgcccaccgggccagatacttctggggcaatctgcctggcatgaacagacccctggccagcaccgtgaacgacaagctggagctgcaggagtgcctggagcacggccggatcgccaagttcagcaaggtgagaaccatcaccacccgaagcaacagcatcaaacaaggcaaggaccagcactttcctgtgttcatgaacgagaaggaggacatcctgtggtgtaccgagatggagagagtgttcgggttcccagtccactacacagatgtcagcaacatgtctagactggccagacagagactgctgggaagaagctggtccgtccctgtgatcagacacctgttcgcccctctgaaggagtacttcgcctgcgtgagcagcggcaacagcaacgccaacagccggggccccagcttctctagcggcctggtgccactgtccctgagagggagccacatgggccccatggagatctacaaaaccgtgagcgcctggaagcggcagcctgtgcgcgtgctgagcctgtttcggaatatcgataaagtcctgaaaagcctgggattcctggagagcggctctggctccggcggtggcaccctgaagtacgtggaggatgtgacaaacgtggtcagacgggatgtggagaagtggggccccttcgatctggtgtacggcagcacccaacccctgggcagctcttgtgaccggtgccctggctggtacatgtttcagttccaccggatcctgcagtacgccctgccgagacaggagtcccagcggccattcttttggattttcatggacaacttgctgctgaccgaggatgaccaggaaactaccactcggttcctgcagaccgaagccgtgaccctgcaggacgtgagaggccgggactaccagaacgccatgcgggtgtggtccaacatccctggactgaaaagcaagcacgcacctctgacccctaaagaagaggagtacctgcaggcccaggtgcggagcagaagcaagctggacgcccctaaggtggatctgctggtgaagaattgcctcctgcccctgagagagtacttcaagtatttcagccagaatagtctgcccctgggcggcccaagcagcggcgcccctcctcccagcggcggcagcccagccggctccccaacctctaccgaggagggcacctctgagtccgccacccccgagagcggccctggcacctccaccgagcccagcgagggcagcgcacccggcagccctgccggcagccccacctccacagaggagggaaccagcaccgagcccagcgaaggcagcgccccaggcaccagcaccgagcctagtgagggcggctctggcggcggcagcgcccaggagattaaacggatcaacaagatcagaagaagacttgtgaaagacagcaacaccaagaaggccggcaagacaggccccatgaaaaccctgctggttagagtgatgacacccgatctgagagagcggctggaaaacctgagaaagaagcctgaaaatatcccccagcccatcagcaatacatctagagccaacctgaataagctgctgaccgattacaccgaaatgaagaaggcgatcctgcatgtgtactgggaagagttccagaaggaccctgtgggcctgatgagccgggtggcccagcctgccagcaagaagatcgatcagaacaagctgaaacctgagatggacgagaagggcaacctgaccaccgccggctttgcctgctctcagtgtggccagcccctgttcgtgtacaagctggagcaggtgtctgagaagggcaaggcttacaccaactacttcggacggtgcaatgtggccgagcacgaaaagctgatcctgctggcccagctgaagcccgagaaggatagcgacgaagccgtgacatatagcctgggaaagtttgggcagagggccctggatttctacagcattcatgtgaccaaggagtccacccaccccgtgaagcccctggcccagatcgccggaaacagatacgcctccggacctgtgggaaaggccctgagcgacgcatgtatgggcacaatcgcctccttcctgtctaagtaccaggacatcatcatcgaacaccagaaggtggtgaagggcaaccagaagagactggagagcctgcgggagctggccggcaaggaaaacctggaataccctagcgtgaccctgccacctcagcctcacaccaaggagggcgttgatgcctacaacgaagtgatcgcccgggtgcgaatgtgggtgaacctgaacctgtggcagaagctgaagctaagcagagatgatgccaagcctctgctgagactgaagggattcccttcctttcctctggtcgagagacaggccaacgaagtggactggtgggacatggtgtgtaacgtgaagaagctgatcaacgagaaaaaggaggatggcaaggtgttttggcagaatctggctggctacaagagacaggaagccctgagaccatacctgagcagcgaggaagatcggaagaagggaaagaaattcgctcggtaccagctgggcgacctgctgctgcacctggaaaagaagcacggcgaggactggggaaaggtgtacgacgaggcctgggagcggattgacaagaaagtggaaggcctgagcaagcacatcaagctggaagaggaacggagaagcgaggacgcccagagcaaggccgccctgaccgactggctgcgggctaaggccagcttcgtgatcgagggcctgaaggaggccgacaaggacgagttctgcagatgcgagctgaagctgcagaagtggtacggggacctgcggggaaagcccttcgccatcgaagccgagaacagcatcctggacatcagcggcttcagcaagcagtacaactgtgccttcatctggcagaaggacggcgtgaagaagctgaacctgtacctgatcatcaactacttcaagggcggcaagctgcggttcaagaagatcaaacctgaagccttcgaagccaacagattctacaccgtgatcaacaaaaagagcggcgagatcgtgcccatggaggtgaacttcaacttcgacgaccccaacctgatcatcctgcctctggcctttggcaagagacagggcagagaattcatctggaacgacctgctgtccctggaaaccggcagcctgaagctggccaacggaagagtgatcgagaagacactgtacaacagaagaacccggcaggatgagcctgccctgttcgtggccctgaccttcgagcggcgggaggtcctggactcctccaatatcaaaccaatgaacctgatcggcgtggcaagaggcgaaaacatccccgccgtgatcgccctgaccgaccccgagggctgcccactgagccggtttaaggatagcctgggaaacccaacccacatcctgagaatcggcgagagctataaggagaagcagcggaccatccaggccaagaaggaggtggagcagcggagagccggcggctacagccggaagtacgccagcaaagccaagaatctggcagacgatatggtgagaaacaccgctagagatctgctgtactacgccgtgacccaggatgccatgctgatcttcgccaacctgagccggggcttcggccggcagggcaagcggaccttcatggccgagagacagtacacacggatggaggactggctgaccgccaagctggcctacgagggcctgagcaagacctacctgtccaagacactggcccagtacacctccaagacatgcagcaactgtgggtttaccatcaccagcgccgactacgacagggtgctggagaagctgaagaagacagcaacaggctggatgaccacaattaacggcaaggagctgaaggtggagggccagattacctactacaacagatacaagagacagaacgtagtcaaggacctgtccgtcgagctggatagactgagcgaagaatctgtgaacaacgacatctcctcctggacaaagggcagaagcggagaagctctgagcctcctgaagaaaagattctcccatagacccgtgcaggagaagttcgtgtgcctgaactgcggcttcgagacacacgcagccgagcaagccgccctgaacatcgccagatcctggctgttcctgcggagccaggagtacaagaaataccagacaaacaagacaaccggcaacaccgataagagagccttcgtcgagacctggcagtccttttaccggaagaagcttaaggaggtgtggaaacctgccgtgcggtctggcggatctggcggaggctccacaagcgccagctgcggcctgctgaccttcagggacgtggccatcgagttcagccaggaggagtggaggtgcctgagccacacccagagggagctgtacagggacgtgatgctggagaactacggccacctgctgttcctgggcctgatcgtgagcaagcccgacctggtgagcttcctggagctgaggaaggacccctgggacgtgaagaggaggaagaccgccggcttcgaccccggcaggtggcagaccagccccaagaaaaagagaaaagtctaagctgccttctgcggggcttgccttctggccatgcccttcttctctcccttgcacctgtacctcttggtctttgaataaagcctgagtaggaaggctagcaaaaaaaaaaaaaaaaaaaaaaaaaaaaaaaaaaaaaaaaaaaaaaaaaaaaaaaaaaaaaaaaaaaaaaaaaaaaaaaa

SEQ ID NO: 3863 - RNA, 5455 nt, synthetic construct
  source 1..5455: mol_type = other RNA
aggaaataagagagaaaagaagagtaagaagaaatataagagccaccatggcccctaagaagaagcgtaaagtgagccgggtgaacggcagcggcagcggcggcggcatgaaccacgaccaggagttcgacccccctaaggtgtaccctcccgtccccgccgagaagagaaagcccatccgggtcctgagcctgttcgatggcatcgccaccggtctgctggtgctgaaggacctgggcatccaggtggataggtacattgcctccgaggtgtgcgaggactccatcaccgtgggaatggtgcgtcatcagggcaagatcatgtacgtgggcgacgtgcggagcgtgacacagaagcatatccaggagtggggccctttcgacctggtgatcggcggcagcccttgcaatgacctgagcatcgtgaacccagcccggaagggcctgtacgagggaaccggcagactgttcttcgagttttacagactgctgcacgacgcccggcctaaggaaggcgacgaccggcccttcttttggctgttcgagaatgtggtggccatgggagtcagcgacaagcgggatattagccggttcctggagagcaaccccgtgatgatcgatgccaaggaagtgagcgccgcccaccgggccagatacttctggggcaatctgcctggcatgaacagacccctggccagcaccgtgaacgacaagctggagctgcaggagtgcctggagcacggccggatcgccaagttcagcaaggtgagaaccatcaccacccgaagcaacagcatcaaacaaggcaaggaccagcactttcctgtgttcatgaacgagaaggaggacatcctgtggtgtaccgagatggagagagtgttcgggttcccagtccactacacagatgtcagcaacatgtctagactggccagacagagactgctgggaagaagctggtccgtccctgtgatcagacacctgttcgcccctctgaaggagtacttcgcctgcgtgagcagcggcaacagcaacgccaacagccggggccccagcttctctagcggcctggtgccactgtccctgagagggagccacatgggccccatggagatctacaaaaccgtgagcgcctggaagcggcagcctgtgcgcgtgctgagcctgtttcggaatatcgataaagtcctgaaaagcctgggattcctggagagcggctctggctccggcggtggcaccctgaagtacgtggaggatgtgacaaacgtggtcagacgggatgtggagaagtggggccccttcgatctggtgtacggcagcacccaacccctgggcagctcttgtgaccggtgccctggctggtacatgtttcagttccaccggatcctgcagtacgccctgccgagacaggagtcccagcggccattcttttggattttcatggacaacttgctgctgaccgaggatgaccaggaaactaccactcggttcctgcagaccgaagccgtgaccctgcaggacgtgagaggccgggactaccagaacgccatgcgggtgtggtccaacatccctggactgaaaagcaagcacgcacctctgacccctaaagaagaggagtacctgcaggcccaggtgcggagcagaagcaagctggacgcccctaaggtggatctgctggtgaagaattgcctcctgcccctgagagagtacttcaagtatttcagccagaatagtctgcccctgggcggcccaagcagcggcgcccctcctcccagcggcggcagcccagccggctccccaacctctaccgaggagggcacctctgagtccgccacccccgagagcggccctggcacctccaccgagcccagcgagggcagcgcacccggcagccctgccggcagccccacctccacagaggagggaaccagcaccgagcccagcgaaggcagcgccccaggcaccagcaccgagcctagtgagggcggctctggcggcggcagcgcccaggagattaaacggatcaacaagatcagaagaagacttgtgaaagacagcaacaccaagaaggccggcaagacaggccccatgaaaaccctgctggttagagtgatgacacccgatctgagagagcggctggaaaacctgagaaagaagcctgaaaatatcccccagcccatcagcaatacatctagagccaacctgaataagctgctgaccgattacaccgaaatgaagaaggcgatcctgcatgtgtactgggaagagttccagaaggaccctgtgggcctgatgagccgggtggcccagcctgccagcaagaagatcgatcagaacaagctgaaacctgagatggacgagaagggcaacctgaccaccgccggctttgcctgctctcagtgtggccagcccctgttcgtgtacaagctggagcaggtgtctgagaagggcaaggcttacaccaactacttcggacggtgcaatgtggccgagcacgaaaagctgatcctgctggcccagctgaagcccgagaaggatagcgacgaagccgtgacatatagcctgggaaagtttgggcagagggccctggatttctacagcattcatgtgaccaaggagtccacccaccccgtgaagcccctggcccagatcgccggaaacagatacgcctccggacctgtgggaaaggccctgagcgacgcatgtatgggcacaatcgcctccttcctgtctaagtaccaggacatcatcatcgaacaccagaaggtggtgaagggcaaccagaagagactggagagcctgcgggagctggccggcaaggaaaacctggaataccctagcgtgaccctgccacctcagcctcacaccaaggagggcgttgatgcctacaacgaagtgatcgcccgggtgcgaatgtgggtgaacctgaacctgtggcagaagctgaagctaagcagagatgatgccaagcctctgctgagactgaagggattcccttcctttcctctggtcgagagacaggccaacgaagtggactggtgggacatggtgtgtaacgtgaagaagctgatcaacgagaaaaaggaggatggcaaggtgttttggcagaatctggctggctacaagagacaggaagccctgagaccatacctgagcagcgaggaagatcggaagaagggaaagaaattcgctcggtaccagctgggcgacctgctgctgcacctggaaaagaagcacggcgaggactggggaaaggtgtacgacgaggcctgggagcggattgacaagaaagtggaaggcctgagcaagcacatcaagctggaagaggaacggagaagcgaggacgcccagagcaaggccgccctgaccgactggctgcgggctaaggccagcttcgtgatcgagggcctgaaggaggccgacaaggacgagttctgcagatgcgagctgaagctgcagaagtggtacggggacctgcggggaaagcccttcgccatcgaagccgagaacagcatcctggacatcagcggcttcagcaagcagtacaactgtgccttcatctggcagaaggacggcgtgaagaagctgaacctgtacctgatcatcaactacttcaagggcggcaagctgcggttcaagaagatcaaacctgaagccttcgaagccaacagattctacaccgtgatcaacaaaaagagcggcgagatcgtgcccatggaggtgaacttcaacttcgacgaccccaacctgatcatcctgcctctggcctttggcaagagacagggcagagaattcatctggaacgacctgctgtccctggaaaccggcagcctgaagctggccaacggaagagtgatcgagaagacactgtacaacagaagaacccggcaggatgagcctgccctgttcgtggccctgaccttcgagcggcgggaggtcctggactcctccaatatcaaaccaatgaacctgatcggcgtggcaagaggcgaaaacatccccgccgtgatcgccctgaccgaccccgagggctgcccactgagccggtttaaggatagcctgggaaacccaacccacatcctgagaatcggcgagagctataaggagaagcagcggaccatccaggccaagaaggaggtggagcagcggagagccggcggctacagccggaagtacgccagcaaagccaagaatctggcagacgatatggtgagaaacaccgctagagatctgctgtactacgccgtgacccaggatgccatgctgatcttcgccaacctgagccggggcttcggccggcagggcaagcggaccttcatggccgagagacagtacacacggatggaggactggctgaccgccaagctggcctacgagggcctgagcaagacctacctgtccaagacactggcccagtacacctccaagacatgcagcaactgtgggtttaccatcaccagcgccgactacgacagggtgctggagaagctgaagaagacagcaacaggctggatgaccacaattaacggcaaggagctgaaggtggagggccagattacctactacaacagatacaagagacagaacgtagtcaaggacctgtccgtcgagctggatagactgagcgaagaatctgtgaacaacgacatctcctcctggacaaagggcagaagcggagaagctctgagcctcctgaagaaaagattctcccatagacccgtgcaggagaagttcgtgtgcctgaactgcggcttcgagacacacgcagccgagcaagccgccctgaacatcgccagatcctggctgttcctgcggagccaggagtacaagaaataccagacaaacaagacaaccggcaacaccgataagagagccttcgtcgagacctggcagtccttttaccggaagaagcttaaggaggtgtggaaacctgccgtgcggtctggcggatctggcggaggctccacaagcgtgaccttccaggaggtggccgtgtgcttcaccgaggaggagtgggccctgctggaccccggccagagggccctgtacagggtggtgatgcaggagaactacgaggccgtgaccagcctggtggccaagggcaacaagaacagcctgtgccagaccttctgcctgtgctggggcagccccagcagcatgctgttctgcagccccagcctgctgcagggcctgcagaagccccaggactgcaggggcctgtacggcggcgccccccagtgccagaccgtgaccagccccaagaaaaagagaaaagtctaagctgccttctgcggggcttgccttctggccatgcccttcttctctcccttgcacctgtacctcttggtctttgaataaagcctgagtaggaaggctagcaaaaaaaaaaaaaaaaaaaaaaaaaaaaaaaaaaaaaaaaaaaaaaaaaaaaaaaaaaaaaaaaaaaaaaaaaaaaaaaa

SEQ ID NO: 3864 - RNA, 5419 nt, synthetic construct
  source 1..5419: mol_type = other RNA
aggaaataagagagaaaagaagagtaagaagaaatataagagccaccatggcccctaagaagaagcgtaaagtgagccgggtgaacggcagcggcagcggcggcggcatgaaccacgaccaggagttcgacccccctaaggtgtaccctcccgtccccgccgagaagagaaagcccatccgggtcctgagcctgttcgatggcatcgccaccggtctgctggtgctgaaggacctgggcatccaggtggataggtacattgcctccgaggtgtgcgaggactccatcaccgtgggaatggtgcgtcatcagggcaagatcatgtacgtgggcgacgtgcggagcgtgacacagaagcatatccaggagtggggccctttcgacctggtgatcggcggcagcccttgcaatgacctgagcatcgtgaacccagcccggaagggcctgtacgagggaaccggcagactgttcttcgagttttacagactgctgcacgacgcccggcctaaggaaggcgacgaccggcccttcttttggctgttcgagaatgtggtggccatgggagtcagcgacaagcgggatattagccggttcctggagagcaaccccgtgatgatcgatgccaaggaagtgagcgccgcccaccgggccagatacttctggggcaatctgcctggcatgaacagacccctggccagcaccgtgaacgacaagctggagctgcaggagtgcctggagcacggccggatcgccaagttcagcaaggtgagaaccatcaccacccgaagcaacagcatcaaacaaggcaaggaccagcactttcctgtgttcatgaacgagaaggaggacatcctgtggtgtaccgagatggagagagtgttcgggttcccagtccactacacagatgtcagcaacatgtctagactggccagacagagactgctgggaagaagctggtccgtccctgtgatcagacacctgttcgcccctctgaaggagtacttcgcctgcgtgagcagcggcaacagcaacgccaacagccggggccccagcttctctagcggcctggtgccactgtccctgagagggagccacatgggccccatggagatctacaaaaccgtgagcgcctggaagcggcagcctgtgcgcgtgctgagcctgtttcggaatatcgataaagtcctgaaaagcctgggattcctggagagcggctctggctccggcggtggcaccctgaagtacgtggaggatgtgacaaacgtggtcagacgggatgtggagaagtggggccccttcgatctggtgtacggcagcacccaacccctgggcagctcttgtgaccggtgccctggctggtacatgtttcagttccaccggatcctgcagtacgccctgccgagacaggagtcccagcggccattcttttggattttcatggacaacttgctgctgaccgaggatgaccaggaaactaccactcggttcctgcagaccgaagccgtgaccctgcaggacgtgagaggccgggactaccagaacgccatgcgggtgtggtccaacatccctggactgaaaagcaagcacgcacctctgacccctaaagaagaggagtacctgcaggcccaggtgcggagcagaagcaagctggacgcccctaaggtggatctgctggtgaagaattgcctcctgcccctgagagagtacttcaagtatttcagccagaatagtctgcccctgggcggcccaagcagcggcgcccctcctcccagcggcggcagcccagccggctccccaacctctaccgaggagggcacctctgagtccgccacccccgagagcggccctggcacctccaccgagcccagcgagggcagcgcacccggcagccctgccggcagccccacctccacagaggagggaaccagcaccgagcccagcgaaggcagcgccccaggcaccagcaccgagcctagtgagggcggctctggcggcggcagcgcccaggagattaaacggatcaacaagatcagaagaagacttgtgaaagacagcaacaccaagaaggccggcaagacaggccccatgaaaaccctgctggttagagtgatgacacccgatctgagagagcggctggaaaacctgagaaagaagcctgaaaatatcccccagcccatcagcaatacatctagagccaacctgaataagctgctgaccgattacaccgaaatgaagaaggcgatcctgcatgtgtactgggaagagttccagaaggaccctgtgggcctgatgagccgggtggcccagcctgccagcaagaagatcgatcagaacaagctgaaacctgagatggacgagaagggcaacctgaccaccgccggctttgcctgctctcagtgtggccagcccctgttcgtgtacaagctggagcaggtgtctgagaagggcaaggcttacaccaactacttcggacggtgcaatgtggccgagcacgaaaagctgatcctgctggcccagctgaagcccgagaaggatagcgacgaagccgtgacatatagcctgggaaagtttgggcagagggccctggatttctacagcattcatgtgaccaaggagtccacccaccccgtgaagcccctggcccagatcgccggaaacagatacgcctccggacctgtgggaaaggccctgagcgacgcatgtatgggcacaatcgcctccttcctgtctaagtaccaggacatcatcatcgaacaccagaaggtggtgaagggcaaccagaagagactggagagcctgcgggagctggccggcaaggaaaacctggaataccctagcgtgaccctgccacctcagcctcacaccaaggagggcgttgatgcctacaacgaagtgatcgcccgggtgcgaatgtgggtgaacctgaacctgtggcagaagctgaagctaagcagagatgatgccaagcctctgctgagactgaagggattcccttcctttcctctggtcgagagacaggccaacgaagtggactggtgggacatggtgtgtaacgtgaagaagctgatcaacgagaaaaaggaggatggcaaggtgttttggcagaatctggctggctacaagagacaggaagccctgagaccatacctgagcagcgaggaagatcggaagaagggaaagaaattcgctcggtaccagctgggcgacctgctgctgcacctggaaaagaagcacggcgaggactggggaaaggtgtacgacgaggcctgggagcggattgacaagaaagtggaaggcctgagcaagcacatcaagctggaagaggaacggagaagcgaggacgcccagagcaaggccgccctgaccgactggctgcgggctaaggccagcttcgtgatcgagggcctgaaggaggccgacaaggacgagttctgcagatgcgagctgaagctgcagaagtggtacggggacctgcggggaaagcccttcgccatcgaagccgagaacagcatcctggacatcagcggcttcagcaagcagtacaactgtgccttcatctggcagaaggacggcgtgaagaagctgaacctgtacctgatcatcaactacttcaagggcggcaagctgcggttcaagaagatcaaacctgaagccttcgaagccaacagattctacaccgtgatcaacaaaaagagcggcgagatcgtgcccatggaggtgaacttcaacttcgacgaccccaacctgatcatcctgcctctggcctttggcaagagacagggcagagaattcatctggaacgacctgctgtccctggaaaccggcagcctgaagctggccaacggaagagtgatcgagaagacactgtacaacagaagaacccggcaggatgagcctgccctgttcgtggccctgaccttcgagcggcgggaggtcctggactcctccaatatcaaaccaatgaacctgatcggcgtggcaagaggcgaaaacatccccgccgtgatcgccctgaccgaccccgagggctgcccactgagccggtttaaggatagcctgggaaacccaacccacatcctgagaatcggcgagagctataaggagaagcagcggaccatccaggccaagaaggaggtggagcagcggagagccggcggctacagccggaagtacgccagcaaagccaagaatctggcagacgatatggtgagaaacaccgctagagatctgctgtactacgccgtgacccaggatgccatgctgatcttcgccaacctgagccggggcttcggccggcagggcaagcggaccttcatggccgagagacagtacacacggatggaggactggctgaccgccaagctggcctacgagggcctgagcaagacctacctgtccaagacactggcccagtacacctccaagacatgcagcaactgtgggtttaccatcaccagcgccgactacgacagggtgctggagaagctgaagaagacagcaacaggctggatgaccacaattaacggcaaggagctgaaggtggagggccagattacctactacaacagatacaagagacagaacgtagtcaaggacctgtccgtcgagctggatagactgagcgaagaatctgtgaacaacgacatctcctcctggacaaagggcagaagcggagaagctctgagcctcctgaagaaaagattctcccatagacccgtgcaggagaagttcgtgtgcctgaactgcggcttcgagacacacgcagccgagcaagccgccctgaacatcgccagatcctggctgttcctgcggagccaggagtacaagaaataccagacaaacaagacaaccggcaacaccgataagagagccttcgtcgagacctggcagtccttttaccggaagaagcttaaggaggtgtggaaacctgccgtgcggtctggcggatctggcggaggctccacaagcagccacggccccctgagcttcgaggacgtggccatcgccttcaccaaggaggagtggcagcagctggaccccgcccagaggaccctgtacagggacgtgatgctggagaacttcagccacctggtgagcctgggccaccccgtgagcaagcccgacatcatcagcaagctggagcagggcgaggagccctggatcatcaagaggcacatcagcgactggatctgccccgagagggagaccaggaccagccccaagaaaaagagaaaagtctaagctgccttctgcggggcttgccttctggccatgcccttcttctctcccttgcacctgtacctcttggtctttgaataaagcctgagtaggaaggctagcaaaaaaaaaaaaaaaaaaaaaaaaaaaaaaaaaaaaaaaaaaaaaaaaaaaaaaaaaaaaaaaaaaaaaaaaaaaaaaaa

SEQ ID NO: 3865 - RNA, 5419 nt, synthetic construct
  source 1..5419: mol_type = other RNA
aggaaataagagagaaaagaagagtaagaagaaatataagagccaccatggcccctaagaagaagcgtaaagtgagccgggtgaacggcagcggcagcggcggcggcatgaaccacgaccaggagttcgacccccctaaggtgtaccctcccgtccccgccgagaagagaaagcccatccgggtcctgagcctgttcgatggcatcgccaccggtctgctggtgctgaaggacctgggcatccaggtggataggtacattgcctccgaggtgtgcgaggactccatcaccgtgggaatggtgcgtcatcagggcaagatcatgtacgtgggcgacgtgcggagcgtgacacagaagcatatccaggagtggggccctttcgacctggtgatcggcggcagcccttgcaatgacctgagcatcgtgaacccagcccggaagggcctgtacgagggaaccggcagactgttcttcgagttttacagactgctgcacgacgcccggcctaaggaaggcgacgaccggcccttcttttggctgttcgagaatgtggtggccatgggagtcagcgacaagcgggatattagccggttcctggagagcaaccccgtgatgatcgatgccaaggaagtgagcgccgcccaccgggccagatacttctggggcaatctgcctggcatgaacagacccctggccagcaccgtgaacgacaagctggagctgcaggagtgcctggagcacggccggatcgccaagttcagcaaggtgagaaccatcaccacccgaagcaacagcatcaaacaaggcaaggaccagcactttcctgtgttcatgaacgagaaggaggacatcctgtggtgtaccgagatggagagagtgttcgggttcccagtccactacacagatgtcagcaacatgtctagactggccagacagagactgctgggaagaagctggtccgtccctgtgatcagacacctgttcgcccctctgaaggagtacttcgcctgcgtgagcagcggcaacagcaacgccaacagccggggccccagcttctctagcggcctggtgccactgtccctgagagggagccacatgggccccatggagatctacaaaaccgtgagcgcctggaagcggcagcctgtgcgcgtgctgagcctgtttcggaatatcgataaagtcctgaaaagcctgggattcctggagagcggctctggctccggcggtggcaccctgaagtacgtggaggatgtgacaaacgtggtcagacgggatgtggagaagtggggccccttcgatctggtgtacggcagcacccaacccctgggcagctcttgtgaccggtgccctggctggtacatgtttcagttccaccggatcctgcagtacgccctgccgagacaggagtcccagcggccattcttttggattttcatggacaacttgctgctgaccgaggatgaccaggaaactaccactcggttcctgcagaccgaagccgtgaccctgcaggacgtgagaggccgggactaccagaacgccatgcgggtgtggtccaacatccctggactgaaaagcaagcacgcacctctgacccctaaagaagaggagtacctgcaggcccaggtgcggagcagaagcaagctggacgcccctaaggtggatctgctggtgaagaattgcctcctgcccctgagagagtacttcaagtatttcagccagaatagtctgcccctgggcggcccaagcagcggcgcccctcctcccagcggcggcagcccagccggctccccaacctctaccgaggagggcacctctgagtccgccacccccgagagcggccctggcacctccaccgagcccagcgagggcagcgcacccggcagccctgccggcagccccacctccacagaggagggaaccagcaccgagcccagcgaaggcagcgccccaggcaccagcaccgagcctagtgagggcggctctggcggcggcagcgcccaggagattaaacggatcaacaagatcagaagaagacttgtgaaagacagcaacaccaagaaggccggcaagacaggccccatgaaaaccctgctggttagagtgatgacacccgatctgagagagcggctggaaaacctgagaaagaagcctgaaaatatcccccagcccatcagcaatacatctagagccaacctgaataagctgctgaccgattacaccgaaatgaagaaggcgatcctgcatgtgtactgggaagagttccagaaggaccctgtgggcctgatgagccgggtggcccagcctgccagcaagaagatcgatcagaacaagctgaaacctgagatggacgagaagggcaacctgaccaccgccggctttgcctgctctcagtgtggccagcccctgttcgtgtacaagctggagcaggtgtctgagaagggcaaggcttacaccaactacttcggacggtgcaatgtggccgagcacgaaaagctgatcctgctggcccagctgaagcccgagaaggatagcgacgaagccgtgacatatagcctgggaaagtttgggcagagggccctggatttctacagcattcatgtgaccaaggagtccacccaccccgtgaagcccctggcccagatcgccggaaacagatacgcctccggacctgtgggaaaggccctgagcgacgcatgtatgggcacaatcgcctccttcctgtctaagtaccaggacatcatcatcgaacaccagaaggtggtgaagggcaaccagaagagactggagagcctgcgggagctggccggcaaggaaaacctggaataccctagcgtgaccctgccacctcagcctcacaccaaggagggcgttgatgcctacaacgaagtgatcgcccgggtgcgaatgtgggtgaacctgaacctgtggcagaagctgaagctaagcagagatgatgccaagcctctgctgagactgaagggattcccttcctttcctctggtcgagagacaggccaacgaagtggactggtgggacatggtgtgtaacgtgaagaagctgatcaacgagaaaaaggaggatggcaaggtgttttggcagaatctggctggctacaagagacaggaagccctgagaccatacctgagcagcgaggaagatcggaagaagggaaagaaattcgctcggtaccagctgggcgacctgctgctgcacctggaaaagaagcacggcgaggactggggaaaggtgtacgacgaggcctgggagcggattgacaagaaagtggaaggcctgagcaagcacatcaagctggaagaggaacggagaagcgaggacgcccagagcaaggccgccctgaccgactggctgcgggctaaggccagcttcgtgatcgagggcctgaaggaggccgacaaggacgagttctgcagatgcgagctgaagctgcagaagtggtacggggacctgcggggaaagcccttcgccatcgaagccgagaacagcatcctggacatcagcggcttcagcaagcagtacaactgtgccttcatctggcagaaggacggcgtgaagaagctgaacctgtacctgatcatcaactacttcaagggcggcaagctgcggttcaagaagatcaaacctgaagccttcgaagccaacagattctacaccgtgatcaacaaaaagagcggcgagatcgtgcccatggaggtgaacttcaacttcgacgaccccaacctgatcatcctgcctctggcctttggcaagagacagggcagagaattcatctggaacgacctgctgtccctggaaaccggcagcctgaagctggccaacggaagagtgatcgagaagacactgtacaacagaagaacccggcaggatgagcctgccctgttcgtggccctgaccttcgagcggcgggaggtcctggactcctccaatatcaaaccaatgaacctgatcggcgtggcaagaggcgaaaacatccccgccgtgatcgccctgaccgaccccgagggctgcccactgagccggtttaaggatagcctgggaaacccaacccacatcctgagaatcggcgagagctataaggagaagcagcggaccatccaggccaagaaggaggtggagcagcggagagccggcggctacagccggaagtacgccagcaaagccaagaatctggcagacgatatggtgagaaacaccgctagagatctgctgtactacgccgtgacccaggatgccatgctgatcttcgccaacctgagccggggcttcggccggcagggcaagcggaccttcatggccgagagacagtacacacggatggaggactggctgaccgccaagctggcctacgagggcctgagcaagacctacctgtccaagacactggcccagtacacctccaagacatgcagcaactgtgggtttaccatcaccagcgccgactacgacagggtgctggagaagctgaagaagacagcaacaggctggatgaccacaattaacggcaaggagctgaaggtggagggccagattacctactacaacagatacaagagacagaacgtagtcaaggacctgtccgtcgagctggatagactgagcgaagaatctgtgaacaacgacatctcctcctggacaaagggcagaagcggagaagctctgagcctcctgaagaaaagattctcccatagacccgtgcaggagaagttcgtgtgcctgaactgcggcttcgagacacacgcagccgagcaagccgccctgaacatcgccagatcctggctgttcctgcggagccaggagtacaagaaataccagacaaacaagacaaccggcaacaccgataagagagccttcgtcgagacctggcagtccttttaccggaagaagcttaaggaggtgtggaaacctgccgtgcggtctggcggatctggcggaggctccacaagcatgagccagggcagcgtgaccttcagggacgtggccatcgacttcagccaggaggagtggaagtggctgcagcccgcccagagggacctgtacaggtgcgtgatgctggagaactacggccacctggtgagcctgggcctgagcatcagcaagcccgacgtggtgagcctgctggagcagggcaaggagccctggctgggcaagagggaggtgaagagggacctgttcagcgtgagcgagagcaccagccccaagaaaaagagaaaagtctaagctgccttctgcggggcttgccttctggccatgcccttcttctctcccttgcacctgtacctcttggtctttgaataaagcctgagtaggaaggctagcaaaaaaaaaaaaaaaaaaaaaaaaaaaaaaaaaaaaaaaaaaaaaaaaaaaaaaaaaaaaaaaaaaaaaaaaaaaaaaaa

SEQ ID NO: 3866 - RNA, 5419 nt, synthetic construct
  source 1..5419: mol_type = other RNA
aggaaataagagagaaaagaagagtaagaagaaatataagagccaccatggcccctaagaagaagcgtaaagtgagccgggtgaacggcagcggcagcggcggcggcatgaaccacgaccaggagttcgacccccctaaggtgtaccctcccgtccccgccgagaagagaaagcccatccgggtcctgagcctgttcgatggcatcgccaccggtctgctggtgctgaaggacctgggcatccaggtggataggtacattgcctccgaggtgtgcgaggactccatcaccgtgggaatggtgcgtcatcagggcaagatcatgtacgtgggcgacgtgcggagcgtgacacagaagcatatccaggagtggggccctttcgacctggtgatcggcggcagcccttgcaatgacctgagcatcgtgaacccagcccggaagggcctgtacgagggaaccggcagactgttcttcgagttttacagactgctgcacgacgcccggcctaaggaaggcgacgaccggcccttcttttggctgttcgagaatgtggtggccatgggagtcagcgacaagcgggatattagccggttcctggagagcaaccccgtgatgatcgatgccaaggaagtgagcgccgcccaccgggccagatacttctggggcaatctgcctggcatgaacagacccctggccagcaccgtgaacgacaagctggagctgcaggagtgcctggagcacggccggatcgccaagttcagcaaggtgagaaccatcaccacccgaagcaacagcatcaaacaaggcaaggaccagcactttcctgtgttcatgaacgagaaggaggacatcctgtggtgtaccgagatggagagagtgttcgggttcccagtccactacacagatgtcagcaacatgtctagactggccagacagagactgctgggaagaagctggtccgtccctgtgatcagacacctgttcgcccctctgaaggagtacttcgcctgcgtgagcagcggcaacagcaacgccaacagccggggccccagcttctctagcggcctggtgccactgtccctgagagggagccacatgggccccatggagatctacaaaaccgtgagcgcctggaagcggcagcctgtgcgcgtgctgagcctgtttcggaatatcgataaagtcctgaaaagcctgggattcctggagagcggctctggctccggcggtggcaccctgaagtacgtggaggatgtgacaaacgtggtcagacgggatgtggagaagtggggccccttcgatctggtgtacggcagcacccaacccctgggcagctcttgtgaccggtgccctggctggtacatgtttcagttccaccggatcctgcagtacgccctgccgagacaggagtcccagcggccattcttttggattttcatggacaacttgctgctgaccgaggatgaccaggaaactaccactcggttcctgcagaccgaagccgtgaccctgcaggacgtgagaggccgggactaccagaacgccatgcgggtgtggtccaacatccctggactgaaaagcaagcacgcacctctgacccctaaagaagaggagtacctgcaggcccaggtgcggagcagaagcaagctggacgcccctaaggtggatctgctggtgaagaattgcctcctgcccctgagagagtacttcaagtatttcagccagaatagtctgcccctgggcggcccaagcagcggcgcccctcctcccagcggcggcagcccagccggctccccaacctctaccgaggagggcacctctgagtccgccacccccgagagcggccctggcacctccaccgagcccagcgagggcagcgcacccggcagccctgccggcagccccacctccacagaggagggaaccagcaccgagcccagcgaaggcagcgccccaggcaccagcaccgagcctagtgagggcggctctggcggcggcagcgcccaggagattaaacggatcaacaagatcagaagaagacttgtgaaagacagcaacaccaagaaggccggcaagacaggccccatgaaaaccctgctggttagagtgatgacacccgatctgagagagcggctggaaaacctgagaaagaagcctgaaaatatcccccagcccatcagcaatacatctagagccaacctgaataagctgctgaccgattacaccgaaatgaagaaggcgatcctgcatgtgtactgggaagagttccagaaggaccctgtgggcctgatgagccgggtggcccagcctgccagcaagaagatcgatcagaacaagctgaaacctgagatggacgagaagggcaacctgaccaccgccggctttgcctgctctcagtgtggccagcccctgttcgtgtacaagctggagcaggtgtctgagaagggcaaggcttacaccaactacttcggacggtgcaatgtggccgagcacgaaaagctgatcctgctggcccagctgaagcccgagaaggatagcgacgaagccgtgacatatagcctgggaaagtttgggcagagggccctggatttctacagcattcatgtgaccaaggagtccacccaccccgtgaagcccctggcccagatcgccggaaacagatacgcctccggacctgtgggaaaggccctgagcgacgcatgtatgggcacaatcgcctccttcctgtctaagtaccaggacatcatcatcgaacaccagaaggtggtgaagggcaaccagaagagactggagagcctgcgggagctggccggcaaggaaaacctggaataccctagcgtgaccctgccacctcagcctcacaccaaggagggcgttgatgcctacaacgaagtgatcgcccgggtgcgaatgtgggtgaacctgaacctgtggcagaagctgaagctaagcagagatgatgccaagcctctgctgagactgaagggattcccttcctttcctctggtcgagagacaggccaacgaagtggactggtgggacatggtgtgtaacgtgaagaagctgatcaacgagaaaaaggaggatggcaaggtgttttggcagaatctggctggctacaagagacaggaagccctgagaccatacctgagcagcgaggaagatcggaagaagggaaagaaattcgctcggtaccagctgggcgacctgctgctgcacctggaaaagaagcacggcgaggactggggaaaggtgtacgacgaggcctgggagcggattgacaagaaagtggaaggcctgagcaagcacatcaagctggaagaggaacggagaagcgaggacgcccagagcaaggccgccctgaccgactggctgcgggctaaggccagcttcgtgatcgagggcctgaaggaggccgacaaggacgagttctgcagatgcgagctgaagctgcagaagtggtacggggacctgcggggaaagcccttcgccatcgaagccgagaacagcatcctggacatcagcggcttcagcaagcagtacaactgtgccttcatctggcagaaggacggcgtgaagaagctgaacctgtacctgatcatcaactacttcaagggcggcaagctgcggttcaagaagatcaaacctgaagccttcgaagccaacagattctacaccgtgatcaacaaaaagagcggcgagatcgtgcccatggaggtgaacttcaacttcgacgaccccaacctgatcatcctgcctctggcctttggcaagagacagggcagagaattcatctggaacgacctgctgtccctggaaaccggcagcctgaagctggccaacggaagagtgatcgagaagacactgtacaacagaagaacccggcaggatgagcctgccctgttcgtggccctgaccttcgagcggcgggaggtcctggactcctccaatatcaaaccaatgaacctgatcggcgtggcaagaggcgaaaacatccccgccgtgatcgccctgaccgaccccgagggctgcccactgagccggtttaaggatagcctgggaaacccaacccacatcctgagaatcggcgagagctataaggagaagcagcggaccatccaggccaagaaggaggtggagcagcggagagccggcggctacagccggaagtacgccagcaaagccaagaatctggcagacgatatggtgagaaacaccgctagagatctgctgtactacgccgtgacccaggatgccatgctgatcttcgccaacctgagccggggcttcggccggcagggcaagcggaccttcatggccgagagacagtacacacggatggaggactggctgaccgccaagctggcctacgagggcctgagcaagacctacctgtccaagacactggcccagtacacctccaagacatgcagcaactgtgggtttaccatcaccagcgccgactacgacagggtgctggagaagctgaagaagacagcaacaggctggatgaccacaattaacggcaaggagctgaaggtggagggccagattacctactacaacagatacaagagacagaacgtagtcaaggacctgtccgtcgagctggatagactgagcgaagaatctgtgaacaacgacatctcctcctggacaaagggcagaagcggagaagctctgagcctcctgaagaaaagattctcccatagacccgtgcaggagaagttcgtgtgcctgaactgcggcttcgagacacacgcagccgagcaagccgccctgaacatcgccagatcctggctgttcctgcggagccaggagtacaagaaataccagacaaacaagacaaccggcaacaccgataagagagccttcgtcgagacctggcagtccttttaccggaagaagcttaaggaggtgtggaaacctgccgtgcggtctggcggatctggcggaggctccacaagcccccagggcagcgtgaccttcagggacgtggccgtgaacttcagccaggacgagtggggcaggctggaccccagccagaaggagctgtacagggaggtgatgctggagaactaccacaacctggtgtgcctgggcctggccgccagcaagcccgacgtgatcgaccagctggagaggggcgaggccccctggatgcccggcatcggctgccccgaccagaagatcaggagcgacacccaggagaccagccccaagaaaaagagaaaagtctaagctgccttctgcggggcttgccttctggccatgcccttcttctctcccttgcacctgtacctcttggtctttgaataaagcctgagtaggaaggctagcaaaaaaaaaaaaaaaaaaaaaaaaaaaaaaaaaaaaaaaaaaaaaaaaaaaaaaaaaaaaaaaaaaaaaaaaaaaaaaaa

SEQ ID NO: 3867 - RNA, 5419 nt, synthetic construct
  source 1..5419: mol_type = other RNA
aggaaataagagagaaaagaagagtaagaagaaatataagagccaccatggcccctaagaagaagcgtaaagtgagccgggtgaacggcagcggcagcggcggcggcatgaaccacgaccaggagttcgacccccctaaggtgtaccctcccgtccccgccgagaagagaaagcccatccgggtcctgagcctgttcgatggcatcgccaccggtctgctggtgctgaaggacctgggcatccaggtggataggtacattgcctccgaggtgtgcgaggactccatcaccgtgggaatggtgcgtcatcagggcaagatcatgtacgtgggcgacgtgcggagcgtgacacagaagcatatccaggagtggggccctttcgacctggtgatcggcggcagcccttgcaatgacctgagcatcgtgaacccagcccggaagggcctgtacgagggaaccggcagactgttcttcgagttttacagactgctgcacgacgcccggcctaaggaaggcgacgaccggcccttcttttggctgttcgagaatgtggtggccatgggagtcagcgacaagcgggatattagccggttcctggagagcaaccccgtgatgatcgatgccaaggaagtgagcgccgcccaccgggccagatacttctggggcaatctgcctggcatgaacagacccctggccagcaccgtgaacgacaagctggagctgcaggagtgcctggagcacggccggatcgccaagttcagcaaggtgagaaccatcaccacccgaagcaacagcatcaaacaaggcaaggaccagcactttcctgtgttcatgaacgagaaggaggacatcctgtggtgtaccgagatggagagagtgttcgggttcccagtccactacacagatgtcagcaacatgtctagactggccagacagagactgctgggaagaagctggtccgtccctgtgatcagacacctgttcgcccctctgaaggagtacttcgcctgcgtgagcagcggcaacagcaacgccaacagccggggccccagcttctctagcggcctggtgccactgtccctgagagggagccacatgggccccatggagatctacaaaaccgtgagcgcctggaagcggcagcctgtgcgcgtgctgagcctgtttcggaatatcgataaagtcctgaaaagcctgggattcctggagagcggctctggctccggcggtggcaccctgaagtacgtggaggatgtgacaaacgtggtcagacgggatgtggagaagtggggccccttcgatctggtgtacggcagcacccaacccctgggcagctcttgtgaccggtgccctggctggtacatgtttcagttccaccggatcctgcagtacgccctgccgagacaggagtcccagcggccattcttttggattttcatggacaacttgctgctgaccgaggatgaccaggaaactaccactcggttcctgcagaccgaagccgtgaccctgcaggacgtgagaggccgggactaccagaacgccatgcgggtgtggtccaacatccctggactgaaaagcaagcacgcacctctgacccctaaagaagaggagtacctgcaggcccaggtgcggagcagaagcaagctggacgcccctaaggtggatctgctggtgaagaattgcctcctgcccctgagagagtacttcaagtatttcagccagaatagtctgcccctgggcggcccaagcagcggcgcccctcctcccagcggcggcagcccagccggctccccaacctctaccgaggagggcacctctgagtccgccacccccgagagcggccctggcacctccaccgagcccagcgagggcagcgcacccggcagccctgccggcagccccacctccacagaggagggaaccagcaccgagcccagcgaaggcagcgccccaggcaccagcaccgagcctagtgagggcggctctggcggcggcagcgcccaggagattaaacggatcaacaagatcagaagaagacttgtgaaagacagcaacaccaagaaggccggcaagacaggccccatgaaaaccctgctggttagagtgatgacacccgatctgagagagcggctggaaaacctgagaaagaagcctgaaaatatcccccagcccatcagcaatacatctagagccaacctgaataagctgctgaccgattacaccgaaatgaagaaggcgatcctgcatgtgtactgggaagagttccagaaggaccctgtgggcctgatgagccgggtggcccagcctgccagcaagaagatcgatcagaacaagctgaaacctgagatggacgagaagggcaacctgaccaccgccggctttgcctgctctcagtgtggccagcccctgttcgtgtacaagctggagcaggtgtctgagaagggcaaggcttacaccaactacttcggacggtgcaatgtggccgagcacgaaaagctgatcctgctggcccagctgaagcccgagaaggatagcgacgaagccgtgacatatagcctgggaaagtttgggcagagggccctggatttctacagcattcatgtgaccaaggagtccacccaccccgtgaagcccctggcccagatcgccggaaacagatacgcctccggacctgtgggaaaggccctgagcgacgcatgtatgggcacaatcgcctccttcctgtctaagtaccaggacatcatcatcgaacaccagaaggtggtgaagggcaaccagaagagactggagagcctgcgggagctggccggcaaggaaaacctggaataccctagcgtgaccctgccacctcagcctcacaccaaggagggcgttgatgcctacaacgaagtgatcgcccgggtgcgaatgtgggtgaacctgaacctgtggcagaagctgaagctaagcagagatgatgccaagcctctgctgagactgaagggattcccttcctttcctctggtcgagagacaggccaacgaagtggactggtgggacatggtgtgtaacgtgaagaagctgatcaacgagaaaaaggaggatggcaaggtgttttggcagaatctggctggctacaagagacaggaagccctgagaccatacctgagcagcgaggaagatcggaagaagggaaagaaattcgctcggtaccagctgggcgacctgctgctgcacctggaaaagaagcacggcgaggactggggaaaggtgtacgacgaggcctgggagcggattgacaagaaagtggaaggcctgagcaagcacatcaagctggaagaggaacggagaagcgaggacgcccagagcaaggccgccctgaccgactggctgcgggctaaggccagcttcgtgatcgagggcctgaaggaggccgacaaggacgagttctgcagatgcgagctgaagctgcagaagtggtacggggacctgcggggaaagcccttcgccatcgaagccgagaacagcatcctggacatcagcggcttcagcaagcagtacaactgtgccttcatctggcagaaggacggcgtgaagaagctgaacctgtacctgatcatcaactacttcaagggcggcaagctgcggttcaagaagatcaaacctgaagccttcgaagccaacagattctacaccgtgatcaacaaaaagagcggcgagatcgtgcccatggaggtgaacttcaacttcgacgaccccaacctgatcatcctgcctctggcctttggcaagagacagggcagagaattcatctggaacgacctgctgtccctggaaaccggcagcctgaagctggccaacggaagagtgatcgagaagacactgtacaacagaagaacccggcaggatgagcctgccctgttcgtggccctgaccttcgagcggcgggaggtcctggactcctccaatatcaaaccaatgaacctgatcggcgtggcaagaggcgaaaacatccccgccgtgatcgccctgaccgaccccgagggctgcccactgagccggtttaaggatagcctgggaaacccaacccacatcctgagaatcggcgagagctataaggagaagcagcggaccatccaggccaagaaggaggtggagcagcggagagccggcggctacagccggaagtacgccagcaaagccaagaatctggcagacgatatggtgagaaacaccgctagagatctgctgtactacgccgtgacccaggatgccatgctgatcttcgccaacctgagccggggcttcggccggcagggcaagcggaccttcatggccgagagacagtacacacggatggaggactggctgaccgccaagctggcctacgagggcctgagcaagacctacctgtccaagacactggcccagtacacctccaagacatgcagcaactgtgggtttaccatcaccagcgccgactacgacagggtgctggagaagctgaagaagacagcaacaggctggatgaccacaattaacggcaaggagctgaaggtggagggccagattacctactacaacagatacaagagacagaacgtagtcaaggacctgtccgtcgagctggatagactgagcgaagaatctgtgaacaacgacatctcctcctggacaaagggcagaagcggagaagctctgagcctcctgaagaaaagattctcccatagacccgtgcaggagaagttcgtgtgcctgaactgcggcttcgagacacacgcagccgagcaagccgccctgaacatcgccagatcctggctgttcctgcggagccaggagtacaagaaataccagacaaacaagacaaccggcaacaccgataagagagccttcgtcgagacctggcagtccttttaccggaagaagcttaaggaggtgtggaaacctgccgtgcggtctggcggatctggcggaggctccacaagcatggacctggtgatgttcagggacgtggccgtggacttcagccaggaggagtgggagtgcctgaacagctaccagaggaacctgtacagggacgtgatcctggagaactacagcaacctggtgagcctggccggctgcagcatcagcaagcccgacgtgatcaccctgctggagcagggcaaggagccctggctggtggtgaggaacgagaagaggaggtggagcctggacctggagagcaggaccagccccaagaaaaagagaaaagtctaagctgccttctgcggggcttgccttctggccatgcccttcttctctcccttgcacctgtacctcttggtctttgaataaagcctgagtaggaaggctagcaaaaaaaaaaaaaaaaaaaaaaaaaaaaaaaaaaaaaaaaaaaaaaaaaaaaaaaaaaaaaaaaaaaaaaaaaaaaaaaa

SEQ ID NO: 3868 - RNA, 5419 nt, synthetic construct
  source 1..5419: mol_type = other RNA
aggaaataagagagaaaagaagagtaagaagaaatataagagccaccatggcccctaagaagaagcgtaaagtgagccgggtgaacggcagcggcagcggcggcggcatgaaccacgaccaggagttcgacccccctaaggtgtaccctcccgtccccgccgagaagagaaagcccatccgggtcctgagcctgttcgatggcatcgccaccggtctgctggtgctgaaggacctgggcatccaggtggataggtacattgcctccgaggtgtgcgaggactccatcaccgtgggaatggtgcgtcatcagggcaagatcatgtacgtgggcgacgtgcggagcgtgacacagaagcatatccaggagtggggccctttcgacctggtgatcggcggcagcccttgcaatgacctgagcatcgtgaacccagcccggaagggcctgtacgagggaaccggcagactgttcttcgagttttacagactgctgcacgacgcccggcctaaggaaggcgacgaccggcccttcttttggctgttcgagaatgtggtggccatgggagtcagcgacaagcgggatattagccggttcctggagagcaaccccgtgatgatcgatgccaaggaagtgagcgccgcccaccgggccagatacttctggggcaatctgcctggcatgaacagacccctggccagcaccgtgaacgacaagctggagctgcaggagtgcctggagcacggccggatcgccaagttcagcaaggtgagaaccatcaccacccgaagcaacagcatcaaacaaggcaaggaccagcactttcctgtgttcatgaacgagaaggaggacatcctgtggtgtaccgagatggagagagtgttcgggttcccagtccactacacagatgtcagcaacatgtctagactggccagacagagactgctgggaagaagctggtccgtccctgtgatcagacacctgttcgcccctctgaaggagtacttcgcctgcgtgagcagcggcaacagcaacgccaacagccggggccccagcttctctagcggcctggtgccactgtccctgagagggagccacatgggccccatggagatctacaaaaccgtgagcgcctggaagcggcagcctgtgcgcgtgctgagcctgtttcggaatatcgataaagtcctgaaaagcctgggattcctggagagcggctctggctccggcggtggcaccctgaagtacgtggaggatgtgacaaacgtggtcagacgggatgtggagaagtggggccccttcgatctggtgtacggcagcacccaacccctgggcagctcttgtgaccggtgccctggctggtacatgtttcagttccaccggatcctgcagtacgccctgccgagacaggagtcccagcggccattcttttggattttcatggacaacttgctgctgaccgaggatgaccaggaaactaccactcggttcctgcagaccgaagccgtgaccctgcaggacgtgagaggccgggactaccagaacgccatgcgggtgtggtccaacatccctggactgaaaagcaagcacgcacctctgacccctaaagaagaggagtacctgcaggcccaggtgcggagcagaagcaagctggacgcccctaaggtggatctgctggtgaagaattgcctcctgcccctgagagagtacttcaagtatttcagccagaatagtctgcccctgggcggcccaagcagcggcgcccctcctcccagcggcggcagcccagccggctccccaacctctaccgaggagggcacctctgagtccgccacccccgagagcggccctggcacctccaccgagcccagcgagggcagcgcacccggcagccctgccggcagccccacctccacagaggagggaaccagcaccgagcccagcgaaggcagcgccccaggcaccagcaccgagcctagtgagggcggctctggcggcggcagcgcccaggagattaaacggatcaacaagatcagaagaagacttgtgaaagacagcaacaccaagaaggccggcaagacaggccccatgaaaaccctgctggttagagtgatgacacccgatctgagagagcggctggaaaacctgagaaagaagcctgaaaatatcccccagcccatcagcaatacatctagagccaacctgaataagctgctgaccgattacaccgaaatgaagaaggcgatcctgcatgtgtactgggaagagttccagaaggaccctgtgggcctgatgagccgggtggcccagcctgccagcaagaagatcgatcagaacaagctgaaacctgagatggacgagaagggcaacctgaccaccgccggctttgcctgctctcagtgtggccagcccctgttcgtgtacaagctggagcaggtgtctgagaagggcaaggcttacaccaactacttcggacggtgcaatgtggccgagcacgaaaagctgatcctgctggcccagctgaagcccgagaaggatagcgacgaagccgtgacatatagcctgggaaagtttgggcagagggccctggatttctacagcattcatgtgaccaaggagtccacccaccccgtgaagcccctggcccagatcgccggaaacagatacgcctccggacctgtgggaaaggccctgagcgacgcatgtatgggcacaatcgcctccttcctgtctaagtaccaggacatcatcatcgaacaccagaaggtggtgaagggcaaccagaagagactggagagcctgcgggagctggccggcaaggaaaacctggaataccctagcgtgaccctgccacctcagcctcacaccaaggagggcgttgatgcctacaacgaagtgatcgcccgggtgcgaatgtgggtgaacctgaacctgtggcagaagctgaagctaagcagagatgatgccaagcctctgctgagactgaagggattcccttcctttcctctggtcgagagacaggccaacgaagtggactggtgggacatggtgtgtaacgtgaagaagctgatcaacgagaaaaaggaggatggcaaggtgttttggcagaatctggctggctacaagagacaggaagccctgagaccatacctgagcagcgaggaagatcggaagaagggaaagaaattcgctcggtaccagctgggcgacctgctgctgcacctggaaaagaagcacggcgaggactggggaaaggtgtacgacgaggcctgggagcggattgacaagaaagtggaaggcctgagcaagcacatcaagctggaagaggaacggagaagcgaggacgcccagagcaaggccgccctgaccgactggctgcgggctaaggccagcttcgtgatcgagggcctgaaggaggccgacaaggacgagttctgcagatgcgagctgaagctgcagaagtggtacggggacctgcggggaaagcccttcgccatcgaagccgagaacagcatcctggacatcagcggcttcagcaagcagtacaactgtgccttcatctggcagaaggacggcgtgaagaagctgaacctgtacctgatcatcaactacttcaagggcggcaagctgcggttcaagaagatcaaacctgaagccttcgaagccaacagattctacaccgtgatcaacaaaaagagcggcgagatcgtgcccatggaggtgaacttcaacttcgacgaccccaacctgatcatcctgcctctggcctttggcaagagacagggcagagaattcatctggaacgacctgctgtccctggaaaccggcagcctgaagctggccaacggaagagtgatcgagaagacactgtacaacagaagaacccggcaggatgagcctgccctgttcgtggccctgaccttcgagcggcgggaggtcctggactcctccaatatcaaaccaatgaacctgatcggcgtggcaagaggcgaaaacatccccgccgtgatcgccctgaccgaccccgagggctgcccactgagccggtttaaggatagcctgggaaacccaacccacatcctgagaatcggcgagagctataaggagaagcagcggaccatccaggccaagaaggaggtggagcagcggagagccggcggctacagccggaagtacgccagcaaagccaagaatctggcagacgatatggtgagaaacaccgctagagatctgctgtactacgccgtgacccaggatgccatgctgatcttcgccaacctgagccggggcttcggccggcagggcaagcggaccttcatggccgagagacagtacacacggatggaggactggctgaccgccaagctggcctacgagggcctgagcaagacctacctgtccaagacactggcccagtacacctccaagacatgcagcaactgtgggtttaccatcaccagcgccgactacgacagggtgctggagaagctgaagaagacagcaacaggctggatgaccacaattaacggcaaggagctgaaggtggagggccagattacctactacaacagatacaagagacagaacgtagtcaaggacctgtccgtcgagctggatagactgagcgaagaatctgtgaacaacgacatctcctcctggacaaagggcagaagcggagaagctctgagcctcctgaagaaaagattctcccatagacccgtgcaggagaagttcgtgtgcctgaactgcggcttcgagacacacgcagccgagcaagccgccctgaacatcgccagatcctggctgttcctgcggagccaggagtacaagaaataccagacaaacaagacaaccggcaacaccgataagagagccttcgtcgagacctggcagtccttttaccggaagaagcttaaggaggtgtggaaacctgccgtgcggtctggcggatctggcggaggctccacaagcagcgtgaccttcgaggacgtggccgtgaacttcagcctggaggagtggaacctgctgaacgaggcccagaggtgcctgtacagggacgtgatgctggagaccctgaccctgatcagcagcctgggcgcccccccccacaccctgttccccgccagggcctgcggccccgaggccccccccagcaggcactgccccaggcccagcctgtgcctgagcctgagccccctgcaccccaccggcgtgaccagccccaagaaaaagagaaaagtctaagctgccttctgcggggcttgccttctggccatgcccttcttctctcccttgcacctgtacctcttggtctttgaataaagcctgagtaggaaggctagcaaaaaaaaaaaaaaaaaaaaaaaaaaaaaaaaaaaaaaaaaaaaaaaaaaaaaaaaaaaaaaaaaaaaaaaaaaaaaaaa

SEQ ID NO: 3869 - RNA, 5419 nt, synthetic construct
  source 1..5419: mol_type = other RNA
aggaaataagagagaaaagaagagtaagaagaaatataagagccaccatggcccctaagaagaagcgtaaagtgagccgggtgaacggcagcggcagcggcggcggcatgaaccacgaccaggagttcgacccccctaaggtgtaccctcccgtccccgccgagaagagaaagcccatccgggtcctgagcctgttcgatggcatcgccaccggtctgctggtgctgaaggacctgggcatccaggtggataggtacattgcctccgaggtgtgcgaggactccatcaccgtgggaatggtgcgtcatcagggcaagatcatgtacgtgggcgacgtgcggagcgtgacacagaagcatatccaggagtggggccctttcgacctggtgatcggcggcagcccttgcaatgacctgagcatcgtgaacccagcccggaagggcctgtacgagggaaccggcagactgttcttcgagttttacagactgctgcacgacgcccggcctaaggaaggcgacgaccggcccttcttttggctgttcgagaatgtggtggccatgggagtcagcgacaagcgggatattagccggttcctggagagcaaccccgtgatgatcgatgccaaggaagtgagcgccgcccaccgggccagatacttctggggcaatctgcctggcatgaacagacccctggccagcaccgtgaacgacaagctggagctgcaggagtgcctggagcacggccggatcgccaagttcagcaaggtgagaaccatcaccacccgaagcaacagcatcaaacaaggcaaggaccagcactttcctgtgttcatgaacgagaaggaggacatcctgtggtgtaccgagatggagagagtgttcgggttcccagtccactacacagatgtcagcaacatgtctagactggccagacagagactgctgggaagaagctggtccgtccctgtgatcagacacctgttcgcccctctgaaggagtacttcgcctgcgtgagcagcggcaacagcaacgccaacagccggggccccagcttctctagcggcctggtgccactgtccctgagagggagccacatgggccccatggagatctacaaaaccgtgagcgcctggaagcggcagcctgtgcgcgtgctgagcctgtttcggaatatcgataaagtcctgaaaagcctgggattcctggagagcggctctggctccggcggtggcaccctgaagtacgtggaggatgtgacaaacgtggtcagacgggatgtggagaagtggggccccttcgatctggtgtacggcagcacccaacccctgggcagctcttgtgaccggtgccctggctggtacatgtttcagttccaccggatcctgcagtacgccctgccgagacaggagtcccagcggccattcttttggattttcatggacaacttgctgctgaccgaggatgaccaggaaactaccactcggttcctgcagaccgaagccgtgaccctgcaggacgtgagaggccgggactaccagaacgccatgcgggtgtggtccaacatccctggactgaaaagcaagcacgcacctctgacccctaaagaagaggagtacctgcaggcccaggtgcggagcagaagcaagctggacgcccctaaggtggatctgctggtgaagaattgcctcctgcccctgagagagtacttcaagtatttcagccagaatagtctgcccctgggcggcccaagcagcggcgcccctcctcccagcggcggcagcccagccggctccccaacctctaccgaggagggcacctctgagtccgccacccccgagagcggccctggcacctccaccgagcccagcgagggcagcgcacccggcagccctgccggcagccccacctccacagaggagggaaccagcaccgagcccagcgaaggcagcgccccaggcaccagcaccgagcctagtgagggcggctctggcggcggcagcgcccaggagattaaacggatcaacaagatcagaagaagacttgtgaaagacagcaacaccaagaaggccggcaagacaggccccatgaaaaccctgctggttagagtgatgacacccgatctgagagagcggctggaaaacctgagaaagaagcctgaaaatatcccccagcccatcagcaatacatctagagccaacctgaataagctgctgaccgattacaccgaaatgaagaaggcgatcctgcatgtgtactgggaagagttccagaaggaccctgtgggcctgatgagccgggtggcccagcctgccagcaagaagatcgatcagaacaagctgaaacctgagatggacgagaagggcaacctgaccaccgccggctttgcctgctctcagtgtggccagcccctgttcgtgtacaagctggagcaggtgtctgagaagggcaaggcttacaccaactacttcggacggtgcaatgtggccgagcacgaaaagctgatcctgctggcccagctgaagcccgagaaggatagcgacgaagccgtgacatatagcctgggaaagtttgggcagagggccctggatttctacagcattcatgtgaccaaggagtccacccaccccgtgaagcccctggcccagatcgccggaaacagatacgcctccggacctgtgggaaaggccctgagcgacgcatgtatgggcacaatcgcctccttcctgtctaagtaccaggacatcatcatcgaacaccagaaggtggtgaagggcaaccagaagagactggagagcctgcgggagctggccggcaaggaaaacctggaataccctagcgtgaccctgccacctcagcctcacaccaaggagggcgttgatgcctacaacgaagtgatcgcccgggtgcgaatgtgggtgaacctgaacctgtggcagaagctgaagctaagcagagatgatgccaagcctctgctgagactgaagggattcccttcctttcctctggtcgagagacaggccaacgaagtggactggtgggacatggtgtgtaacgtgaagaagctgatcaacgagaaaaaggaggatggcaaggtgttttggcagaatctggctggctacaagagacaggaagccctgagaccatacctgagcagcgaggaagatcggaagaagggaaagaaattcgctcggtaccagctgggcgacctgctgctgcacctggaaaagaagcacggcgaggactggggaaaggtgtacgacgaggcctgggagcggattgacaagaaagtggaaggcctgagcaagcacatcaagctggaagaggaacggagaagcgaggacgcccagagcaaggccgccctgaccgactggctgcgggctaaggccagcttcgtgatcgagggcctgaaggaggccgacaaggacgagttctgcagatgcgagctgaagctgcagaagtggtacggggacctgcggggaaagcccttcgccatcgaagccgagaacagcatcctggacatcagcggcttcagcaagcagtacaactgtgccttcatctggcagaaggacggcgtgaagaagctgaacctgtacctgatcatcaactacttcaagggcggcaagctgcggttcaagaagatcaaacctgaagccttcgaagccaacagattctacaccgtgatcaacaaaaagagcggcgagatcgtgcccatggaggtgaacttcaacttcgacgaccccaacctgatcatcctgcctctggcctttggcaagagacagggcagagaattcatctggaacgacctgctgtccctggaaaccggcagcctgaagctggccaacggaagagtgatcgagaagacactgtacaacagaagaacccggcaggatgagcctgccctgttcgtggccctgaccttcgagcggcgggaggtcctggactcctccaatatcaaaccaatgaacctgatcggcgtggcaagaggcgaaaacatccccgccgtgatcgccctgaccgaccccgagggctgcccactgagccggtttaaggatagcctgggaaacccaacccacatcctgagaatcggcgagagctataaggagaagcagcggaccatccaggccaagaaggaggtggagcagcggagagccggcggctacagccggaagtacgccagcaaagccaagaatctggcagacgatatggtgagaaacaccgctagagatctgctgtactacgccgtgacccaggatgccatgctgatcttcgccaacctgagccggggcttcggccggcagggcaagcggaccttcatggccgagagacagtacacacggatggaggactggctgaccgccaagctggcctacgagggcctgagcaagacctacctgtccaagacactggcccagtacacctccaagacatgcagcaactgtgggtttaccatcaccagcgccgactacgacagggtgctggagaagctgaagaagacagcaacaggctggatgaccacaattaacggcaaggagctgaaggtggagggccagattacctactacaacagatacaagagacagaacgtagtcaaggacctgtccgtcgagctggatagactgagcgaagaatctgtgaacaacgacatctcctcctggacaaagggcagaagcggagaagctctgagcctcctgaagaaaagattctcccatagacccgtgcaggagaagttcgtgtgcctgaactgcggcttcgagacacacgcagccgagcaagccgccctgaacatcgccagatcctggctgttcctgcggagccaggagtacaagaaataccagacaaacaagacaaccggcaacaccgataagagagccttcgtcgagacctggcagtccttttaccggaagaagcttaaggaggtgtggaaacctgccgtgcggtctggcggatctggcggaggctccacaagctgcagcaaggagcccctgtgcctgcaggagcccgtgagcttcgccgacgtggccgtgtacttcagcagggaggagtgggccctgctggaccccgcccagagggccctgtactgggacgtgatgctggagacctacgagtgcatcgccagcctgggcggcgaggacccctggatccccgacgtgcacggcctgaaggacatggccggcgacacctgccccggcgacggcatcgccgacctgaagaccagccccaagaaaaagagaaaagtctaagctgccttctgcggggcttgccttctggccatgcccttcttctctcccttgcacctgtacctcttggtctttgaataaagcctgagtaggaaggctagcaaaaaaaaaaaaaaaaaaaaaaaaaaaaaaaaaaaaaaaaaaaaaaaaaaaaaaaaaaaaaaaaaaaaaaaaaaaaaaaa

SEQ ID NO: 3870 - RNA, 5419 nt, synthetic construct
  source 1..5419: mol_type = other RNA
aggaaataagagagaaaagaagagtaagaagaaatataagagccaccatggcccctaagaagaagcgtaaagtgagccgggtgaacggcagcggcagcggcggcggcatgaaccacgaccaggagttcgacccccctaaggtgtaccctcccgtccccgccgagaagagaaagcccatccgggtcctgagcctgttcgatggcatcgccaccggtctgctggtgctgaaggacctgggcatccaggtggataggtacattgcctccgaggtgtgcgaggactccatcaccgtgggaatggtgcgtcatcagggcaagatcatgtacgtgggcgacgtgcggagcgtgacacagaagcatatccaggagtggggccctttcgacctggtgatcggcggcagcccttgcaatgacctgagcatcgtgaacccagcccggaagggcctgtacgagggaaccggcagactgttcttcgagttttacagactgctgcacgacgcccggcctaaggaaggcgacgaccggcccttcttttggctgttcgagaatgtggtggccatgggagtcagcgacaagcgggatattagccggttcctggagagcaaccccgtgatgatcgatgccaaggaagtgagcgccgcccaccgggccagatacttctggggcaatctgcctggcatgaacagacccctggccagcaccgtgaacgacaagctggagctgcaggagtgcctggagcacggccggatcgccaagttcagcaaggtgagaaccatcaccacccgaagcaacagcatcaaacaaggcaaggaccagcactttcctgtgttcatgaacgagaaggaggacatcctgtggtgtaccgagatggagagagtgttcgggttcccagtccactacacagatgtcagcaacatgtctagactggccagacagagactgctgggaagaagctggtccgtccctgtgatcagacacctgttcgcccctctgaaggagtacttcgcctgcgtgagcagcggcaacagcaacgccaacagccggggccccagcttctctagcggcctggtgccactgtccctgagagggagccacatgggccccatggagatctacaaaaccgtgagcgcctggaagcggcagcctgtgcgcgtgctgagcctgtttcggaatatcgataaagtcctgaaaagcctgggattcctggagagcggctctggctccggcggtggcaccctgaagtacgtggaggatgtgacaaacgtggtcagacgggatgtggagaagtggggccccttcgatctggtgtacggcagcacccaacccctgggcagctcttgtgaccggtgccctggctggtacatgtttcagttccaccggatcctgcagtacgccctgccgagacaggagtcccagcggccattcttttggattttcatggacaacttgctgctgaccgaggatgaccaggaaactaccactcggttcctgcagaccgaagccgtgaccctgcaggacgtgagaggccgggactaccagaacgccatgcgggtgtggtccaacatccctggactgaaaagcaagcacgcacctctgacccctaaagaagaggagtacctgcaggcccaggtgcggagcagaagcaagctggacgcccctaaggtggatctgctggtgaagaattgcctcctgcccctgagagagtacttcaagtatttcagccagaatagtctgcccctgggcggcccaagcagcggcgcccctcctcccagcggcggcagcccagccggctccccaacctctaccgaggagggcacctctgagtccgccacccccgagagcggccctggcacctccaccgagcccagcgagggcagcgcacccggcagccctgccggcagccccacctccacagaggagggaaccagcaccgagcccagcgaaggcagcgccccaggcaccagcaccgagcctagtgagggcggctctggcggcggcagcgcccaggagattaaacggatcaacaagatcagaagaagacttgtgaaagacagcaacaccaagaaggccggcaagacaggccccatgaaaaccctgctggttagagtgatgacacccgatctgagagagcggctggaaaacctgagaaagaagcctgaaaatatcccccagcccatcagcaatacatctagagccaacctgaataagctgctgaccgattacaccgaaatgaagaaggcgatcctgcatgtgtactgggaagagttccagaaggaccctgtgggcctgatgagccgggtggcccagcctgccagcaagaagatcgatcagaacaagctgaaacctgagatggacgagaagggcaacctgaccaccgccggctttgcctgctctcagtgtggccagcccctgttcgtgtacaagctggagcaggtgtctgagaagggcaaggcttacaccaactacttcggacggtgcaatgtggccgagcacgaaaagctgatcctgctggcccagctgaagcccgagaaggatagcgacgaagccgtgacatatagcctgggaaagtttgggcagagggccctggatttctacagcattcatgtgaccaaggagtccacccaccccgtgaagcccctggcccagatcgccggaaacagatacgcctccggacctgtgggaaaggccctgagcgacgcatgtatgggcacaatcgcctccttcctgtctaagtaccaggacatcatcatcgaacaccagaaggtggtgaagggcaaccagaagagactggagagcctgcgggagctggccggcaaggaaaacctggaataccctagcgtgaccctgccacctcagcctcacaccaaggagggcgttgatgcctacaacgaagtgatcgcccgggtgcgaatgtgggtgaacctgaacctgtggcagaagctgaagctaagcagagatgatgccaagcctctgctgagactgaagggattcccttcctttcctctggtcgagagacaggccaacgaagtggactggtgggacatggtgtgtaacgtgaagaagctgatcaacgagaaaaaggaggatggcaaggtgttttggcagaatctggctggctacaagagacaggaagccctgagaccatacctgagcagcgaggaagatcggaagaagggaaagaaattcgctcggtaccagctgggcgacctgctgctgcacctggaaaagaagcacggcgaggactggggaaaggtgtacgacgaggcctgggagcggattgacaagaaagtggaaggcctgagcaagcacatcaagctggaagaggaacggagaagcgaggacgcccagagcaaggccgccctgaccgactggctgcgggctaaggccagcttcgtgatcgagggcctgaaggaggccgacaaggacgagttctgcagatgcgagctgaagctgcagaagtggtacggggacctgcggggaaagcccttcgccatcgaagccgagaacagcatcctggacatcagcggcttcagcaagcagtacaactgtgccttcatctggcagaaggacggcgtgaagaagctgaacctgtacctgatcatcaactacttcaagggcggcaagctgcggttcaagaagatcaaacctgaagccttcgaagccaacagattctacaccgtgatcaacaaaaagagcggcgagatcgtgcccatggaggtgaacttcaacttcgacgaccccaacctgatcatcctgcctctggcctttggcaagagacagggcagagaattcatctggaacgacctgctgtccctggaaaccggcagcctgaagctggccaacggaagagtgatcgagaagacactgtacaacagaagaacccggcaggatgagcctgccctgttcgtggccctgaccttcgagcggcgggaggtcctggactcctccaatatcaaaccaatgaacctgatcggcgtggcaagaggcgaaaacatccccgccgtgatcgccctgaccgaccccgagggctgcccactgagccggtttaaggatagcctgggaaacccaacccacatcctgagaatcggcgagagctataaggagaagcagcggaccatccaggccaagaaggaggtggagcagcggagagccggcggctacagccggaagtacgccagcaaagccaagaatctggcagacgatatggtgagaaacaccgctagagatctgctgtactacgccgtgacccaggatgccatgctgatcttcgccaacctgagccggggcttcggccggcagggcaagcggaccttcatggccgagagacagtacacacggatggaggactggctgaccgccaagctggcctacgagggcctgagcaagacctacctgtccaagacactggcccagtacacctccaagacatgcagcaactgtgggtttaccatcaccagcgccgactacgacagggtgctggagaagctgaagaagacagcaacaggctggatgaccacaattaacggcaaggagctgaaggtggagggccagattacctactacaacagatacaagagacagaacgtagtcaaggacctgtccgtcgagctggatagactgagcgaagaatctgtgaacaacgacatctcctcctggacaaagggcagaagcggagaagctctgagcctcctgaagaaaagattctcccatagacccgtgcaggagaagttcgtgtgcctgaactgcggcttcgagacacacgcagccgagcaagccgccctgaacatcgccagatcctggctgttcctgcggagccaggagtacaagaaataccagacaaacaagacaaccggcaacaccgataagagagccttcgtcgagacctggcagtccttttaccggaagaagcttaaggaggtgtggaaacctgccgtgcggtctggcggatctggcggaggctccacaagctacaggggccccgtgaccttcaaggacatcaccgtggagttcaccagggaggagtggaagctgctggacaccgcccagaggaccctgtacagggaggtgatgcaggagaactacagccacctgatcagcgtgggctactgcgccaacaggcccaacgccatcttcaagctgaagcagggcaaggagccctggatcctggaggtgcagttccccaggcagaagaaccccgaggacctgtgcaacaccagccccaagaaaaagagaaaagtctaagctgccttctgcggggcttgccttctggccatgcccttcttctctcccttgcacctgtacctcttggtctttgaataaagcctgagtaggaaggctagcaaaaaaaaaaaaaaaaaaaaaaaaaaaaaaaaaaaaaaaaaaaaaaaaaaaaaaaaaaaaaaaaaaaaaaaaaaaaaaaa

SEQ ID NO: 3871 - RNA, 5419 nt, synthetic construct
  source 1..5419: mol_type = other RNA
aggaaataagagagaaaagaagagtaagaagaaatataagagccaccatggcccctaagaagaagcgtaaagtgagccgggtgaacggcagcggcagcggcggcggcatgaaccacgaccaggagttcgacccccctaaggtgtaccctcccgtccccgccgagaagagaaagcccatccgggtcctgagcctgttcgatggcatcgccaccggtctgctggtgctgaaggacctgggcatccaggtggataggtacattgcctccgaggtgtgcgaggactccatcaccgtgggaatggtgcgtcatcagggcaagatcatgtacgtgggcgacgtgcggagcgtgacacagaagcatatccaggagtggggccctttcgacctggtgatcggcggcagcccttgcaatgacctgagcatcgtgaacccagcccggaagggcctgtacgagggaaccggcagactgttcttcgagttttacagactgctgcacgacgcccggcctaaggaaggcgacgaccggcccttcttttggctgttcgagaatgtggtggccatgggagtcagcgacaagcgggatattagccggttcctggagagcaaccccgtgatgatcgatgccaaggaagtgagcgccgcccaccgggccagatacttctggggcaatctgcctggcatgaacagacccctggccagcaccgtgaacgacaagctggagctgcaggagtgcctggagcacggccggatcgccaagttcagcaaggtgagaaccatcaccacccgaagcaacagcatcaaacaaggcaaggaccagcactttcctgtgttcatgaacgagaaggaggacatcctgtggtgtaccgagatggagagagtgttcgggttcccagtccactacacagatgtcagcaacatgtctagactggccagacagagactgctgggaagaagctggtccgtccctgtgatcagacacctgttcgcccctctgaaggagtacttcgcctgcgtgagcagcggcaacagcaacgccaacagccggggccccagcttctctagcggcctggtgccactgtccctgagagggagccacatgggccccatggagatctacaaaaccgtgagcgcctggaagcggcagcctgtgcgcgtgctgagcctgtttcggaatatcgataaagtcctgaaaagcctgggattcctggagagcggctctggctccggcggtggcaccctgaagtacgtggaggatgtgacaaacgtggtcagacgggatgtggagaagtggggccccttcgatctggtgtacggcagcacccaacccctgggcagctcttgtgaccggtgccctggctggtacatgtttcagttccaccggatcctgcagtacgccctgccgagacaggagtcccagcggccattcttttggattttcatggacaacttgctgctgaccgaggatgaccaggaaactaccactcggttcctgcagaccgaagccgtgaccctgcaggacgtgagaggccgggactaccagaacgccatgcgggtgtggtccaacatccctggactgaaaagcaagcacgcacctctgacccctaaagaagaggagtacctgcaggcccaggtgcggagcagaagcaagctggacgcccctaaggtggatctgctggtgaagaattgcctcctgcccctgagagagtacttcaagtatttcagccagaatagtctgcccctgggcggcccaagcagcggcgcccctcctcccagcggcggcagcccagccggctccccaacctctaccgaggagggcacctctgagtccgccacccccgagagcggccctggcacctccaccgagcccagcgagggcagcgcacccggcagccctgccggcagccccacctccacagaggagggaaccagcaccgagcccagcgaaggcagcgccccaggcaccagcaccgagcctagtgagggcggctctggcggcggcagcgcccaggagattaaacggatcaacaagatcagaagaagacttgtgaaagacagcaacaccaagaaggccggcaagacaggccccatgaaaaccctgctggttagagtgatgacacccgatctgagagagcggctggaaaacctgagaaagaagcctgaaaatatcccccagcccatcagcaatacatctagagccaacctgaataagctgctgaccgattacaccgaaatgaagaaggcgatcctgcatgtgtactgggaagagttccagaaggaccctgtgggcctgatgagccgggtggcccagcctgccagcaagaagatcgatcagaacaagctgaaacctgagatggacgagaagggcaacctgaccaccgccggctttgcctgctctcagtgtggccagcccctgttcgtgtacaagctggagcaggtgtctgagaagggcaaggcttacaccaactacttcggacggtgcaatgtggccgagcacgaaaagctgatcctgctggcccagctgaagcccgagaaggatagcgacgaagccgtgacatatagcctgggaaagtttgggcagagggccctggatttctacagcattcatgtgaccaaggagtccacccaccccgtgaagcccctggcccagatcgccggaaacagatacgcctccggacctgtgggaaaggccctgagcgacgcatgtatgggcacaatcgcctccttcctgtctaagtaccaggacatcatcatcgaacaccagaaggtggtgaagggcaaccagaagagactggagagcctgcgggagctggccggcaaggaaaacctggaataccctagcgtgaccctgccacctcagcctcacaccaaggagggcgttgatgcctacaacgaagtgatcgcccgggtgcgaatgtgggtgaacctgaacctgtggcagaagctgaagctaagcagagatgatgccaagcctctgctgagactgaagggattcccttcctttcctctggtcgagagacaggccaacgaagtggactggtgggacatggtgtgtaacgtgaagaagctgatcaacgagaaaaaggaggatggcaaggtgttttggcagaatctggctggctacaagagacaggaagccctgagaccatacctgagcagcgaggaagatcggaagaagggaaagaaattcgctcggtaccagctgggcgacctgctgctgcacctggaaaagaagcacggcgaggactggggaaaggtgtacgacgaggcctgggagcggattgacaagaaagtggaaggcctgagcaagcacatcaagctggaagaggaacggagaagcgaggacgcccagagcaaggccgccctgaccgactggctgcgggctaaggccagcttcgtgatcgagggcctgaaggaggccgacaaggacgagttctgcagatgcgagctgaagctgcagaagtggtacggggacctgcggggaaagcccttcgccatcgaagccgagaacagcatcctggacatcagcggcttcagcaagcagtacaactgtgccttcatctggcagaaggacggcgtgaagaagctgaacctgtacctgatcatcaactacttcaagggcggcaagctgcggttcaagaagatcaaacctgaagccttcgaagccaacagattctacaccgtgatcaacaaaaagagcggcgagatcgtgcccatggaggtgaacttcaacttcgacgaccccaacctgatcatcctgcctctggcctttggcaagagacagggcagagaattcatctggaacgacctgctgtccctggaaaccggcagcctgaagctggccaacggaagagtgatcgagaagacactgtacaacagaagaacccggcaggatgagcctgccctgttcgtggccctgaccttcgagcggcgggaggtcctggactcctccaatatcaaaccaatgaacctgatcggcgtggcaagaggcgaaaacatccccgccgtgatcgccctgaccgaccccgagggctgcccactgagccggtttaaggatagcctgggaaacccaacccacatcctgagaatcggcgagagctataaggagaagcagcggaccatccaggccaagaaggaggtggagcagcggagagccggcggctacagccggaagtacgccagcaaagccaagaatctggcagacgatatggtgagaaacaccgctagagatctgctgtactacgccgtgacccaggatgccatgctgatcttcgccaacctgagccggggcttcggccggcagggcaagcggaccttcatggccgagagacagtacacacggatggaggactggctgaccgccaagctggcctacgagggcctgagcaagacctacctgtccaagacactggcccagtacacctccaagacatgcagcaactgtgggtttaccatcaccagcgccgactacgacagggtgctggagaagctgaagaagacagcaacaggctggatgaccacaattaacggcaaggagctgaaggtggagggccagattacctactacaacagatacaagagacagaacgtagtcaaggacctgtccgtcgagctggatagactgagcgaagaatctgtgaacaacgacatctcctcctggacaaagggcagaagcggagaagctctgagcctcctgaagaaaagattctcccatagacccgtgcaggagaagttcgtgtgcctgaactgcggcttcgagacacacgcagccgagcaagccgccctgaacatcgccagatcctggctgttcctgcggagccaggagtacaagaaataccagacaaacaagacaaccggcaacaccgataagagagccttcgtcgagacctggcagtccttttaccggaagaagcttaaggaggtgtggaaacctgccgtgcggtctggcggatctggcggaggctccacaagcaacagcggcctgctgaccttcagggacgtggccatcgagttcagcctggaggagtggcagtgcctggacaccgcccagaagaacctgtacaggaacgtgatgctggagaactacaggaacctggccttcctgggcgtggccgtgagcaagcccgacctgatcacctgcctggagaaggacaaggagccctggaacatgaagaggcacgagatggtggacgagccccccggcatctgcccccacaccagccccaagaaaaagagaaaagtctaagctgccttctgcggggcttgccttctggccatgcccttcttctctcccttgcacctgtacctcttggtctttgaataaagcctgagtaggaaggctagcaaaaaaaaaaaaaaaaaaaaaaaaaaaaaaaaaaaaaaaaaaaaaaaaaaaaaaaaaaaaaaaaaaaaaaaaaaaaaaaa

SEQ ID NO: 3872 - RNA, 5419 nt, synthetic construct
  source 1..5419: mol_type = other RNA
aggaaataagagagaaaagaagagtaagaagaaatataagagccaccatggcccctaagaagaagcgtaaagtgagccgggtgaacggcagcggcagcggcggcggcatgaaccacgaccaggagttcgacccccctaaggtgtaccctcccgtccccgccgagaagagaaagcccatccgggtcctgagcctgttcgatggcatcgccaccggtctgctggtgctgaaggacctgggcatccaggtggataggtacattgcctccgaggtgtgcgaggactccatcaccgtgggaatggtgcgtcatcagggcaagatcatgtacgtgggcgacgtgcggagcgtgacacagaagcatatccaggagtggggccctttcgacctggtgatcggcggcagcccttgcaatgacctgagcatcgtgaacccagcccggaagggcctgtacgagggaaccggcagactgttcttcgagttttacagactgctgcacgacgcccggcctaaggaaggcgacgaccggcccttcttttggctgttcgagaatgtggtggccatgggagtcagcgacaagcgggatattagccggttcctggagagcaaccccgtgatgatcgatgccaaggaagtgagcgccgcccaccgggccagatacttctggggcaatctgcctggcatgaacagacccctggccagcaccgtgaacgacaagctggagctgcaggagtgcctggagcacggccggatcgccaagttcagcaaggtgagaaccatcaccacccgaagcaacagcatcaaacaaggcaaggaccagcactttcctgtgttcatgaacgagaaggaggacatcctgtggtgtaccgagatggagagagtgttcgggttcccagtccactacacagatgtcagcaacatgtctagactggccagacagagactgctgggaagaagctggtccgtccctgtgatcagacacctgttcgcccctctgaaggagtacttcgcctgcgtgagcagcggcaacagcaacgccaacagccggggccccagcttctctagcggcctggtgccactgtccctgagagggagccacatgggccccatggagatctacaaaaccgtgagcgcctggaagcggcagcctgtgcgcgtgctgagcctgtttcggaatatcgataaagtcctgaaaagcctgggattcctggagagcggctctggctccggcggtggcaccctgaagtacgtggaggatgtgacaaacgtggtcagacgggatgtggagaagtggggccccttcgatctggtgtacggcagcacccaacccctgggcagctcttgtgaccggtgccctggctggtacatgtttcagttccaccggatcctgcagtacgccctgccgagacaggagtcccagcggccattcttttggattttcatggacaacttgctgctgaccgaggatgaccaggaaactaccactcggttcctgcagaccgaagccgtgaccctgcaggacgtgagaggccgggactaccagaacgccatgcgggtgtggtccaacatccctggactgaaaagcaagcacgcacctctgacccctaaagaagaggagtacctgcaggcccaggtgcggagcagaagcaagctggacgcccctaaggtggatctgctggtgaagaattgcctcctgcccctgagagagtacttcaagtatttcagccagaatagtctgcccctgggcggcccaagcagcggcgcccctcctcccagcggcggcagcccagccggctccccaacctctaccgaggagggcacctctgagtccgccacccccgagagcggccctggcacctccaccgagcccagcgagggcagcgcacccggcagccctgccggcagccccacctccacagaggagggaaccagcaccgagcccagcgaaggcagcgccccaggcaccagcaccgagcctagtgagggcggctctggcggcggcagcgcccaggagattaaacggatcaacaagatcagaagaagacttgtgaaagacagcaacaccaagaaggccggcaagacaggccccatgaaaaccctgctggttagagtgatgacacccgatctgagagagcggctggaaaacctgagaaagaagcctgaaaatatcccccagcccatcagcaatacatctagagccaacctgaataagctgctgaccgattacaccgaaatgaagaaggcgatcctgcatgtgtactgggaagagttccagaaggaccctgtgggcctgatgagccgggtggcccagcctgccagcaagaagatcgatcagaacaagctgaaacctgagatggacgagaagggcaacctgaccaccgccggctttgcctgctctcagtgtggccagcccctgttcgtgtacaagctggagcaggtgtctgagaagggcaaggcttacaccaactacttcggacggtgcaatgtggccgagcacgaaaagctgatcctgctggcccagctgaagcccgagaaggatagcgacgaagccgtgacatatagcctgggaaagtttgggcagagggccctggatttctacagcattcatgtgaccaaggagtccacccaccccgtgaagcccctggcccagatcgccggaaacagatacgcctccggacctgtgggaaaggccctgagcgacgcatgtatgggcacaatcgcctccttcctgtctaagtaccaggacatcatcatcgaacaccagaaggtggtgaagggcaaccagaagagactggagagcctgcgggagctggccggcaaggaaaacctggaataccctagcgtgaccctgccacctcagcctcacaccaaggagggcgttgatgcctacaacgaagtgatcgcccgggtgcgaatgtgggtgaacctgaacctgtggcagaagctgaagctaagcagagatgatgccaagcctctgctgagactgaagggattcccttcctttcctctggtcgagagacaggccaacgaagtggactggtgggacatggtgtgtaacgtgaagaagctgatcaacgagaaaaaggaggatggcaaggtgttttggcagaatctggctggctacaagagacaggaagccctgagaccatacctgagcagcgaggaagatcggaagaagggaaagaaattcgctcggtaccagctgggcgacctgctgctgcacctggaaaagaagcacggcgaggactggggaaaggtgtacgacgaggcctgggagcggattgacaagaaagtggaaggcctgagcaagcacatcaagctggaagaggaacggagaagcgaggacgcccagagcaaggccgccctgaccgactggctgcgggctaaggccagcttcgtgatcgagggcctgaaggaggccgacaaggacgagttctgcagatgcgagctgaagctgcagaagtggtacggggacctgcggggaaagcccttcgccatcgaagccgagaacagcatcctggacatcagcggcttcagcaagcagtacaactgtgccttcatctggcagaaggacggcgtgaagaagctgaacctgtacctgatcatcaactacttcaagggcggcaagctgcggttcaagaagatcaaacctgaagccttcgaagccaacagattctacaccgtgatcaacaaaaagagcggcgagatcgtgcccatggaggtgaacttcaacttcgacgaccccaacctgatcatcctgcctctggcctttggcaagagacagggcagagaattcatctggaacgacctgctgtccctggaaaccggcagcctgaagctggccaacggaagagtgatcgagaagacactgtacaacagaagaacccggcaggatgagcctgccctgttcgtggccctgaccttcgagcggcgggaggtcctggactcctccaatatcaaaccaatgaacctgatcggcgtggcaagaggcgaaaacatccccgccgtgatcgccctgaccgaccccgagggctgcccactgagccggtttaaggatagcctgggaaacccaacccacatcctgagaatcggcgagagctataaggagaagcagcggaccatccaggccaagaaggaggtggagcagcggagagccggcggctacagccggaagtacgccagcaaagccaagaatctggcagacgatatggtgagaaacaccgctagagatctgctgtactacgccgtgacccaggatgccatgctgatcttcgccaacctgagccggggcttcggccggcagggcaagcggaccttcatggccgagagacagtacacacggatggaggactggctgaccgccaagctggcctacgagggcctgagcaagacctacctgtccaagacactggcccagtacacctccaagacatgcagcaactgtgggtttaccatcaccagcgccgactacgacagggtgctggagaagctgaagaagacagcaacaggctggatgaccacaattaacggcaaggagctgaaggtggagggccagattacctactacaacagatacaagagacagaacgtagtcaaggacctgtccgtcgagctggatagactgagcgaagaatctgtgaacaacgacatctcctcctggacaaagggcagaagcggagaagctctgagcctcctgaagaaaagattctcccatagacccgtgcaggagaagttcgtgtgcctgaactgcggcttcgagacacacgcagccgagcaagccgccctgaacatcgccagatcctggctgttcctgcggagccaggagtacaagaaataccagacaaacaagacaaccggcaacaccgataagagagccttcgtcgagacctggcagtccttttaccggaagaagcttaaggaggtgtggaaacctgccgtgcggtctggcggatctggcggaggctccacaagcagccacggccccctgagcttcgaggacgtggccgtggccttcaccaaggaggagtggcagcagctggaccccgcccagaggaccctgtacagggacgtgatgctggagaacttcagccacgtgatcagcctgggccaccccgtgagcaagcccgacgtgatcagcaagctggagcagggcgaggagccctggatcatcaagagggacgtgagcgactggatctaccccgagagggagaccaggaccagccccaagaaaaagagaaaagtctaagctgccttctgcggggcttgccttctggccatgcccttcttctctcccttgcacctgtacctcttggtctttgaataaagcctgagtaggaaggctagcaaaaaaaaaaaaaaaaaaaaaaaaaaaaaaaaaaaaaaaaaaaaaaaaaaaaaaaaaaaaaaaaaaaaaaaaaaaaaaaa

SEQ ID NO: 3873 - RNA, 5419 nt, synthetic construct
  source 1..5419: mol_type = other RNA
aggaaataagagagaaaagaagagtaagaagaaatataagagccaccatggcccctaagaagaagcgtaaagtgagccgggtgaacggcagcggcagcggcggcggcatgaaccacgaccaggagttcgacccccctaaggtgtaccctcccgtccccgccgagaagagaaagcccatccgggtcctgagcctgttcgatggcatcgccaccggtctgctggtgctgaaggacctgggcatccaggtggataggtacattgcctccgaggtgtgcgaggactccatcaccgtgggaatggtgcgtcatcagggcaagatcatgtacgtgggcgacgtgcggagcgtgacacagaagcatatccaggagtggggccctttcgacctggtgatcggcggcagcccttgcaatgacctgagcatcgtgaacccagcccggaagggcctgtacgagggaaccggcagactgttcttcgagttttacagactgctgcacgacgcccggcctaaggaaggcgacgaccggcccttcttttggctgttcgagaatgtggtggccatgggagtcagcgacaagcgggatattagccggttcctggagagcaaccccgtgatgatcgatgccaaggaagtgagcgccgcccaccgggccagatacttctggggcaatctgcctggcatgaacagacccctggccagcaccgtgaacgacaagctggagctgcaggagtgcctggagcacggccggatcgccaagttcagcaaggtgagaaccatcaccacccgaagcaacagcatcaaacaaggcaaggaccagcactttcctgtgttcatgaacgagaaggaggacatcctgtggtgtaccgagatggagagagtgttcgggttcccagtccactacacagatgtcagcaacatgtctagactggccagacagagactgctgggaagaagctggtccgtccctgtgatcagacacctgttcgcccctctgaaggagtacttcgcctgcgtgagcagcggcaacagcaacgccaacagccggggccccagcttctctagcggcctggtgccactgtccctgagagggagccacatgggccccatggagatctacaaaaccgtgagcgcctggaagcggcagcctgtgcgcgtgctgagcctgtttcggaatatcgataaagtcctgaaaagcctgggattcctggagagcggctctggctccggcggtggcaccctgaagtacgtggaggatgtgacaaacgtggtcagacgggatgtggagaagtggggccccttcgatctggtgtacggcagcacccaacccctgggcagctcttgtgaccggtgccctggctggtacatgtttcagttccaccggatcctgcagtacgccctgccgagacaggagtcccagcggccattcttttggattttcatggacaacttgctgctgaccgaggatgaccaggaaactaccactcggttcctgcagaccgaagccgtgaccctgcaggacgtgagaggccgggactaccagaacgccatgcgggtgtggtccaacatccctggactgaaaagcaagcacgcacctctgacccctaaagaagaggagtacctgcaggcccaggtgcggagcagaagcaagctggacgcccctaaggtggatctgctggtgaagaattgcctcctgcccctgagagagtacttcaagtatttcagccagaatagtctgcccctgggcggcccaagcagcggcgcccctcctcccagcggcggcagcccagccggctccccaacctctaccgaggagggcacctctgagtccgccacccccgagagcggccctggcacctccaccgagcccagcgagggcagcgcacccggcagccctgccggcagccccacctccacagaggagggaaccagcaccgagcccagcgaaggcagcgccccaggcaccagcaccgagcctagtgagggcggctctggcggcggcagcgcccaggagattaaacggatcaacaagatcagaagaagacttgtgaaagacagcaacaccaagaaggccggcaagacaggccccatgaaaaccctgctggttagagtgatgacacccgatctgagagagcggctggaaaacctgagaaagaagcctgaaaatatcccccagcccatcagcaatacatctagagccaacctgaataagctgctgaccgattacaccgaaatgaagaaggcgatcctgcatgtgtactgggaagagttccagaaggaccctgtgggcctgatgagccgggtggcccagcctgccagcaagaagatcgatcagaacaagctgaaacctgagatggacgagaagggcaacctgaccaccgccggctttgcctgctctcagtgtggccagcccctgttcgtgtacaagctggagcaggtgtctgagaagggcaaggcttacaccaactacttcggacggtgcaatgtggccgagcacgaaaagctgatcctgctggcccagctgaagcccgagaaggatagcgacgaagccgtgacatatagcctgggaaagtttgggcagagggccctggatttctacagcattcatgtgaccaaggagtccacccaccccgtgaagcccctggcccagatcgccggaaacagatacgcctccggacctgtgggaaaggccctgagcgacgcatgtatgggcacaatcgcctccttcctgtctaagtaccaggacatcatcatcgaacaccagaaggtggtgaagggcaaccagaagagactggagagcctgcgggagctggccggcaaggaaaacctggaataccctagcgtgaccctgccacctcagcctcacaccaaggagggcgttgatgcctacaacgaagtgatcgcccgggtgcgaatgtgggtgaacctgaacctgtggcagaagctgaagctaagcagagatgatgccaagcctctgctgagactgaagggattcccttcctttcctctggtcgagagacaggccaacgaagtggactggtgggacatggtgtgtaacgtgaagaagctgatcaacgagaaaaaggaggatggcaaggtgttttggcagaatctggctggctacaagagacaggaagccctgagaccatacctgagcagcgaggaagatcggaagaagggaaagaaattcgctcggtaccagctgggcgacctgctgctgcacctggaaaagaagcacggcgaggactggggaaaggtgtacgacgaggcctgggagcggattgacaagaaagtggaaggcctgagcaagcacatcaagctggaagaggaacggagaagcgaggacgcccagagcaaggccgccctgaccgactggctgcgggctaaggccagcttcgtgatcgagggcctgaaggaggccgacaaggacgagttctgcagatgcgagctgaagctgcagaagtggtacggggacctgcggggaaagcccttcgccatcgaagccgagaacagcatcctggacatcagcggcttcagcaagcagtacaactgtgccttcatctggcagaaggacggcgtgaagaagctgaacctgtacctgatcatcaactacttcaagggcggcaagctgcggttcaagaagatcaaacctgaagccttcgaagccaacagattctacaccgtgatcaacaaaaagagcggcgagatcgtgcccatggaggtgaacttcaacttcgacgaccccaacctgatcatcctgcctctggcctttggcaagagacagggcagagaattcatctggaacgacctgctgtccctggaaaccggcagcctgaagctggccaacggaagagtgatcgagaagacactgtacaacagaagaacccggcaggatgagcctgccctgttcgtggccctgaccttcgagcggcgggaggtcctggactcctccaatatcaaaccaatgaacctgatcggcgtggcaagaggcgaaaacatccccgccgtgatcgccctgaccgaccccgagggctgcccactgagccggtttaaggatagcctgggaaacccaacccacatcctgagaatcggcgagagctataaggagaagcagcggaccatccaggccaagaaggaggtggagcagcggagagccggcggctacagccggaagtacgccagcaaagccaagaatctggcagacgatatggtgagaaacaccgctagagatctgctgtactacgccgtgacccaggatgccatgctgatcttcgccaacctgagccggggcttcggccggcagggcaagcggaccttcatggccgagagacagtacacacggatggaggactggctgaccgccaagctggcctacgagggcctgagcaagacctacctgtccaagacactggcccagtacacctccaagacatgcagcaactgtgggtttaccatcaccagcgccgactacgacagggtgctggagaagctgaagaagacagcaacaggctggatgaccacaattaacggcaaggagctgaaggtggagggccagattacctactacaacagatacaagagacagaacgtagtcaaggacctgtccgtcgagctggatagactgagcgaagaatctgtgaacaacgacatctcctcctggacaaagggcagaagcggagaagctctgagcctcctgaagaaaagattctcccatagacccgtgcaggagaagttcgtgtgcctgaactgcggcttcgagacacacgcagccgagcaagccgccctgaacatcgccagatcctggctgttcctgcggagccaggagtacaagaaataccagacaaacaagacaaccggcaacaccgataagagagccttcgtcgagacctggcagtccttttaccggaagaagcttaaggaggtgtggaaacctgccgtgcggtctggcggatctggcggaggctccacaagccagcagggcagcgtgaccttcagggacgtggccgtggacttcaccctggaggagtggggccacctggaccccttccagaaggagctgtacagggacgtgatgctggagaacttcaggaacctggtgtgcctgggcctgaccgtgagcaagcccgacgtgatccaccagctggagcagggcgaggccccctggatccccgagggcgagagccccaggaacagcttcgccggctgcgccagcgacaccagccccaagaaaaagagaaaagtctaagctgccttctgcggggcttgccttctggccatgcccttcttctctcccttgcacctgtacctcttggtctttgaataaagcctgagtaggaaggctagcaaaaaaaaaaaaaaaaaaaaaaaaaaaaaaaaaaaaaaaaaaaaaaaaaaaaaaaaaaaaaaaaaaaaaaaaaaaaaaaa

SEQ ID NO: 3874 - RNA, 5518 nt, synthetic construct
  source 1..5518: mol_type = other RNA
aggaaataagagagaaaagaagagtaagaagaaatataagagccaccatggcccctaagaagaagcgtaaagtgagccgggtgaacggcagcggcagcggcggcggcatgaaccacgaccaggagttcgacccccctaaggtgtaccctcccgtccccgccgagaagagaaagcccatccgggtcctgagcctgttcgatggcatcgccaccggtctgctggtgctgaaggacctgggcatccaggtggataggtacattgcctccgaggtgtgcgaggactccatcaccgtgggaatggtgcgtcatcagggcaagatcatgtacgtgggcgacgtgcggagcgtgacacagaagcatatccaggagtggggccctttcgacctggtgatcggcggcagcccttgcaatgacctgagcatcgtgaacccagcccggaagggcctgtacgagggaaccggcagactgttcttcgagttttacagactgctgcacgacgcccggcctaaggaaggcgacgaccggcccttcttttggctgttcgagaatgtggtggccatgggagtcagcgacaagcgggatattagccggttcctggagagcaaccccgtgatgatcgatgccaaggaagtgagcgccgcccaccgggccagatacttctggggcaatctgcctggcatgaacagacccctggccagcaccgtgaacgacaagctggagctgcaggagtgcctggagcacggccggatcgccaagttcagcaaggtgagaaccatcaccacccgaagcaacagcatcaaacaaggcaaggaccagcactttcctgtgttcatgaacgagaaggaggacatcctgtggtgtaccgagatggagagagtgttcgggttcccagtccactacacagatgtcagcaacatgtctagactggccagacagagactgctgggaagaagctggtccgtccctgtgatcagacacctgttcgcccctctgaaggagtacttcgcctgcgtgagcagcggcaacagcaacgccaacagccggggccccagcttctctagcggcctggtgccactgtccctgagagggagccacatgggccccatggagatctacaaaaccgtgagcgcctggaagcggcagcctgtgcgcgtgctgagcctgtttcggaatatcgataaagtcctgaaaagcctgggattcctggagagcggctctggctccggcggtggcaccctgaagtacgtggaggatgtgacaaacgtggtcagacgggatgtggagaagtggggccccttcgatctggtgtacggcagcacccaacccctgggcagctcttgtgaccggtgccctggctggtacatgtttcagttccaccggatcctgcagtacgccctgccgagacaggagtcccagcggccattcttttggattttcatggacaacttgctgctgaccgaggatgaccaggaaactaccactcggttcctgcagaccgaagccgtgaccctgcaggacgtgagaggccgggactaccagaacgccatgcgggtgtggtccaacatccctggactgaaaagcaagcacgcacctctgacccctaaagaagaggagtacctgcaggcccaggtgcggagcagaagcaagctggacgcccctaaggtggatctgctggtgaagaattgcctcctgcccctgagagagtacttcaagtatttcagccagaatagtctgcccctgggcggcccaagcagcggcgcccctcctcccagcggcggcagcccagccggctccccaacctctaccgaggagggcacctctgagtccgccacccccgagagcggccctggcacctccaccgagcccagcgagggcagcgcacccggcagccctgccggcagccccacctccacagaggagggaaccagcaccgagcccagcgaaggcagcgccccaggcaccagcaccgagcctagtgagggcggctctggcggcggcagcgcccaggagattaaacggatcaacaagatcagaagaagacttgtgaaagacagcaacaccaagaaggccggcaagacaggccccatgaaaaccctgctggttagagtgatgacacccgatctgagagagcggctggaaaacctgagaaagaagcctgaaaatatcccccagcccatcagcaatacatctagagccaacctgaataagctgctgaccgattacaccgaaatgaagaaggcgatcctgcatgtgtactgggaagagttccagaaggaccctgtgggcctgatgagccgggtggcccagcctgccagcaagaagatcgatcagaacaagctgaaacctgagatggacgagaagggcaacctgaccaccgccggctttgcctgctctcagtgtggccagcccctgttcgtgtacaagctggagcaggtgtctgagaagggcaaggcttacaccaactacttcggacggtgcaatgtggccgagcacgaaaagctgatcctgctggcccagctgaagcccgagaaggatagcgacgaagccgtgacatatagcctgggaaagtttgggcagagggccctggatttctacagcattcatgtgaccaaggagtccacccaccccgtgaagcccctggcccagatcgccggaaacagatacgcctccggacctgtgggaaaggccctgagcgacgcatgtatgggcacaatcgcctccttcctgtctaagtaccaggacatcatcatcgaacaccagaaggtggtgaagggcaaccagaagagactggagagcctgcgggagctggccggcaaggaaaacctggaataccctagcgtgaccctgccacctcagcctcacaccaaggagggcgttgatgcctacaacgaagtgatcgcccgggtgcgaatgtgggtgaacctgaacctgtggcagaagctgaagctaagcagagatgatgccaagcctctgctgagactgaagggattcccttcctttcctctggtcgagagacaggccaacgaagtggactggtgggacatggtgtgtaacgtgaagaagctgatcaacgagaaaaaggaggatggcaaggtgttttggcagaatctggctggctacaagagacaggaagccctgagaccatacctgagcagcgaggaagatcggaagaagggaaagaaattcgctcggtaccagctgggcgacctgctgctgcacctggaaaagaagcacggcgaggactggggaaaggtgtacgacgaggcctgggagcggattgacaagaaagtggaaggcctgagcaagcacatcaagctggaagaggaacggagaagcgaggacgcccagagcaaggccgccctgaccgactggctgcgggctaaggccagcttcgtgatcgagggcctgaaggaggccgacaaggacgagttctgcagatgcgagctgaagctgcagaagtggtacggggacctgcggggaaagcccttcgccatcgaagccgagaacagcatcctggacatcagcggcttcagcaagcagtacaactgtgccttcatctggcagaaggacggcgtgaagaagctgaacctgtacctgatcatcaactacttcaagggcggcaagctgcggttcaagaagatcaaacctgaagccttcgaagccaacagattctacaccgtgatcaacaaaaagagcggcgagatcgtgcccatggaggtgaacttcaacttcgacgaccccaacctgatcatcctgcctctggcctttggcaagagacagggcagagaattcatctggaacgacctgctgtccctggaaaccggcagcctgaagctggccaacggaagagtgatcgagaagacactgtacaacagaagaacccggcaggatgagcctgccctgttcgtggccctgaccttcgagcggcgggaggtcctggactcctccaatatcaaaccaatgaacctgatcggcgtggcaagaggcgaaaacatccccgccgtgatcgccctgaccgaccccgagggctgcccactgagccggtttaaggatagcctgggaaacccaacccacatcctgagaatcggcgagagctataaggagaagcagcggaccatccaggccaagaaggaggtggagcagcggagagccggcggctacagccggaagtacgccagcaaagccaagaatctggcagacgatatggtgagaaacaccgctagagatctgctgtactacgccgtgacccaggatgccatgctgatcttcgccaacctgagccggggcttcggccggcagggcaagcggaccttcatggccgagagacagtacacacggatggaggactggctgaccgccaagctggcctacgagggcctgagcaagacctacctgtccaagacactggcccagtacacctccaagacatgcagcaactgtgggtttaccatcaccagcgccgactacgacagggtgctggagaagctgaagaagacagcaacaggctggatgaccacaattaacggcaaggagctgaaggtggagggccagattacctactacaacagatacaagagacagaacgtagtcaaggacctgtccgtcgagctggatagactgagcgaagaatctgtgaacaacgacatctcctcctggacaaagggcagaagcggagaagctctgagcctcctgaagaaaagattctcccatagacccgtgcaggagaagttcgtgtgcctgaactgcggcttcgagacacacgcagccgagcaagccgccctgaacatcgccagatcctggctgttcctgcggagccaggagtacaagaaataccagacaaacaagacaaccggcaacaccgataagagagccttcgtcgagacctggcagtccttttaccggaagaagcttaaggaggtgtggaaacctgccgtgcggtctggcggatctggcggaggctccacaagcgtgaccttcgaggacatcgccgtgtacttcagcagggaggagtggggcctgctggacgaggcccagaggtgcctgtaccacgacgtgatgctggagaacttcagcctgatgaccagcgtgggctgcctgcacggcatcggcgccgaggaggcccccagcgagcagatcgtgagcgtggagaccgtgagccaggccaggacccccaagcccagcagcagcatccccaacgcccacagctgcgagatgtgcatcctggtgatgaaggacatcctgtacctgaccgagcaccagggcaccctgccctggcagaagccctacaccagcgccgccagcggcaagtggaccagccccaagaaaaagagaaaagtctaagctgccttctgcggggcttgccttctggccatgcccttcttctctcccttgcacctgtacctcttggtctttgaataaagcctgagtaggaaggctagcaaaaaaaaaaaaaaaaaaaaaaaaaaaaaaaaaaaaaaaaaaaaaaaaaaaaaaaaaaaaaaaaaaaaaaaaaaaaaaaa

SEQ ID NO: 3875 - RNA, 5419 nt, synthetic construct
  source 1..5419: mol_type = other RNA
aggaaataagagagaaaagaagagtaagaagaaatataagagccaccatggcccctaagaagaagcgtaaagtgagccgggtgaacggcagcggcagcggcggcggcatgaaccacgaccaggagttcgacccccctaaggtgtaccctcccgtccccgccgagaagagaaagcccatccgggtcctgagcctgttcgatggcatcgccaccggtctgctggtgctgaaggacctgggcatccaggtggataggtacattgcctccgaggtgtgcgaggactccatcaccgtgggaatggtgcgtcatcagggcaagatcatgtacgtgggcgacgtgcggagcgtgacacagaagcatatccaggagtggggccctttcgacctggtgatcggcggcagcccttgcaatgacctgagcatcgtgaacccagcccggaagggcctgtacgagggaaccggcagactgttcttcgagttttacagactgctgcacgacgcccggcctaaggaaggcgacgaccggcccttcttttggctgttcgagaatgtggtggccatgggagtcagcgacaagcgggatattagccggttcctggagagcaaccccgtgatgatcgatgccaaggaagtgagcgccgcccaccgggccagatacttctggggcaatctgcctggcatgaacagacccctggccagcaccgtgaacgacaagctggagctgcaggagtgcctggagcacggccggatcgccaagttcagcaaggtgagaaccatcaccacccgaagcaacagcatcaaacaaggcaaggaccagcactttcctgtgttcatgaacgagaaggaggacatcctgtggtgtaccgagatggagagagtgttcgggttcccagtccactacacagatgtcagcaacatgtctagactggccagacagagactgctgggaagaagctggtccgtccctgtgatcagacacctgttcgcccctctgaaggagtacttcgcctgcgtgagcagcggcaacagcaacgccaacagccggggccccagcttctctagcggcctggtgccactgtccctgagagggagccacatgggccccatggagatctacaaaaccgtgagcgcctggaagcggcagcctgtgcgcgtgctgagcctgtttcggaatatcgataaagtcctgaaaagcctgggattcctggagagcggctctggctccggcggtggcaccctgaagtacgtggaggatgtgacaaacgtggtcagacgggatgtggagaagtggggccccttcgatctggtgtacggcagcacccaacccctgggcagctcttgtgaccggtgccctggctggtacatgtttcagttccaccggatcctgcagtacgccctgccgagacaggagtcccagcggccattcttttggattttcatggacaacttgctgctgaccgaggatgaccaggaaactaccactcggttcctgcagaccgaagccgtgaccctgcaggacgtgagaggccgggactaccagaacgccatgcgggtgtggtccaacatccctggactgaaaagcaagcacgcacctctgacccctaaagaagaggagtacctgcaggcccaggtgcggagcagaagcaagctggacgcccctaaggtggatctgctggtgaagaattgcctcctgcccctgagagagtacttcaagtatttcagccagaatagtctgcccctgggcggcccaagcagcggcgcccctcctcccagcggcggcagcccagccggctccccaacctctaccgaggagggcacctctgagtccgccacccccgagagcggccctggcacctccaccgagcccagcgagggcagcgcacccggcagccctgccggcagccccacctccacagaggagggaaccagcaccgagcccagcgaaggcagcgccccaggcaccagcaccgagcctagtgagggcggctctggcggcggcagcgcccaggagattaaacggatcaacaagatcagaagaagacttgtgaaagacagcaacaccaagaaggccggcaagacaggccccatgaaaaccctgctggttagagtgatgacacccgatctgagagagcggctggaaaacctgagaaagaagcctgaaaatatcccccagcccatcagcaatacatctagagccaacctgaataagctgctgaccgattacaccgaaatgaagaaggcgatcctgcatgtgtactgggaagagttccagaaggaccctgtgggcctgatgagccgggtggcccagcctgccagcaagaagatcgatcagaacaagctgaaacctgagatggacgagaagggcaacctgaccaccgccggctttgcctgctctcagtgtggccagcccctgttcgtgtacaagctggagcaggtgtctgagaagggcaaggcttacaccaactacttcggacggtgcaatgtggccgagcacgaaaagctgatcctgctggcccagctgaagcccgagaaggatagcgacgaagccgtgacatatagcctgggaaagtttgggcagagggccctggatttctacagcattcatgtgaccaaggagtccacccaccccgtgaagcccctggcccagatcgccggaaacagatacgcctccggacctgtgggaaaggccctgagcgacgcatgtatgggcacaatcgcctccttcctgtctaagtaccaggacatcatcatcgaacaccagaaggtggtgaagggcaaccagaagagactggagagcctgcgggagctggccggcaaggaaaacctggaataccctagcgtgaccctgccacctcagcctcacaccaaggagggcgttgatgcctacaacgaagtgatcgcccgggtgcgaatgtgggtgaacctgaacctgtggcagaagctgaagctaagcagagatgatgccaagcctctgctgagactgaagggattcccttcctttcctctggtcgagagacaggccaacgaagtggactggtgggacatggtgtgtaacgtgaagaagctgatcaacgagaaaaaggaggatggcaaggtgttttggcagaatctggctggctacaagagacaggaagccctgagaccatacctgagcagcgaggaagatcggaagaagggaaagaaattcgctcggtaccagctgggcgacctgctgctgcacctggaaaagaagcacggcgaggactggggaaaggtgtacgacgaggcctgggagcggattgacaagaaagtggaaggcctgagcaagcacatcaagctggaagaggaacggagaagcgaggacgcccagagcaaggccgccctgaccgactggctgcgggctaaggccagcttcgtgatcgagggcctgaaggaggccgacaaggacgagttctgcagatgcgagctgaagctgcagaagtggtacggggacctgcggggaaagcccttcgccatcgaagccgagaacagcatcctggacatcagcggcttcagcaagcagtacaactgtgccttcatctggcagaaggacggcgtgaagaagctgaacctgtacctgatcatcaactacttcaagggcggcaagctgcggttcaagaagatcaaacctgaagccttcgaagccaacagattctacaccgtgatcaacaaaaagagcggcgagatcgtgcccatggaggtgaacttcaacttcgacgaccccaacctgatcatcctgcctctggcctttggcaagagacagggcagagaattcatctggaacgacctgctgtccctggaaaccggcagcctgaagctggccaacggaagagtgatcgagaagacactgtacaacagaagaacccggcaggatgagcctgccctgttcgtggccctgaccttcgagcggcgggaggtcctggactcctccaatatcaaaccaatgaacctgatcggcgtggcaagaggcgaaaacatccccgccgtgatcgccctgaccgaccccgagggctgcccactgagccggtttaaggatagcctgggaaacccaacccacatcctgagaatcggcgagagctataaggagaagcagcggaccatccaggccaagaaggaggtggagcagcggagagccggcggctacagccggaagtacgccagcaaagccaagaatctggcagacgatatggtgagaaacaccgctagagatctgctgtactacgccgtgacccaggatgccatgctgatcttcgccaacctgagccggggcttcggccggcagggcaagcggaccttcatggccgagagacagtacacacggatggaggactggctgaccgccaagctggcctacgagggcctgagcaagacctacctgtccaagacactggcccagtacacctccaagacatgcagcaactgtgggtttaccatcaccagcgccgactacgacagggtgctggagaagctgaagaagacagcaacaggctggatgaccacaattaacggcaaggagctgaaggtggagggccagattacctactacaacagatacaagagacagaacgtagtcaaggacctgtccgtcgagctggatagactgagcgaagaatctgtgaacaacgacatctcctcctggacaaagggcagaagcggagaagctctgagcctcctgaagaaaagattctcccatagacccgtgcaggagaagttcgtgtgcctgaactgcggcttcgagacacacgcagccgagcaagccgccctgaacatcgccagatcctggctgttcctgcggagccaggagtacaagaaataccagacaaacaagacaaccggcaacaccgataagagagccttcgtcgagacctggcagtccttttaccggaagaagcttaaggaggtgtggaaacctgccgtgcggtctggcggatctggcggaggctccacaagctggcaggagagcctgaccttcaaggacgtggccgtggacttcacccaggaggagtggggcctgctggaccacagccagaagaggctgtacaaggaggtgatgctggagaacagccagaacctgctgagcctgggcatcccccccctgagggaggacctgatcagccacctggaggagggcgaggccagctggatcctggacaggaagggccccaggaagagctgccccgacgccgagaccaggaccagccccaagaaaaagagaaaagtctaagctgccttctgcggggcttgccttctggccatgcccttcttctctcccttgcacctgtacctcttggtctttgaataaagcctgagtaggaaggctagcaaaaaaaaaaaaaaaaaaaaaaaaaaaaaaaaaaaaaaaaaaaaaaaaaaaaaaaaaaaaaaaaaaaaaaaaaaaaaaaa

SEQ ID NO: 3876 - RNA, 5419 nt, synthetic construct
  source 1..5419: mol_type = other RNA
aggaaataagagagaaaagaagagtaagaagaaatataagagccaccatggcccctaagaagaagcgtaaagtgagccgggtgaacggcagcggcagcggcggcggcatgaaccacgaccaggagttcgacccccctaaggtgtaccctcccgtccccgccgagaagagaaagcccatccgggtcctgagcctgttcgatggcatcgccaccggtctgctggtgctgaaggacctgggcatccaggtggataggtacattgcctccgaggtgtgcgaggactccatcaccgtgggaatggtgcgtcatcagggcaagatcatgtacgtgggcgacgtgcggagcgtgacacagaagcatatccaggagtggggccctttcgacctggtgatcggcggcagcccttgcaatgacctgagcatcgtgaacccagcccggaagggcctgtacgagggaaccggcagactgttcttcgagttttacagactgctgcacgacgcccggcctaaggaaggcgacgaccggcccttcttttggctgttcgagaatgtggtggccatgggagtcagcgacaagcgggatattagccggttcctggagagcaaccccgtgatgatcgatgccaaggaagtgagcgccgcccaccgggccagatacttctggggcaatctgcctggcatgaacagacccctggccagcaccgtgaacgacaagctggagctgcaggagtgcctggagcacggccggatcgccaagttcagcaaggtgagaaccatcaccacccgaagcaacagcatcaaacaaggcaaggaccagcactttcctgtgttcatgaacgagaaggaggacatcctgtggtgtaccgagatggagagagtgttcgggttcccagtccactacacagatgtcagcaacatgtctagactggccagacagagactgctgggaagaagctggtccgtccctgtgatcagacacctgttcgcccctctgaaggagtacttcgcctgcgtgagcagcggcaacagcaacgccaacagccggggccccagcttctctagcggcctggtgccactgtccctgagagggagccacatgggccccatggagatctacaaaaccgtgagcgcctggaagcggcagcctgtgcgcgtgctgagcctgtttcggaatatcgataaagtcctgaaaagcctgggattcctggagagcggctctggctccggcggtggcaccctgaagtacgtggaggatgtgacaaacgtggtcagacgggatgtggagaagtggggccccttcgatctggtgtacggcagcacccaacccctgggcagctcttgtgaccggtgccctggctggtacatgtttcagttccaccggatcctgcagtacgccctgccgagacaggagtcccagcggccattcttttggattttcatggacaacttgctgctgaccgaggatgaccaggaaactaccactcggttcctgcagaccgaagccgtgaccctgcaggacgtgagaggccgggactaccagaacgccatgcgggtgtggtccaacatccctggactgaaaagcaagcacgcacctctgacccctaaagaagaggagtacctgcaggcccaggtgcggagcagaagcaagctggacgcccctaaggtggatctgctggtgaagaattgcctcctgcccctgagagagtacttcaagtatttcagccagaatagtctgcccctgggcggcccaagcagcggcgcccctcctcccagcggcggcagcccagccggctccccaacctctaccgaggagggcacctctgagtccgccacccccgagagcggccctggcacctccaccgagcccagcgagggcagcgcacccggcagccctgccggcagccccacctccacagaggagggaaccagcaccgagcccagcgaaggcagcgccccaggcaccagcaccgagcctagtgagggcggctctggcggcggcagcgcccaggagattaaacggatcaacaagatcagaagaagacttgtgaaagacagcaacaccaagaaggccggcaagacaggccccatgaaaaccctgctggttagagtgatgacacccgatctgagagagcggctggaaaacctgagaaagaagcctgaaaatatcccccagcccatcagcaatacatctagagccaacctgaataagctgctgaccgattacaccgaaatgaagaaggcgatcctgcatgtgtactgggaagagttccagaaggaccctgtgggcctgatgagccgggtggcccagcctgccagcaagaagatcgatcagaacaagctgaaacctgagatggacgagaagggcaacctgaccaccgccggctttgcctgctctcagtgtggccagcccctgttcgtgtacaagctggagcaggtgtctgagaagggcaaggcttacaccaactacttcggacggtgcaatgtggccgagcacgaaaagctgatcctgctggcccagctgaagcccgagaaggatagcgacgaagccgtgacatatagcctgggaaagtttgggcagagggccctggatttctacagcattcatgtgaccaaggagtccacccaccccgtgaagcccctggcccagatcgccggaaacagatacgcctccggacctgtgggaaaggccctgagcgacgcatgtatgggcacaatcgcctccttcctgtctaagtaccaggacatcatcatcgaacaccagaaggtggtgaagggcaaccagaagagactggagagcctgcgggagctggccggcaaggaaaacctggaataccctagcgtgaccctgccacctcagcctcacaccaaggagggcgttgatgcctacaacgaagtgatcgcccgggtgcgaatgtgggtgaacctgaacctgtggcagaagctgaagctaagcagagatgatgccaagcctctgctgagactgaagggattcccttcctttcctctggtcgagagacaggccaacgaagtggactggtgggacatggtgtgtaacgtgaagaagctgatcaacgagaaaaaggaggatggcaaggtgttttggcagaatctggctggctacaagagacaggaagccctgagaccatacctgagcagcgaggaagatcggaagaagggaaagaaattcgctcggtaccagctgggcgacctgctgctgcacctggaaaagaagcacggcgaggactggggaaaggtgtacgacgaggcctgggagcggattgacaagaaagtggaaggcctgagcaagcacatcaagctggaagaggaacggagaagcgaggacgcccagagcaaggccgccctgaccgactggctgcgggctaaggccagcttcgtgatcgagggcctgaaggaggccgacaaggacgagttctgcagatgcgagctgaagctgcagaagtggtacggggacctgcggggaaagcccttcgccatcgaagccgagaacagcatcctggacatcagcggcttcagcaagcagtacaactgtgccttcatctggcagaaggacggcgtgaagaagctgaacctgtacctgatcatcaactacttcaagggcggcaagctgcggttcaagaagatcaaacctgaagccttcgaagccaacagattctacaccgtgatcaacaaaaagagcggcgagatcgtgcccatggaggtgaacttcaacttcgacgaccccaacctgatcatcctgcctctggcctttggcaagagacagggcagagaattcatctggaacgacctgctgtccctggaaaccggcagcctgaagctggccaacggaagagtgatcgagaagacactgtacaacagaagaacccggcaggatgagcctgccctgttcgtggccctgaccttcgagcggcgggaggtcctggactcctccaatatcaaaccaatgaacctgatcggcgtggcaagaggcgaaaacatccccgccgtgatcgccctgaccgaccccgagggctgcccactgagccggtttaaggatagcctgggaaacccaacccacatcctgagaatcggcgagagctataaggagaagcagcggaccatccaggccaagaaggaggtggagcagcggagagccggcggctacagccggaagtacgccagcaaagccaagaatctggcagacgatatggtgagaaacaccgctagagatctgctgtactacgccgtgacccaggatgccatgctgatcttcgccaacctgagccggggcttcggccggcagggcaagcggaccttcatggccgagagacagtacacacggatggaggactggctgaccgccaagctggcctacgagggcctgagcaagacctacctgtccaagacactggcccagtacacctccaagacatgcagcaactgtgggtttaccatcaccagcgccgactacgacagggtgctggagaagctgaagaagacagcaacaggctggatgaccacaattaacggcaaggagctgaaggtggagggccagattacctactacaacagatacaagagacagaacgtagtcaaggacctgtccgtcgagctggatagactgagcgaagaatctgtgaacaacgacatctcctcctggacaaagggcagaagcggagaagctctgagcctcctgaagaaaagattctcccatagacccgtgcaggagaagttcgtgtgcctgaactgcggcttcgagacacacgcagccgagcaagccgccctgaacatcgccagatcctggctgttcctgcggagccaggagtacaagaaataccagacaaacaagacaaccggcaacaccgataagagagccttcgtcgagacctggcagtccttttaccggaagaagcttaaggaggtgtggaaacctgccgtgcggtctggcggatctggcggaggctccacaagcagccagggcagcctgagcttcagggacgtgaccgtgggcttcacctgggaggagtggcagcagctggaccccgcccagagggccctgtacagggacgtgatgctggagacctacagccacctgctgagcgtgggctactgcatccccaagcccgaggtgatcctgaagctggagcagggcgaggagccctggatcctggaggaggagagcagcagccagagcgtgcccgagctgatcaacagcaccagccccaagaaaaagagaaaagtctaagctgccttctgcggggcttgccttctggccatgcccttcttctctcccttgcacctgtacctcttggtctttgaataaagcctgagtaggaaggctagcaaaaaaaaaaaaaaaaaaaaaaaaaaaaaaaaaaaaaaaaaaaaaaaaaaaaaaaaaaaaaaaaaaaaaaaaaaaaaaaa

SEQ ID NO: 3877 - RNA, 5419 nt, synthetic construct
  source 1..5419: mol_type = other RNA
aggaaataagagagaaaagaagagtaagaagaaatataagagccaccatggcccctaagaagaagcgtaaagtgagccgggtgaacggcagcggcagcggcggcggcatgaaccacgaccaggagttcgacccccctaaggtgtaccctcccgtccccgccgagaagagaaagcccatccgggtcctgagcctgttcgatggcatcgccaccggtctgctggtgctgaaggacctgggcatccaggtggataggtacattgcctccgaggtgtgcgaggactccatcaccgtgggaatggtgcgtcatcagggcaagatcatgtacgtgggcgacgtgcggagcgtgacacagaagcatatccaggagtggggccctttcgacctggtgatcggcggcagcccttgcaatgacctgagcatcgtgaacccagcccggaagggcctgtacgagggaaccggcagactgttcttcgagttttacagactgctgcacgacgcccggcctaaggaaggcgacgaccggcccttcttttggctgttcgagaatgtggtggccatgggagtcagcgacaagcgggatattagccggttcctggagagcaaccccgtgatgatcgatgccaaggaagtgagcgccgcccaccgggccagatacttctggggcaatctgcctggcatgaacagacccctggccagcaccgtgaacgacaagctggagctgcaggagtgcctggagcacggccggatcgccaagttcagcaaggtgagaaccatcaccacccgaagcaacagcatcaaacaaggcaaggaccagcactttcctgtgttcatgaacgagaaggaggacatcctgtggtgtaccgagatggagagagtgttcgggttcccagtccactacacagatgtcagcaacatgtctagactggccagacagagactgctgggaagaagctggtccgtccctgtgatcagacacctgttcgcccctctgaaggagtacttcgcctgcgtgagcagcggcaacagcaacgccaacagccggggccccagcttctctagcggcctggtgccactgtccctgagagggagccacatgggccccatggagatctacaaaaccgtgagcgcctggaagcggcagcctgtgcgcgtgctgagcctgtttcggaatatcgataaagtcctgaaaagcctgggattcctggagagcggctctggctccggcggtggcaccctgaagtacgtggaggatgtgacaaacgtggtcagacgggatgtggagaagtggggccccttcgatctggtgtacggcagcacccaacccctgggcagctcttgtgaccggtgccctggctggtacatgtttcagttccaccggatcctgcagtacgccctgccgagacaggagtcccagcggccattcttttggattttcatggacaacttgctgctgaccgaggatgaccaggaaactaccactcggttcctgcagaccgaagccgtgaccctgcaggacgtgagaggccgggactaccagaacgccatgcgggtgtggtccaacatccctggactgaaaagcaagcacgcacctctgacccctaaagaagaggagtacctgcaggcccaggtgcggagcagaagcaagctggacgcccctaaggtggatctgctggtgaagaattgcctcctgcccctgagagagtacttcaagtatttcagccagaatagtctgcccctgggcggcccaagcagcggcgcccctcctcccagcggcggcagcccagccggctccccaacctctaccgaggagggcacctctgagtccgccacccccgagagcggccctggcacctccaccgagcccagcgagggcagcgcacccggcagccctgccggcagccccacctccacagaggagggaaccagcaccgagcccagcgaaggcagcgccccaggcaccagcaccgagcctagtgagggcggctctggcggcggcagcgcccaggagattaaacggatcaacaagatcagaagaagacttgtgaaagacagcaacaccaagaaggccggcaagacaggccccatgaaaaccctgctggttagagtgatgacacccgatctgagagagcggctggaaaacctgagaaagaagcctgaaaatatcccccagcccatcagcaatacatctagagccaacctgaataagctgctgaccgattacaccgaaatgaagaaggcgatcctgcatgtgtactgggaagagttccagaaggaccctgtgggcctgatgagccgggtggcccagcctgccagcaagaagatcgatcagaacaagctgaaacctgagatggacgagaagggcaacctgaccaccgccggctttgcctgctctcagtgtggccagcccctgttcgtgtacaagctggagcaggtgtctgagaagggcaaggcttacaccaactacttcggacggtgcaatgtggccgagcacgaaaagctgatcctgctggcccagctgaagcccgagaaggatagcgacgaagccgtgacatatagcctgggaaagtttgggcagagggccctggatttctacagcattcatgtgaccaaggagtccacccaccccgtgaagcccctggcccagatcgccggaaacagatacgcctccggacctgtgggaaaggccctgagcgacgcatgtatgggcacaatcgcctccttcctgtctaagtaccaggacatcatcatcgaacaccagaaggtggtgaagggcaaccagaagagactggagagcctgcgggagctggccggcaaggaaaacctggaataccctagcgtgaccctgccacctcagcctcacaccaaggagggcgttgatgcctacaacgaagtgatcgcccgggtgcgaatgtgggtgaacctgaacctgtggcagaagctgaagctaagcagagatgatgccaagcctctgctgagactgaagggattcccttcctttcctctggtcgagagacaggccaacgaagtggactggtgggacatggtgtgtaacgtgaagaagctgatcaacgagaaaaaggaggatggcaaggtgttttggcagaatctggctggctacaagagacaggaagccctgagaccatacctgagcagcgaggaagatcggaagaagggaaagaaattcgctcggtaccagctgggcgacctgctgctgcacctggaaaagaagcacggcgaggactggggaaaggtgtacgacgaggcctgggagcggattgacaagaaagtggaaggcctgagcaagcacatcaagctggaagaggaacggagaagcgaggacgcccagagcaaggccgccctgaccgactggctgcgggctaaggccagcttcgtgatcgagggcctgaaggaggccgacaaggacgagttctgcagatgcgagctgaagctgcagaagtggtacggggacctgcggggaaagcccttcgccatcgaagccgagaacagcatcctggacatcagcggcttcagcaagcagtacaactgtgccttcatctggcagaaggacggcgtgaagaagctgaacctgtacctgatcatcaactacttcaagggcggcaagctgcggttcaagaagatcaaacctgaagccttcgaagccaacagattctacaccgtgatcaacaaaaagagcggcgagatcgtgcccatggaggtgaacttcaacttcgacgaccccaacctgatcatcctgcctctggcctttggcaagagacagggcagagaattcatctggaacgacctgctgtccctggaaaccggcagcctgaagctggccaacggaagagtgatcgagaagacactgtacaacagaagaacccggcaggatgagcctgccctgttcgtggccctgaccttcgagcggcgggaggtcctggactcctccaatatcaaaccaatgaacctgatcggcgtggcaagaggcgaaaacatccccgccgtgatcgccctgaccgaccccgagggctgcccactgagccggtttaaggatagcctgggaaacccaacccacatcctgagaatcggcgagagctataaggagaagcagcggaccatccaggccaagaaggaggtggagcagcggagagccggcggctacagccggaagtacgccagcaaagccaagaatctggcagacgatatggtgagaaacaccgctagagatctgctgtactacgccgtgacccaggatgccatgctgatcttcgccaacctgagccggggcttcggccggcagggcaagcggaccttcatggccgagagacagtacacacggatggaggactggctgaccgccaagctggcctacgagggcctgagcaagacctacctgtccaagacactggcccagtacacctccaagacatgcagcaactgtgggtttaccatcaccagcgccgactacgacagggtgctggagaagctgaagaagacagcaacaggctggatgaccacaattaacggcaaggagctgaaggtggagggccagattacctactacaacagatacaagagacagaacgtagtcaaggacctgtccgtcgagctggatagactgagcgaagaatctgtgaacaacgacatctcctcctggacaaagggcagaagcggagaagctctgagcctcctgaagaaaagattctcccatagacccgtgcaggagaagttcgtgtgcctgaactgcggcttcgagacacacgcagccgagcaagccgccctgaacatcgccagatcctggctgttcctgcggagccaggagtacaagaaataccagacaaacaagacaaccggcaacaccgataagagagccttcgtcgagacctggcagtccttttaccggaagaagcttaaggaggtgtggaaacctgccgtgcggtctggcggatctggcggaggctccacaagcatggccggcgaggccgaggcccagctggaccccagcctgcagggcctggtgatgttcgaggacgtgaccgtgtacttcagcagggaggagtggggcctgctgaacgtgacccagaagggcctgtacagggacgtgatgctggagaacttcgccctggtgagcagcctgggcctggcccccagcaggagccccgtgttcacccagctggaggacgacgagcagagctgggtgcccagctgggtgaccagccccaagaaaaagagaaaagtctaagctgccttctgcggggcttgccttctggccatgcccttcttctctcccttgcacctgtacctcttggtctttgaataaagcctgagtaggaaggctagcaaaaaaaaaaaaaaaaaaaaaaaaaaaaaaaaaaaaaaaaaaaaaaaaaaaaaaaaaaaaaaaaaaaaaaaaaaaaaaaa

SEQ ID NO: 3878 - RNA, 5419 nt, synthetic construct
  source 1..5419: mol_type = other RNA
aggaaataagagagaaaagaagagtaagaagaaatataagagccaccatggcccctaagaagaagcgtaaagtgagccgggtgaacggcagcggcagcggcggcggcatgaaccacgaccaggagttcgacccccctaaggtgtaccctcccgtccccgccgagaagagaaagcccatccgggtcctgagcctgttcgatggcatcgccaccggtctgctggtgctgaaggacctgggcatccaggtggataggtacattgcctccgaggtgtgcgaggactccatcaccgtgggaatggtgcgtcatcagggcaagatcatgtacgtgggcgacgtgcggagcgtgacacagaagcatatccaggagtggggccctttcgacctggtgatcggcggcagcccttgcaatgacctgagcatcgtgaacccagcccggaagggcctgtacgagggaaccggcagactgttcttcgagttttacagactgctgcacgacgcccggcctaaggaaggcgacgaccggcccttcttttggctgttcgagaatgtggtggccatgggagtcagcgacaagcgggatattagccggttcctggagagcaaccccgtgatgatcgatgccaaggaagtgagcgccgcccaccgggccagatacttctggggcaatctgcctggcatgaacagacccctggccagcaccgtgaacgacaagctggagctgcaggagtgcctggagcacggccggatcgccaagttcagcaaggtgagaaccatcaccacccgaagcaacagcatcaaacaaggcaaggaccagcactttcctgtgttcatgaacgagaaggaggacatcctgtggtgtaccgagatggagagagtgttcgggttcccagtccactacacagatgtcagcaacatgtctagactggccagacagagactgctgggaagaagctggtccgtccctgtgatcagacacctgttcgcccctctgaaggagtacttcgcctgcgtgagcagcggcaacagcaacgccaacagccggggccccagcttctctagcggcctggtgccactgtccctgagagggagccacatgggccccatggagatctacaaaaccgtgagcgcctggaagcggcagcctgtgcgcgtgctgagcctgtttcggaatatcgataaagtcctgaaaagcctgggattcctggagagcggctctggctccggcggtggcaccctgaagtacgtggaggatgtgacaaacgtggtcagacgggatgtggagaagtggggccccttcgatctggtgtacggcagcacccaacccctgggcagctcttgtgaccggtgccctggctggtacatgtttcagttccaccggatcctgcagtacgccctgccgagacaggagtcccagcggccattcttttggattttcatggacaacttgctgctgaccgaggatgaccaggaaactaccactcggttcctgcagaccgaagccgtgaccctgcaggacgtgagaggccgggactaccagaacgccatgcgggtgtggtccaacatccctggactgaaaagcaagcacgcacctctgacccctaaagaagaggagtacctgcaggcccaggtgcggagcagaagcaagctggacgcccctaaggtggatctgctggtgaagaattgcctcctgcccctgagagagtacttcaagtatttcagccagaatagtctgcccctgggcggcccaagcagcggcgcccctcctcccagcggcggcagcccagccggctccccaacctctaccgaggagggcacctctgagtccgccacccccgagagcggccctggcacctccaccgagcccagcgagggcagcgcacccggcagccctgccggcagccccacctccacagaggagggaaccagcaccgagcccagcgaaggcagcgccccaggcaccagcaccgagcctagtgagggcggctctggcggcggcagcgcccaggagattaaacggatcaacaagatcagaagaagacttgtgaaagacagcaacaccaagaaggccggcaagacaggccccatgaaaaccctgctggttagagtgatgacacccgatctgagagagcggctggaaaacctgagaaagaagcctgaaaatatcccccagcccatcagcaatacatctagagccaacctgaataagctgctgaccgattacaccgaaatgaagaaggcgatcctgcatgtgtactgggaagagttccagaaggaccctgtgggcctgatgagccgggtggcccagcctgccagcaagaagatcgatcagaacaagctgaaacctgagatggacgagaagggcaacctgaccaccgccggctttgcctgctctcagtgtggccagcccctgttcgtgtacaagctggagcaggtgtctgagaagggcaaggcttacaccaactacttcggacggtgcaatgtggccgagcacgaaaagctgatcctgctggcccagctgaagcccgagaaggatagcgacgaagccgtgacatatagcctgggaaagtttgggcagagggccctggatttctacagcattcatgtgaccaaggagtccacccaccccgtgaagcccctggcccagatcgccggaaacagatacgcctccggacctgtgggaaaggccctgagcgacgcatgtatgggcacaatcgcctccttcctgtctaagtaccaggacatcatcatcgaacaccagaaggtggtgaagggcaaccagaagagactggagagcctgcgggagctggccggcaaggaaaacctggaataccctagcgtgaccctgccacctcagcctcacaccaaggagggcgttgatgcctacaacgaagtgatcgcccgggtgcgaatgtgggtgaacctgaacctgtggcagaagctgaagctaagcagagatgatgccaagcctctgctgagactgaagggattcccttcctttcctctggtcgagagacaggccaacgaagtggactggtgggacatggtgtgtaacgtgaagaagctgatcaacgagaaaaaggaggatggcaaggtgttttggcagaatctggctggctacaagagacaggaagccctgagaccatacctgagcagcgaggaagatcggaagaagggaaagaaattcgctcggtaccagctgggcgacctgctgctgcacctggaaaagaagcacggcgaggactggggaaaggtgtacgacgaggcctgggagcggattgacaagaaagtggaaggcctgagcaagcacatcaagctggaagaggaacggagaagcgaggacgcccagagcaaggccgccctgaccgactggctgcgggctaaggccagcttcgtgatcgagggcctgaaggaggccgacaaggacgagttctgcagatgcgagctgaagctgcagaagtggtacggggacctgcggggaaagcccttcgccatcgaagccgagaacagcatcctggacatcagcggcttcagcaagcagtacaactgtgccttcatctggcagaaggacggcgtgaagaagctgaacctgtacctgatcatcaactacttcaagggcggcaagctgcggttcaagaagatcaaacctgaagccttcgaagccaacagattctacaccgtgatcaacaaaaagagcggcgagatcgtgcccatggaggtgaacttcaacttcgacgaccccaacctgatcatcctgcctctggcctttggcaagagacagggcagagaattcatctggaacgacctgctgtccctggaaaccggcagcctgaagctggccaacggaagagtgatcgagaagacactgtacaacagaagaacccggcaggatgagcctgccctgttcgtggccctgaccttcgagcggcgggaggtcctggactcctccaatatcaaaccaatgaacctgatcggcgtggcaagaggcgaaaacatccccgccgtgatcgccctgaccgaccccgagggctgcccactgagccggtttaaggatagcctgggaaacccaacccacatcctgagaatcggcgagagctataaggagaagcagcggaccatccaggccaagaaggaggtggagcagcggagagccggcggctacagccggaagtacgccagcaaagccaagaatctggcagacgatatggtgagaaacaccgctagagatctgctgtactacgccgtgacccaggatgccatgctgatcttcgccaacctgagccggggcttcggccggcagggcaagcggaccttcatggccgagagacagtacacacggatggaggactggctgaccgccaagctggcctacgagggcctgagcaagacctacctgtccaagacactggcccagtacacctccaagacatgcagcaactgtgggtttaccatcaccagcgccgactacgacagggtgctggagaagctgaagaagacagcaacaggctggatgaccacaattaacggcaaggagctgaaggtggagggccagattacctactacaacagatacaagagacagaacgtagtcaaggacctgtccgtcgagctggatagactgagcgaagaatctgtgaacaacgacatctcctcctggacaaagggcagaagcggagaagctctgagcctcctgaagaaaagattctcccatagacccgtgcaggagaagttcgtgtgcctgaactgcggcttcgagacacacgcagccgagcaagccgccctgaacatcgccagatcctggctgttcctgcggagccaggagtacaagaaataccagacaaacaagacaaccggcaacaccgataagagagccttcgtcgagacctggcagtccttttaccggaagaagcttaaggaggtgtggaaacctgccgtgcggtctggcggatctggcggaggctccacaagcatggagctgctgagcttcgaggacgtggccatgtacttcaccagggaggagtggggccacctggactggggccagaaggacctgtacagggacgtgatgctggagaactacaggaacatggtgctgctgggcttccagttccccaagcccgaggtgatctgccagctggagaactgggacgagcagtggatcctggacctgcccagggccggcagcaggaaggccagcggcagcgcctgccccaccagccccaagaaaaagagaaaagtctaagctgccttctgcggggcttgccttctggccatgcccttcttctctcccttgcacctgtacctcttggtctttgaataaagcctgagtaggaaggctagcaaaaaaaaaaaaaaaaaaaaaaaaaaaaaaaaaaaaaaaaaaaaaaaaaaaaaaaaaaaaaaaaaaaaaaaaaaaaaaaa

SEQ ID NO: 3879 - RNA, 5419 nt, synthetic construct
  source 1..5419: mol_type = other RNA
aggaaataagagagaaaagaagagtaagaagaaatataagagccaccatggcccctaagaagaagcgtaaagtgagccgggtgaacggcagcggcagcggcggcggcatgaaccacgaccaggagttcgacccccctaaggtgtaccctcccgtccccgccgagaagagaaagcccatccgggtcctgagcctgttcgatggcatcgccaccggtctgctggtgctgaaggacctgggcatccaggtggataggtacattgcctccgaggtgtgcgaggactccatcaccgtgggaatggtgcgtcatcagggcaagatcatgtacgtgggcgacgtgcggagcgtgacacagaagcatatccaggagtggggccctttcgacctggtgatcggcggcagcccttgcaatgacctgagcatcgtgaacccagcccggaagggcctgtacgagggaaccggcagactgttcttcgagttttacagactgctgcacgacgcccggcctaaggaaggcgacgaccggcccttcttttggctgttcgagaatgtggtggccatgggagtcagcgacaagcgggatattagccggttcctggagagcaaccccgtgatgatcgatgccaaggaagtgagcgccgcccaccgggccagatacttctggggcaatctgcctggcatgaacagacccctggccagcaccgtgaacgacaagctggagctgcaggagtgcctggagcacggccggatcgccaagttcagcaaggtgagaaccatcaccacccgaagcaacagcatcaaacaaggcaaggaccagcactttcctgtgttcatgaacgagaaggaggacatcctgtggtgtaccgagatggagagagtgttcgggttcccagtccactacacagatgtcagcaacatgtctagactggccagacagagactgctgggaagaagctggtccgtccctgtgatcagacacctgttcgcccctctgaaggagtacttcgcctgcgtgagcagcggcaacagcaacgccaacagccggggccccagcttctctagcggcctggtgccactgtccctgagagggagccacatgggccccatggagatctacaaaaccgtgagcgcctggaagcggcagcctgtgcgcgtgctgagcctgtttcggaatatcgataaagtcctgaaaagcctgggattcctggagagcggctctggctccggcggtggcaccctgaagtacgtggaggatgtgacaaacgtggtcagacgggatgtggagaagtggggccccttcgatctggtgtacggcagcacccaacccctgggcagctcttgtgaccggtgccctggctggtacatgtttcagttccaccggatcctgcagtacgccctgccgagacaggagtcccagcggccattcttttggattttcatggacaacttgctgctgaccgaggatgaccaggaaactaccactcggttcctgcagaccgaagccgtgaccctgcaggacgtgagaggccgggactaccagaacgccatgcgggtgtggtccaacatccctggactgaaaagcaagcacgcacctctgacccctaaagaagaggagtacctgcaggcccaggtgcggagcagaagcaagctggacgcccctaaggtggatctgctggtgaagaattgcctcctgcccctgagagagtacttcaagtatttcagccagaatagtctgcccctgggcggcccaagcagcggcgcccctcctcccagcggcggcagcccagccggctccccaacctctaccgaggagggcacctctgagtccgccacccccgagagcggccctggcacctccaccgagcccagcgagggcagcgcacccggcagccctgccggcagccccacctccacagaggagggaaccagcaccgagcccagcgaaggcagcgccccaggcaccagcaccgagcctagtgagggcggctctggcggcggcagcgcccaggagattaaacggatcaacaagatcagaagaagacttgtgaaagacagcaacaccaagaaggccggcaagacaggccccatgaaaaccctgctggttagagtgatgacacccgatctgagagagcggctggaaaacctgagaaagaagcctgaaaatatcccccagcccatcagcaatacatctagagccaacctgaataagctgctgaccgattacaccgaaatgaagaaggcgatcctgcatgtgtactgggaagagttccagaaggaccctgtgggcctgatgagccgggtggcccagcctgccagcaagaagatcgatcagaacaagctgaaacctgagatggacgagaagggcaacctgaccaccgccggctttgcctgctctcagtgtggccagcccctgttcgtgtacaagctggagcaggtgtctgagaagggcaaggcttacaccaactacttcggacggtgcaatgtggccgagcacgaaaagctgatcctgctggcccagctgaagcccgagaaggatagcgacgaagccgtgacatatagcctgggaaagtttgggcagagggccctggatttctacagcattcatgtgaccaaggagtccacccaccccgtgaagcccctggcccagatcgccggaaacagatacgcctccggacctgtgggaaaggccctgagcgacgcatgtatgggcacaatcgcctccttcctgtctaagtaccaggacatcatcatcgaacaccagaaggtggtgaagggcaaccagaagagactggagagcctgcgggagctggccggcaaggaaaacctggaataccctagcgtgaccctgccacctcagcctcacaccaaggagggcgttgatgcctacaacgaagtgatcgcccgggtgcgaatgtgggtgaacctgaacctgtggcagaagctgaagctaagcagagatgatgccaagcctctgctgagactgaagggattcccttcctttcctctggtcgagagacaggccaacgaagtggactggtgggacatggtgtgtaacgtgaagaagctgatcaacgagaaaaaggaggatggcaaggtgttttggcagaatctggctggctacaagagacaggaagccctgagaccatacctgagcagcgaggaagatcggaagaagggaaagaaattcgctcggtaccagctgggcgacctgctgctgcacctggaaaagaagcacggcgaggactggggaaaggtgtacgacgaggcctgggagcggattgacaagaaagtggaaggcctgagcaagcacatcaagctggaagaggaacggagaagcgaggacgcccagagcaaggccgccctgaccgactggctgcgggctaaggccagcttcgtgatcgagggcctgaaggaggccgacaaggacgagttctgcagatgcgagctgaagctgcagaagtggtacggggacctgcggggaaagcccttcgccatcgaagccgagaacagcatcctggacatcagcggcttcagcaagcagtacaactgtgccttcatctggcagaaggacggcgtgaagaagctgaacctgtacctgatcatcaactacttcaagggcggcaagctgcggttcaagaagatcaaacctgaagccttcgaagccaacagattctacaccgtgatcaacaaaaagagcggcgagatcgtgcccatggaggtgaacttcaacttcgacgaccccaacctgatcatcctgcctctggcctttggcaagagacagggcagagaattcatctggaacgacctgctgtccctggaaaccggcagcctgaagctggccaacggaagagtgatcgagaagacactgtacaacagaagaacccggcaggatgagcctgccctgttcgtggccctgaccttcgagcggcgggaggtcctggactcctccaatatcaaaccaatgaacctgatcggcgtggcaagaggcgaaaacatccccgccgtgatcgccctgaccgaccccgagggctgcccactgagccggtttaaggatagcctgggaaacccaacccacatcctgagaatcggcgagagctataaggagaagcagcggaccatccaggccaagaaggaggtggagcagcggagagccggcggctacagccggaagtacgccagcaaagccaagaatctggcagacgatatggtgagaaacaccgctagagatctgctgtactacgccgtgacccaggatgccatgctgatcttcgccaacctgagccggggcttcggccggcagggcaagcggaccttcatggccgagagacagtacacacggatggaggactggctgaccgccaagctggcctacgagggcctgagcaagacctacctgtccaagacactggcccagtacacctccaagacatgcagcaactgtgggtttaccatcaccagcgccgactacgacagggtgctggagaagctgaagaagacagcaacaggctggatgaccacaattaacggcaaggagctgaaggtggagggccagattacctactacaacagatacaagagacagaacgtagtcaaggacctgtccgtcgagctggatagactgagcgaagaatctgtgaacaacgacatctcctcctggacaaagggcagaagcggagaagctctgagcctcctgaagaaaagattctcccatagacccgtgcaggagaagttcgtgtgcctgaactgcggcttcgagacacacgcagccgagcaagccgccctgaacatcgccagatcctggctgttcctgcggagccaggagtacaagaaataccagacaaacaagacaaccggcaacaccgataagagagccttcgtcgagacctggcagtccttttaccggaagaagcttaaggaggtgtggaaacctgccgtgcggtctggcggatctggcggaggctccacaagccagatccccgtgatcttcgaggacatcgtgatctacttcagccaggaggagtggaaggacctggaggagtggcagaaggagctgtacaaggacgtgatgaaggagaactaccagaccctgatcagcctgggcaccggcttccccacccccccccccgacatcatcagccacatcgagaggggcgaggagccctacatcagggacgagctggagagcgagaagagggagaccggcaagaggggcaccagccccaagaaaaagagaaaagtctaagctgccttctgcggggcttgccttctggccatgcccttcttctctcccttgcacctgtacctcttggtctttgaataaagcctgagtaggaaggctagcaaaaaaaaaaaaaaaaaaaaaaaaaaaaaaaaaaaaaaaaaaaaaaaaaaaaaaaaaaaaaaaaaaaaaaaaaaaaaaaa

SEQ ID NO: 3880 - RNA, 5419 nt, synthetic construct
  source 1..5419: mol_type = other RNA
aggaaataagagagaaaagaagagtaagaagaaatataagagccaccatggcccctaagaagaagcgtaaagtgagccgggtgaacggcagcggcagcggcggcggcatgaaccacgaccaggagttcgacccccctaaggtgtaccctcccgtccccgccgagaagagaaagcccatccgggtcctgagcctgttcgatggcatcgccaccggtctgctggtgctgaaggacctgggcatccaggtggataggtacattgcctccgaggtgtgcgaggactccatcaccgtgggaatggtgcgtcatcagggcaagatcatgtacgtgggcgacgtgcggagcgtgacacagaagcatatccaggagtggggccctttcgacctggtgatcggcggcagcccttgcaatgacctgagcatcgtgaacccagcccggaagggcctgtacgagggaaccggcagactgttcttcgagttttacagactgctgcacgacgcccggcctaaggaaggcgacgaccggcccttcttttggctgttcgagaatgtggtggccatgggagtcagcgacaagcgggatattagccggttcctggagagcaaccccgtgatgatcgatgccaaggaagtgagcgccgcccaccgggccagatacttctggggcaatctgcctggcatgaacagacccctggccagcaccgtgaacgacaagctggagctgcaggagtgcctggagcacggccggatcgccaagttcagcaaggtgagaaccatcaccacccgaagcaacagcatcaaacaaggcaaggaccagcactttcctgtgttcatgaacgagaaggaggacatcctgtggtgtaccgagatggagagagtgttcgggttcccagtccactacacagatgtcagcaacatgtctagactggccagacagagactgctgggaagaagctggtccgtccctgtgatcagacacctgttcgcccctctgaaggagtacttcgcctgcgtgagcagcggcaacagcaacgccaacagccggggccccagcttctctagcggcctggtgccactgtccctgagagggagccacatgggccccatggagatctacaaaaccgtgagcgcctggaagcggcagcctgtgcgcgtgctgagcctgtttcggaatatcgataaagtcctgaaaagcctgggattcctggagagcggctctggctccggcggtggcaccctgaagtacgtggaggatgtgacaaacgtggtcagacgggatgtggagaagtggggccccttcgatctggtgtacggcagcacccaacccctgggcagctcttgtgaccggtgccctggctggtacatgtttcagttccaccggatcctgcagtacgccctgccgagacaggagtcccagcggccattcttttggattttcatggacaacttgctgctgaccgaggatgaccaggaaactaccactcggttcctgcagaccgaagccgtgaccctgcaggacgtgagaggccgggactaccagaacgccatgcgggtgtggtccaacatccctggactgaaaagcaagcacgcacctctgacccctaaagaagaggagtacctgcaggcccaggtgcggagcagaagcaagctggacgcccctaaggtggatctgctggtgaagaattgcctcctgcccctgagagagtacttcaagtatttcagccagaatagtctgcccctgggcggcccaagcagcggcgcccctcctcccagcggcggcagcccagccggctccccaacctctaccgaggagggcacctctgagtccgccacccccgagagcggccctggcacctccaccgagcccagcgagggcagcgcacccggcagccctgccggcagccccacctccacagaggagggaaccagcaccgagcccagcgaaggcagcgccccaggcaccagcaccgagcctagtgagggcggctctggcggcggcagcgcccaggagattaaacggatcaacaagatcagaagaagacttgtgaaagacagcaacaccaagaaggccggcaagacaggccccatgaaaaccctgctggttagagtgatgacacccgatctgagagagcggctggaaaacctgagaaagaagcctgaaaatatcccccagcccatcagcaatacatctagagccaacctgaataagctgctgaccgattacaccgaaatgaagaaggcgatcctgcatgtgtactgggaagagttccagaaggaccctgtgggcctgatgagccgggtggcccagcctgccagcaagaagatcgatcagaacaagctgaaacctgagatggacgagaagggcaacctgaccaccgccggctttgcctgctctcagtgtggccagcccctgttcgtgtacaagctggagcaggtgtctgagaagggcaaggcttacaccaactacttcggacggtgcaatgtggccgagcacgaaaagctgatcctgctggcccagctgaagcccgagaaggatagcgacgaagccgtgacatatagcctgggaaagtttgggcagagggccctggatttctacagcattcatgtgaccaaggagtccacccaccccgtgaagcccctggcccagatcgccggaaacagatacgcctccggacctgtgggaaaggccctgagcgacgcatgtatgggcacaatcgcctccttcctgtctaagtaccaggacatcatcatcgaacaccagaaggtggtgaagggcaaccagaagagactggagagcctgcgggagctggccggcaaggaaaacctggaataccctagcgtgaccctgccacctcagcctcacaccaaggagggcgttgatgcctacaacgaagtgatcgcccgggtgcgaatgtgggtgaacctgaacctgtggcagaagctgaagctaagcagagatgatgccaagcctctgctgagactgaagggattcccttcctttcctctggtcgagagacaggccaacgaagtggactggtgggacatggtgtgtaacgtgaagaagctgatcaacgagaaaaaggaggatggcaaggtgttttggcagaatctggctggctacaagagacaggaagccctgagaccatacctgagcagcgaggaagatcggaagaagggaaagaaattcgctcggtaccagctgggcgacctgctgctgcacctggaaaagaagcacggcgaggactggggaaaggtgtacgacgaggcctgggagcggattgacaagaaagtggaaggcctgagcaagcacatcaagctggaagaggaacggagaagcgaggacgcccagagcaaggccgccctgaccgactggctgcgggctaaggccagcttcgtgatcgagggcctgaaggaggccgacaaggacgagttctgcagatgcgagctgaagctgcagaagtggtacggggacctgcggggaaagcccttcgccatcgaagccgagaacagcatcctggacatcagcggcttcagcaagcagtacaactgtgccttcatctggcagaaggacggcgtgaagaagctgaacctgtacctgatcatcaactacttcaagggcggcaagctgcggttcaagaagatcaaacctgaagccttcgaagccaacagattctacaccgtgatcaacaaaaagagcggcgagatcgtgcccatggaggtgaacttcaacttcgacgaccccaacctgatcatcctgcctctggcctttggcaagagacagggcagagaattcatctggaacgacctgctgtccctggaaaccggcagcctgaagctggccaacggaagagtgatcgagaagacactgtacaacagaagaacccggcaggatgagcctgccctgttcgtggccctgaccttcgagcggcgggaggtcctggactcctccaatatcaaaccaatgaacctgatcggcgtggcaagaggcgaaaacatccccgccgtgatcgccctgaccgaccccgagggctgcccactgagccggtttaaggatagcctgggaaacccaacccacatcctgagaatcggcgagagctataaggagaagcagcggaccatccaggccaagaaggaggtggagcagcggagagccggcggctacagccggaagtacgccagcaaagccaagaatctggcagacgatatggtgagaaacaccgctagagatctgctgtactacgccgtgacccaggatgccatgctgatcttcgccaacctgagccggggcttcggccggcagggcaagcggaccttcatggccgagagacagtacacacggatggaggactggctgaccgccaagctggcctacgagggcctgagcaagacctacctgtccaagacactggcccagtacacctccaagacatgcagcaactgtgggtttaccatcaccagcgccgactacgacagggtgctggagaagctgaagaagacagcaacaggctggatgaccacaattaacggcaaggagctgaaggtggagggccagattacctactacaacagatacaagagacagaacgtagtcaaggacctgtccgtcgagctggatagactgagcgaagaatctgtgaacaacgacatctcctcctggacaaagggcagaagcggagaagctctgagcctcctgaagaaaagattctcccatagacccgtgcaggagaagttcgtgtgcctgaactgcggcttcgagacacacgcagccgagcaagccgccctgaacatcgccagatcctggctgttcctgcggagccaggagtacaagaaataccagacaaacaagacaaccggcaacaccgataagagagccttcgtcgagacctggcagtccttttaccggaagaagcttaaggaggtgtggaaacctgccgtgcggtctggcggatctggcggaggctccacaagcttccaggagcccgtgagcttcaaggacgtgagcgtggtgttcaccgaggaggagctgggcctgctggacagcgcccagaggaagctgtacagggacgtgatgctggagaacttccagaacctgctgagcgtgggcaaccagcccttcaagcccgagctgatcttccagctggagagggaggaggagctgctgatgatggagaccgagacccagagggacggctgcagcggcaccaagagccagaccagccccaagaaaaagagaaaagtctaagctgccttctgcggggcttgccttctggccatgcccttcttctctcccttgcacctgtacctcttggtctttgaataaagcctgagtaggaaggctagcaaaaaaaaaaaaaaaaaaaaaaaaaaaaaaaaaaaaaaaaaaaaaaaaaaaaaaaaaaaaaaaaaaaaaaaaaaaaaaaa

SEQ ID NO: 3881 - RNA, 5419 nt, synthetic construct
  source 1..5419: mol_type = other RNA
aggaaataagagagaaaagaagagtaagaagaaatataagagccaccatggcccctaagaagaagcgtaaagtgagccgggtgaacggcagcggcagcggcggcggcatgaaccacgaccaggagttcgacccccctaaggtgtaccctcccgtccccgccgagaagagaaagcccatccgggtcctgagcctgttcgatggcatcgccaccggtctgctggtgctgaaggacctgggcatccaggtggataggtacattgcctccgaggtgtgcgaggactccatcaccgtgggaatggtgcgtcatcagggcaagatcatgtacgtgggcgacgtgcggagcgtgacacagaagcatatccaggagtggggccctttcgacctggtgatcggcggcagcccttgcaatgacctgagcatcgtgaacccagcccggaagggcctgtacgagggaaccggcagactgttcttcgagttttacagactgctgcacgacgcccggcctaaggaaggcgacgaccggcccttcttttggctgttcgagaatgtggtggccatgggagtcagcgacaagcgggatattagccggttcctggagagcaaccccgtgatgatcgatgccaaggaagtgagcgccgcccaccgggccagatacttctggggcaatctgcctggcatgaacagacccctggccagcaccgtgaacgacaagctggagctgcaggagtgcctggagcacggccggatcgccaagttcagcaaggtgagaaccatcaccacccgaagcaacagcatcaaacaaggcaaggaccagcactttcctgtgttcatgaacgagaaggaggacatcctgtggtgtaccgagatggagagagtgttcgggttcccagtccactacacagatgtcagcaacatgtctagactggccagacagagactgctgggaagaagctggtccgtccctgtgatcagacacctgttcgcccctctgaaggagtacttcgcctgcgtgagcagcggcaacagcaacgccaacagccggggccccagcttctctagcggcctggtgccactgtccctgagagggagccacatgggccccatggagatctacaaaaccgtgagcgcctggaagcggcagcctgtgcgcgtgctgagcctgtttcggaatatcgataaagtcctgaaaagcctgggattcctggagagcggctctggctccggcggtggcaccctgaagtacgtggaggatgtgacaaacgtggtcagacgggatgtggagaagtggggccccttcgatctggtgtacggcagcacccaacccctgggcagctcttgtgaccggtgccctggctggtacatgtttcagttccaccggatcctgcagtacgccctgccgagacaggagtcccagcggccattcttttggattttcatggacaacttgctgctgaccgaggatgaccaggaaactaccactcggttcctgcagaccgaagccgtgaccctgcaggacgtgagaggccgggactaccagaacgccatgcgggtgtggtccaacatccctggactgaaaagcaagcacgcacctctgacccctaaagaagaggagtacctgcaggcccaggtgcggagcagaagcaagctggacgcccctaaggtggatctgctggtgaagaattgcctcctgcccctgagagagtacttcaagtatttcagccagaatagtctgcccctgggcggcccaagcagcggcgcccctcctcccagcggcggcagcccagccggctccccaacctctaccgaggagggcacctctgagtccgccacccccgagagcggccctggcacctccaccgagcccagcgagggcagcgcacccggcagccctgccggcagccccacctccacagaggagggaaccagcaccgagcccagcgaaggcagcgccccaggcaccagcaccgagcctagtgagggcggctctggcggcggcagcgcccaggagattaaacggatcaacaagatcagaagaagacttgtgaaagacagcaacaccaagaaggccggcaagacaggccccatgaaaaccctgctggttagagtgatgacacccgatctgagagagcggctggaaaacctgagaaagaagcctgaaaatatcccccagcccatcagcaatacatctagagccaacctgaataagctgctgaccgattacaccgaaatgaagaaggcgatcctgcatgtgtactgggaagagttccagaaggaccctgtgggcctgatgagccgggtggcccagcctgccagcaagaagatcgatcagaacaagctgaaacctgagatggacgagaagggcaacctgaccaccgccggctttgcctgctctcagtgtggccagcccctgttcgtgtacaagctggagcaggtgtctgagaagggcaaggcttacaccaactacttcggacggtgcaatgtggccgagcacgaaaagctgatcctgctggcccagctgaagcccgagaaggatagcgacgaagccgtgacatatagcctgggaaagtttgggcagagggccctggatttctacagcattcatgtgaccaaggagtccacccaccccgtgaagcccctggcccagatcgccggaaacagatacgcctccggacctgtgggaaaggccctgagcgacgcatgtatgggcacaatcgcctccttcctgtctaagtaccaggacatcatcatcgaacaccagaaggtggtgaagggcaaccagaagagactggagagcctgcgggagctggccggcaaggaaaacctggaataccctagcgtgaccctgccacctcagcctcacaccaaggagggcgttgatgcctacaacgaagtgatcgcccgggtgcgaatgtgggtgaacctgaacctgtggcagaagctgaagctaagcagagatgatgccaagcctctgctgagactgaagggattcccttcctttcctctggtcgagagacaggccaacgaagtggactggtgggacatggtgtgtaacgtgaagaagctgatcaacgagaaaaaggaggatggcaaggtgttttggcagaatctggctggctacaagagacaggaagccctgagaccatacctgagcagcgaggaagatcggaagaagggaaagaaattcgctcggtaccagctgggcgacctgctgctgcacctggaaaagaagcacggcgaggactggggaaaggtgtacgacgaggcctgggagcggattgacaagaaagtggaaggcctgagcaagcacatcaagctggaagaggaacggagaagcgaggacgcccagagcaaggccgccctgaccgactggctgcgggctaaggccagcttcgtgatcgagggcctgaaggaggccgacaaggacgagttctgcagatgcgagctgaagctgcagaagtggtacggggacctgcggggaaagcccttcgccatcgaagccgagaacagcatcctggacatcagcggcttcagcaagcagtacaactgtgccttcatctggcagaaggacggcgtgaagaagctgaacctgtacctgatcatcaactacttcaagggcggcaagctgcggttcaagaagatcaaacctgaagccttcgaagccaacagattctacaccgtgatcaacaaaaagagcggcgagatcgtgcccatggaggtgaacttcaacttcgacgaccccaacctgatcatcctgcctctggcctttggcaagagacagggcagagaattcatctggaacgacctgctgtccctggaaaccggcagcctgaagctggccaacggaagagtgatcgagaagacactgtacaacagaagaacccggcaggatgagcctgccctgttcgtggccctgaccttcgagcggcgggaggtcctggactcctccaatatcaaaccaatgaacctgatcggcgtggcaagaggcgaaaacatccccgccgtgatcgccctgaccgaccccgagggctgcccactgagccggtttaaggatagcctgggaaacccaacccacatcctgagaatcggcgagagctataaggagaagcagcggaccatccaggccaagaaggaggtggagcagcggagagccggcggctacagccggaagtacgccagcaaagccaagaatctggcagacgatatggtgagaaacaccgctagagatctgctgtactacgccgtgacccaggatgccatgctgatcttcgccaacctgagccggggcttcggccggcagggcaagcggaccttcatggccgagagacagtacacacggatggaggactggctgaccgccaagctggcctacgagggcctgagcaagacctacctgtccaagacactggcccagtacacctccaagacatgcagcaactgtgggtttaccatcaccagcgccgactacgacagggtgctggagaagctgaagaagacagcaacaggctggatgaccacaattaacggcaaggagctgaaggtggagggccagattacctactacaacagatacaagagacagaacgtagtcaaggacctgtccgtcgagctggatagactgagcgaagaatctgtgaacaacgacatctcctcctggacaaagggcagaagcggagaagctctgagcctcctgaagaaaagattctcccatagacccgtgcaggagaagttcgtgtgcctgaactgcggcttcgagacacacgcagccgagcaagccgccctgaacatcgccagatcctggctgttcctgcggagccaggagtacaagaaataccagacaaacaagacaaccggcaacaccgataagagagccttcgtcgagacctggcagtccttttaccggaagaagcttaaggaggtgtggaaacctgccgtgcggtctggcggatctggcggaggctccacaagcccccaggagagcgtgaccttcgaggacgtggccgtggacttcacctgggaggagtggggctacctggacaccagccagaaggagctgtactgggaggtgatgctggagaactacaagaacctggtgagcctgggcttcgtggtggccaagcccgacgccatcagccagctggagcaggaggaggccccctggaggcccgaggtgctgttccccaggagcagctgcagcgacctggacaccaagaccagccccaagaaaaagagaaaagtctaagctgccttctgcggggcttgccttctggccatgcccttcttctctcccttgcacctgtacctcttggtctttgaataaagcctgagtaggaaggctagcaaaaaaaaaaaaaaaaaaaaaaaaaaaaaaaaaaaaaaaaaaaaaaaaaaaaaaaaaaaaaaaaaaaaaaaaaaaaaaaa

SEQ ID NO: 3882 - RNA, 5419 nt, synthetic construct
  source 1..5419: mol_type = other RNA
aggaaataagagagaaaagaagagtaagaagaaatataagagccaccatggcccctaagaagaagcgtaaagtgagccgggtgaacggcagcggcagcggcggcggcatgaaccacgaccaggagttcgacccccctaaggtgtaccctcccgtccccgccgagaagagaaagcccatccgggtcctgagcctgttcgatggcatcgccaccggtctgctggtgctgaaggacctgggcatccaggtggataggtacattgcctccgaggtgtgcgaggactccatcaccgtgggaatggtgcgtcatcagggcaagatcatgtacgtgggcgacgtgcggagcgtgacacagaagcatatccaggagtggggccctttcgacctggtgatcggcggcagcccttgcaatgacctgagcatcgtgaacccagcccggaagggcctgtacgagggaaccggcagactgttcttcgagttttacagactgctgcacgacgcccggcctaaggaaggcgacgaccggcccttcttttggctgttcgagaatgtggtggccatgggagtcagcgacaagcgggatattagccggttcctggagagcaaccccgtgatgatcgatgccaaggaagtgagcgccgcccaccgggccagatacttctggggcaatctgcctggcatgaacagacccctggccagcaccgtgaacgacaagctggagctgcaggagtgcctggagcacggccggatcgccaagttcagcaaggtgagaaccatcaccacccgaagcaacagcatcaaacaaggcaaggaccagcactttcctgtgttcatgaacgagaaggaggacatcctgtggtgtaccgagatggagagagtgttcgggttcccagtccactacacagatgtcagcaacatgtctagactggccagacagagactgctgggaagaagctggtccgtccctgtgatcagacacctgttcgcccctctgaaggagtacttcgcctgcgtgagcagcggcaacagcaacgccaacagccggggccccagcttctctagcggcctggtgccactgtccctgagagggagccacatgggccccatggagatctacaaaaccgtgagcgcctggaagcggcagcctgtgcgcgtgctgagcctgtttcggaatatcgataaagtcctgaaaagcctgggattcctggagagcggctctggctccggcggtggcaccctgaagtacgtggaggatgtgacaaacgtggtcagacgggatgtggagaagtggggccccttcgatctggtgtacggcagcacccaacccctgggcagctcttgtgaccggtgccctggctggtacatgtttcagttccaccggatcctgcagtacgccctgccgagacaggagtcccagcggccattcttttggattttcatggacaacttgctgctgaccgaggatgaccaggaaactaccactcggttcctgcagaccgaagccgtgaccctgcaggacgtgagaggccgggactaccagaacgccatgcgggtgtggtccaacatccctggactgaaaagcaagcacgcacctctgacccctaaagaagaggagtacctgcaggcccaggtgcggagcagaagcaagctggacgcccctaaggtggatctgctggtgaagaattgcctcctgcccctgagagagtacttcaagtatttcagccagaatagtctgcccctgggcggcccaagcagcggcgcccctcctcccagcggcggcagcccagccggctccccaacctctaccgaggagggcacctctgagtccgccacccccgagagcggccctggcacctccaccgagcccagcgagggcagcgcacccggcagccctgccggcagccccacctccacagaggagggaaccagcaccgagcccagcgaaggcagcgccccaggcaccagcaccgagcctagtgagggcggctctggcggcggcagcgcccaggagattaaacggatcaacaagatcagaagaagacttgtgaaagacagcaacaccaagaaggccggcaagacaggccccatgaaaaccctgctggttagagtgatgacacccgatctgagagagcggctggaaaacctgagaaagaagcctgaaaatatcccccagcccatcagcaatacatctagagccaacctgaataagctgctgaccgattacaccgaaatgaagaaggcgatcctgcatgtgtactgggaagagttccagaaggaccctgtgggcctgatgagccgggtggcccagcctgccagcaagaagatcgatcagaacaagctgaaacctgagatggacgagaagggcaacctgaccaccgccggctttgcctgctctcagtgtggccagcccctgttcgtgtacaagctggagcaggtgtctgagaagggcaaggcttacaccaactacttcggacggtgcaatgtggccgagcacgaaaagctgatcctgctggcccagctgaagcccgagaaggatagcgacgaagccgtgacatatagcctgggaaagtttgggcagagggccctggatttctacagcattcatgtgaccaaggagtccacccaccccgtgaagcccctggcccagatcgccggaaacagatacgcctccggacctgtgggaaaggccctgagcgacgcatgtatgggcacaatcgcctccttcctgtctaagtaccaggacatcatcatcgaacaccagaaggtggtgaagggcaaccagaagagactggagagcctgcgggagctggccggcaaggaaaacctggaataccctagcgtgaccctgccacctcagcctcacaccaaggagggcgttgatgcctacaacgaagtgatcgcccgggtgcgaatgtgggtgaacctgaacctgtggcagaagctgaagctaagcagagatgatgccaagcctctgctgagactgaagggattcccttcctttcctctggtcgagagacaggccaacgaagtggactggtgggacatggtgtgtaacgtgaagaagctgatcaacgagaaaaaggaggatggcaaggtgttttggcagaatctggctggctacaagagacaggaagccctgagaccatacctgagcagcgaggaagatcggaagaagggaaagaaattcgctcggtaccagctgggcgacctgctgctgcacctggaaaagaagcacggcgaggactggggaaaggtgtacgacgaggcctgggagcggattgacaagaaagtggaaggcctgagcaagcacatcaagctggaagaggaacggagaagcgaggacgcccagagcaaggccgccctgaccgactggctgcgggctaaggccagcttcgtgatcgagggcctgaaggaggccgacaaggacgagttctgcagatgcgagctgaagctgcagaagtggtacggggacctgcggggaaagcccttcgccatcgaagccgagaacagcatcctggacatcagcggcttcagcaagcagtacaactgtgccttcatctggcagaaggacggcgtgaagaagctgaacctgtacctgatcatcaactacttcaagggcggcaagctgcggttcaagaagatcaaacctgaagccttcgaagccaacagattctacaccgtgatcaacaaaaagagcggcgagatcgtgcccatggaggtgaacttcaacttcgacgaccccaacctgatcatcctgcctctggcctttggcaagagacagggcagagaattcatctggaacgacctgctgtccctggaaaccggcagcctgaagctggccaacggaagagtgatcgagaagacactgtacaacagaagaacccggcaggatgagcctgccctgttcgtggccctgaccttcgagcggcgggaggtcctggactcctccaatatcaaaccaatgaacctgatcggcgtggcaagaggcgaaaacatccccgccgtgatcgccctgaccgaccccgagggctgcccactgagccggtttaaggatagcctgggaaacccaacccacatcctgagaatcggcgagagctataaggagaagcagcggaccatccaggccaagaaggaggtggagcagcggagagccggcggctacagccggaagtacgccagcaaagccaagaatctggcagacgatatggtgagaaacaccgctagagatctgctgtactacgccgtgacccaggatgccatgctgatcttcgccaacctgagccggggcttcggccggcagggcaagcggaccttcatggccgagagacagtacacacggatggaggactggctgaccgccaagctggcctacgagggcctgagcaagacctacctgtccaagacactggcccagtacacctccaagacatgcagcaactgtgggtttaccatcaccagcgccgactacgacagggtgctggagaagctgaagaagacagcaacaggctggatgaccacaattaacggcaaggagctgaaggtggagggccagattacctactacaacagatacaagagacagaacgtagtcaaggacctgtccgtcgagctggatagactgagcgaagaatctgtgaacaacgacatctcctcctggacaaagggcagaagcggagaagctctgagcctcctgaagaaaagattctcccatagacccgtgcaggagaagttcgtgtgcctgaactgcggcttcgagacacacgcagccgagcaagccgccctgaacatcgccagatcctggctgttcctgcggagccaggagtacaagaaataccagacaaacaagacaaccggcaacaccgataagagagccttcgtcgagacctggcagtccttttaccggaagaagcttaaggaggtgtggaaacctgccgtgcggtctggcggatctggcggaggctccacaagcagcaagggcagcctgatgttcagggacgtgagcatcgacttcagccaggaggagtgggagtgcctggacagcggccagatgaacctgtacaaggaggtgatgctggagaacttcagcaacctggtgagcgtgggcctgagcagcagcaagcccgccgtgatcagcctgctggagcagggcaaggagccctggatggtggacagggagctgaccaggggcctgtgcagcgacctggagagcatgaccagccccaagaaaaagagaaaagtctaagctgccttctgcggggcttgccttctggccatgcccttcttctctcccttgcacctgtacctcttggtctttgaataaagcctgagtaggaaggctagcaaaaaaaaaaaaaaaaaaaaaaaaaaaaaaaaaaaaaaaaaaaaaaaaaaaaaaaaaaaaaaaaaaaaaaaaaaaaaaaa

SEQ ID NO: 3883 - RNA, 5419 nt, synthetic construct
  source 1..5419: mol_type = other RNA
aggaaataagagagaaaagaagagtaagaagaaatataagagccaccatggcccctaagaagaagcgtaaagtgagccgggtgaacggcagcggcagcggcggcggcatgaaccacgaccaggagttcgacccccctaaggtgtaccctcccgtccccgccgagaagagaaagcccatccgggtcctgagcctgttcgatggcatcgccaccggtctgctggtgctgaaggacctgggcatccaggtggataggtacattgcctccgaggtgtgcgaggactccatcaccgtgggaatggtgcgtcatcagggcaagatcatgtacgtgggcgacgtgcggagcgtgacacagaagcatatccaggagtggggccctttcgacctggtgatcggcggcagcccttgcaatgacctgagcatcgtgaacccagcccggaagggcctgtacgagggaaccggcagactgttcttcgagttttacagactgctgcacgacgcccggcctaaggaaggcgacgaccggcccttcttttggctgttcgagaatgtggtggccatgggagtcagcgacaagcgggatattagccggttcctggagagcaaccccgtgatgatcgatgccaaggaagtgagcgccgcccaccgggccagatacttctggggcaatctgcctggcatgaacagacccctggccagcaccgtgaacgacaagctggagctgcaggagtgcctggagcacggccggatcgccaagttcagcaaggtgagaaccatcaccacccgaagcaacagcatcaaacaaggcaaggaccagcactttcctgtgttcatgaacgagaaggaggacatcctgtggtgtaccgagatggagagagtgttcgggttcccagtccactacacagatgtcagcaacatgtctagactggccagacagagactgctgggaagaagctggtccgtccctgtgatcagacacctgttcgcccctctgaaggagtacttcgcctgcgtgagcagcggcaacagcaacgccaacagccggggccccagcttctctagcggcctggtgccactgtccctgagagggagccacatgggccccatggagatctacaaaaccgtgagcgcctggaagcggcagcctgtgcgcgtgctgagcctgtttcggaatatcgataaagtcctgaaaagcctgggattcctggagagcggctctggctccggcggtggcaccctgaagtacgtggaggatgtgacaaacgtggtcagacgggatgtggagaagtggggccccttcgatctggtgtacggcagcacccaacccctgggcagctcttgtgaccggtgccctggctggtacatgtttcagttccaccggatcctgcagtacgccctgccgagacaggagtcccagcggccattcttttggattttcatggacaacttgctgctgaccgaggatgaccaggaaactaccactcggttcctgcagaccgaagccgtgaccctgcaggacgtgagaggccgggactaccagaacgccatgcgggtgtggtccaacatccctggactgaaaagcaagcacgcacctctgacccctaaagaagaggagtacctgcaggcccaggtgcggagcagaagcaagctggacgcccctaaggtggatctgctggtgaagaattgcctcctgcccctgagagagtacttcaagtatttcagccagaatagtctgcccctgggcggcccaagcagcggcgcccctcctcccagcggcggcagcccagccggctccccaacctctaccgaggagggcacctctgagtccgccacccccgagagcggccctggcacctccaccgagcccagcgagggcagcgcacccggcagccctgccggcagccccacctccacagaggagggaaccagcaccgagcccagcgaaggcagcgccccaggcaccagcaccgagcctagtgagggcggctctggcggcggcagcgcccaggagattaaacggatcaacaagatcagaagaagacttgtgaaagacagcaacaccaagaaggccggcaagacaggccccatgaaaaccctgctggttagagtgatgacacccgatctgagagagcggctggaaaacctgagaaagaagcctgaaaatatcccccagcccatcagcaatacatctagagccaacctgaataagctgctgaccgattacaccgaaatgaagaaggcgatcctgcatgtgtactgggaagagttccagaaggaccctgtgggcctgatgagccgggtggcccagcctgccagcaagaagatcgatcagaacaagctgaaacctgagatggacgagaagggcaacctgaccaccgccggctttgcctgctctcagtgtggccagcccctgttcgtgtacaagctggagcaggtgtctgagaagggcaaggcttacaccaactacttcggacggtgcaatgtggccgagcacgaaaagctgatcctgctggcccagctgaagcccgagaaggatagcgacgaagccgtgacatatagcctgggaaagtttgggcagagggccctggatttctacagcattcatgtgaccaaggagtccacccaccccgtgaagcccctggcccagatcgccggaaacagatacgcctccggacctgtgggaaaggccctgagcgacgcatgtatgggcacaatcgcctccttcctgtctaagtaccaggacatcatcatcgaacaccagaaggtggtgaagggcaaccagaagagactggagagcctgcgggagctggccggcaaggaaaacctggaataccctagcgtgaccctgccacctcagcctcacaccaaggagggcgttgatgcctacaacgaagtgatcgcccgggtgcgaatgtgggtgaacctgaacctgtggcagaagctgaagctaagcagagatgatgccaagcctctgctgagactgaagggattcccttcctttcctctggtcgagagacaggccaacgaagtggactggtgggacatggtgtgtaacgtgaagaagctgatcaacgagaaaaaggaggatggcaaggtgttttggcagaatctggctggctacaagagacaggaagccctgagaccatacctgagcagcgaggaagatcggaagaagggaaagaaattcgctcggtaccagctgggcgacctgctgctgcacctggaaaagaagcacggcgaggactggggaaaggtgtacgacgaggcctgggagcggattgacaagaaagtggaaggcctgagcaagcacatcaagctggaagaggaacggagaagcgaggacgcccagagcaaggccgccctgaccgactggctgcgggctaaggccagcttcgtgatcgagggcctgaaggaggccgacaaggacgagttctgcagatgcgagctgaagctgcagaagtggtacggggacctgcggggaaagcccttcgccatcgaagccgagaacagcatcctggacatcagcggcttcagcaagcagtacaactgtgccttcatctggcagaaggacggcgtgaagaagctgaacctgtacctgatcatcaactacttcaagggcggcaagctgcggttcaagaagatcaaacctgaagccttcgaagccaacagattctacaccgtgatcaacaaaaagagcggcgagatcgtgcccatggaggtgaacttcaacttcgacgaccccaacctgatcatcctgcctctggcctttggcaagagacagggcagagaattcatctggaacgacctgctgtccctggaaaccggcagcctgaagctggccaacggaagagtgatcgagaagacactgtacaacagaagaacccggcaggatgagcctgccctgttcgtggccctgaccttcgagcggcgggaggtcctggactcctccaatatcaaaccaatgaacctgatcggcgtggcaagaggcgaaaacatccccgccgtgatcgccctgaccgaccccgagggctgcccactgagccggtttaaggatagcctgggaaacccaacccacatcctgagaatcggcgagagctataaggagaagcagcggaccatccaggccaagaaggaggtggagcagcggagagccggcggctacagccggaagtacgccagcaaagccaagaatctggcagacgatatggtgagaaacaccgctagagatctgctgtactacgccgtgacccaggatgccatgctgatcttcgccaacctgagccggggcttcggccggcagggcaagcggaccttcatggccgagagacagtacacacggatggaggactggctgaccgccaagctggcctacgagggcctgagcaagacctacctgtccaagacactggcccagtacacctccaagacatgcagcaactgtgggtttaccatcaccagcgccgactacgacagggtgctggagaagctgaagaagacagcaacaggctggatgaccacaattaacggcaaggagctgaaggtggagggccagattacctactacaacagatacaagagacagaacgtagtcaaggacctgtccgtcgagctggatagactgagcgaagaatctgtgaacaacgacatctcctcctggacaaagggcagaagcggagaagctctgagcctcctgaagaaaagattctcccatagacccgtgcaggagaagttcgtgtgcctgaactgcggcttcgagacacacgcagccgagcaagccgccctgaacatcgccagatcctggctgttcctgcggagccaggagtacaagaaataccagacaaacaagacaaccggcaacaccgataagagagccttcgtcgagacctggcagtccttttaccggaagaagcttaaggaggtgtggaaacctgccgtgcggtctggcggatctggcggaggctccacaagccagatgagggtgaccttcgaggacatcagcgtgagcttcagccaggaggagtggggctacctgaacgaggagcagaaggagctgtacagggaggtgatgaaggagaactaccagaccctgatcagcctggccaccgacagccccatcatcgaccccgacatcatcagcaggatcgagaggggcgaggagccctacgtgagggacgagcccgccagcgaggagagggagaccggcaggagcaacaccagccccaagaaaaagagaaaagtctaagctgccttctgcggggcttgccttctggccatgcccttcttctctcccttgcacctgtacctcttggtctttgaataaagcctgagtaggaaggctagcaaaaaaaaaaaaaaaaaaaaaaaaaaaaaaaaaaaaaaaaaaaaaaaaaaaaaaaaaaaaaaaaaaaaaaaaaaaaaaaa

SEQ ID NO: 3884 - RNA, 5419 nt, synthetic construct
  source 1..5419: mol_type = other RNA
aggaaataagagagaaaagaagagtaagaagaaatataagagccaccatggcccctaagaagaagcgtaaagtgagccgggtgaacggcagcggcagcggcggcggcatgaaccacgaccaggagttcgacccccctaaggtgtaccctcccgtccccgccgagaagagaaagcccatccgggtcctgagcctgttcgatggcatcgccaccggtctgctggtgctgaaggacctgggcatccaggtggataggtacattgcctccgaggtgtgcgaggactccatcaccgtgggaatggtgcgtcatcagggcaagatcatgtacgtgggcgacgtgcggagcgtgacacagaagcatatccaggagtggggccctttcgacctggtgatcggcggcagcccttgcaatgacctgagcatcgtgaacccagcccggaagggcctgtacgagggaaccggcagactgttcttcgagttttacagactgctgcacgacgcccggcctaaggaaggcgacgaccggcccttcttttggctgttcgagaatgtggtggccatgggagtcagcgacaagcgggatattagccggttcctggagagcaaccccgtgatgatcgatgccaaggaagtgagcgccgcccaccgggccagatacttctggggcaatctgcctggcatgaacagacccctggccagcaccgtgaacgacaagctggagctgcaggagtgcctggagcacggccggatcgccaagttcagcaaggtgagaaccatcaccacccgaagcaacagcatcaaacaaggcaaggaccagcactttcctgtgttcatgaacgagaaggaggacatcctgtggtgtaccgagatggagagagtgttcgggttcccagtccactacacagatgtcagcaacatgtctagactggccagacagagactgctgggaagaagctggtccgtccctgtgatcagacacctgttcgcccctctgaaggagtacttcgcctgcgtgagcagcggcaacagcaacgccaacagccggggccccagcttctctagcggcctggtgccactgtccctgagagggagccacatgggccccatggagatctacaaaaccgtgagcgcctggaagcggcagcctgtgcgcgtgctgagcctgtttcggaatatcgataaagtcctgaaaagcctgggattcctggagagcggctctggctccggcggtggcaccctgaagtacgtggaggatgtgacaaacgtggtcagacgggatgtggagaagtggggccccttcgatctggtgtacggcagcacccaacccctgggcagctcttgtgaccggtgccctggctggtacatgtttcagttccaccggatcctgcagtacgccctgccgagacaggagtcccagcggccattcttttggattttcatggacaacttgctgctgaccgaggatgaccaggaaactaccactcggttcctgcagaccgaagccgtgaccctgcaggacgtgagaggccgggactaccagaacgccatgcgggtgtggtccaacatccctggactgaaaagcaagcacgcacctctgacccctaaagaagaggagtacctgcaggcccaggtgcggagcagaagcaagctggacgcccctaaggtggatctgctggtgaagaattgcctcctgcccctgagagagtacttcaagtatttcagccagaatagtctgcccctgggcggcccaagcagcggcgcccctcctcccagcggcggcagcccagccggctccccaacctctaccgaggagggcacctctgagtccgccacccccgagagcggccctggcacctccaccgagcccagcgagggcagcgcacccggcagccctgccggcagccccacctccacagaggagggaaccagcaccgagcccagcgaaggcagcgccccaggcaccagcaccgagcctagtgagggcggctctggcggcggcagcgcccaggagattaaacggatcaacaagatcagaagaagacttgtgaaagacagcaacaccaagaaggccggcaagacaggccccatgaaaaccctgctggttagagtgatgacacccgatctgagagagcggctggaaaacctgagaaagaagcctgaaaatatcccccagcccatcagcaatacatctagagccaacctgaataagctgctgaccgattacaccgaaatgaagaaggcgatcctgcatgtgtactgggaagagttccagaaggaccctgtgggcctgatgagccgggtggcccagcctgccagcaagaagatcgatcagaacaagctgaaacctgagatggacgagaagggcaacctgaccaccgccggctttgcctgctctcagtgtggccagcccctgttcgtgtacaagctggagcaggtgtctgagaagggcaaggcttacaccaactacttcggacggtgcaatgtggccgagcacgaaaagctgatcctgctggcccagctgaagcccgagaaggatagcgacgaagccgtgacatatagcctgggaaagtttgggcagagggccctggatttctacagcattcatgtgaccaaggagtccacccaccccgtgaagcccctggcccagatcgccggaaacagatacgcctccggacctgtgggaaaggccctgagcgacgcatgtatgggcacaatcgcctccttcctgtctaagtaccaggacatcatcatcgaacaccagaaggtggtgaagggcaaccagaagagactggagagcctgcgggagctggccggcaaggaaaacctggaataccctagcgtgaccctgccacctcagcctcacaccaaggagggcgttgatgcctacaacgaagtgatcgcccgggtgcgaatgtgggtgaacctgaacctgtggcagaagctgaagctaagcagagatgatgccaagcctctgctgagactgaagggattcccttcctttcctctggtcgagagacaggccaacgaagtggactggtgggacatggtgtgtaacgtgaagaagctgatcaacgagaaaaaggaggatggcaaggtgttttggcagaatctggctggctacaagagacaggaagccctgagaccatacctgagcagcgaggaagatcggaagaagggaaagaaattcgctcggtaccagctgggcgacctgctgctgcacctggaaaagaagcacggcgaggactggggaaaggtgtacgacgaggcctgggagcggattgacaagaaagtggaaggcctgagcaagcacatcaagctggaagaggaacggagaagcgaggacgcccagagcaaggccgccctgaccgactggctgcgggctaaggccagcttcgtgatcgagggcctgaaggaggccgacaaggacgagttctgcagatgcgagctgaagctgcagaagtggtacggggacctgcggggaaagcccttcgccatcgaagccgagaacagcatcctggacatcagcggcttcagcaagcagtacaactgtgccttcatctggcagaaggacggcgtgaagaagctgaacctgtacctgatcatcaactacttcaagggcggcaagctgcggttcaagaagatcaaacctgaagccttcgaagccaacagattctacaccgtgatcaacaaaaagagcggcgagatcgtgcccatggaggtgaacttcaacttcgacgaccccaacctgatcatcctgcctctggcctttggcaagagacagggcagagaattcatctggaacgacctgctgtccctggaaaccggcagcctgaagctggccaacggaagagtgatcgagaagacactgtacaacagaagaacccggcaggatgagcctgccctgttcgtggccctgaccttcgagcggcgggaggtcctggactcctccaatatcaaaccaatgaacctgatcggcgtggcaagaggcgaaaacatccccgccgtgatcgccctgaccgaccccgagggctgcccactgagccggtttaaggatagcctgggaaacccaacccacatcctgagaatcggcgagagctataaggagaagcagcggaccatccaggccaagaaggaggtggagcagcggagagccggcggctacagccggaagtacgccagcaaagccaagaatctggcagacgatatggtgagaaacaccgctagagatctgctgtactacgccgtgacccaggatgccatgctgatcttcgccaacctgagccggggcttcggccggcagggcaagcggaccttcatggccgagagacagtacacacggatggaggactggctgaccgccaagctggcctacgagggcctgagcaagacctacctgtccaagacactggcccagtacacctccaagacatgcagcaactgtgggtttaccatcaccagcgccgactacgacagggtgctggagaagctgaagaagacagcaacaggctggatgaccacaattaacggcaaggagctgaaggtggagggccagattacctactacaacagatacaagagacagaacgtagtcaaggacctgtccgtcgagctggatagactgagcgaagaatctgtgaacaacgacatctcctcctggacaaagggcagaagcggagaagctctgagcctcctgaagaaaagattctcccatagacccgtgcaggagaagttcgtgtgcctgaactgcggcttcgagacacacgcagccgagcaagccgccctgaacatcgccagatcctggctgttcctgcggagccaggagtacaagaaataccagacaaacaagacaaccggcaacaccgataagagagccttcgtcgagacctggcagtccttttaccggaagaagcttaaggaggtgtggaaacctgccgtgcggtctggcggatctggcggaggctccacaagcctggtgttcgaggacgtggccatcaacttcacccccgaggagtgggccctgctggaccccgcccagaggaggctgtacagggacgtgatgctggagaccttcaagaacctggccttcgtgggcagctgcctgcacgtgaagaccagcggcagcagcgcccagagggacatcctggagaacgtgctgtgcagcgaggagaagatcgtgaggttcaagaggaacgacagcaagagcgtgctgggcaccagccccaagaaaaagagaaaagtctaagctgccttctgcggggcttgccttctggccatgcccttcttctctcccttgcacctgtacctcttggtctttgaataaagcctgagtaggaaggctagcaaaaaaaaaaaaaaaaaaaaaaaaaaaaaaaaaaaaaaaaaaaaaaaaaaaaaaaaaaaaaaaaaaaaaaaaaaaaaaaa

SEQ ID NO: 3885 - RNA, 5419 nt, synthetic construct
  source 1..5419: mol_type = other RNA
aggaaataagagagaaaagaagagtaagaagaaatataagagccaccatggcccctaagaagaagcgtaaagtgagccgggtgaacggcagcggcagcggcggcggcatgaaccacgaccaggagttcgacccccctaaggtgtaccctcccgtccccgccgagaagagaaagcccatccgggtcctgagcctgttcgatggcatcgccaccggtctgctggtgctgaaggacctgggcatccaggtggataggtacattgcctccgaggtgtgcgaggactccatcaccgtgggaatggtgcgtcatcagggcaagatcatgtacgtgggcgacgtgcggagcgtgacacagaagcatatccaggagtggggccctttcgacctggtgatcggcggcagcccttgcaatgacctgagcatcgtgaacccagcccggaagggcctgtacgagggaaccggcagactgttcttcgagttttacagactgctgcacgacgcccggcctaaggaaggcgacgaccggcccttcttttggctgttcgagaatgtggtggccatgggagtcagcgacaagcgggatattagccggttcctggagagcaaccccgtgatgatcgatgccaaggaagtgagcgccgcccaccgggccagatacttctggggcaatctgcctggcatgaacagacccctggccagcaccgtgaacgacaagctggagctgcaggagtgcctggagcacggccggatcgccaagttcagcaaggtgagaaccatcaccacccgaagcaacagcatcaaacaaggcaaggaccagcactttcctgtgttcatgaacgagaaggaggacatcctgtggtgtaccgagatggagagagtgttcgggttcccagtccactacacagatgtcagcaacatgtctagactggccagacagagactgctgggaagaagctggtccgtccctgtgatcagacacctgttcgcccctctgaaggagtacttcgcctgcgtgagcagcggcaacagcaacgccaacagccggggccccagcttctctagcggcctggtgccactgtccctgagagggagccacatgggccccatggagatctacaaaaccgtgagcgcctggaagcggcagcctgtgcgcgtgctgagcctgtttcggaatatcgataaagtcctgaaaagcctgggattcctggagagcggctctggctccggcggtggcaccctgaagtacgtggaggatgtgacaaacgtggtcagacgggatgtggagaagtggggccccttcgatctggtgtacggcagcacccaacccctgggcagctcttgtgaccggtgccctggctggtacatgtttcagttccaccggatcctgcagtacgccctgccgagacaggagtcccagcggccattcttttggattttcatggacaacttgctgctgaccgaggatgaccaggaaactaccactcggttcctgcagaccgaagccgtgaccctgcaggacgtgagaggccgggactaccagaacgccatgcgggtgtggtccaacatccctggactgaaaagcaagcacgcacctctgacccctaaagaagaggagtacctgcaggcccaggtgcggagcagaagcaagctggacgcccctaaggtggatctgctggtgaagaattgcctcctgcccctgagagagtacttcaagtatttcagccagaatagtctgcccctgggcggcccaagcagcggcgcccctcctcccagcggcggcagcccagccggctccccaacctctaccgaggagggcacctctgagtccgccacccccgagagcggccctggcacctccaccgagcccagcgagggcagcgcacccggcagccctgccggcagccccacctccacagaggagggaaccagcaccgagcccagcgaaggcagcgccccaggcaccagcaccgagcctagtgagggcggctctggcggcggcagcgcccaggagattaaacggatcaacaagatcagaagaagacttgtgaaagacagcaacaccaagaaggccggcaagacaggccccatgaaaaccctgctggttagagtgatgacacccgatctgagagagcggctggaaaacctgagaaagaagcctgaaaatatcccccagcccatcagcaatacatctagagccaacctgaataagctgctgaccgattacaccgaaatgaagaaggcgatcctgcatgtgtactgggaagagttccagaaggaccctgtgggcctgatgagccgggtggcccagcctgccagcaagaagatcgatcagaacaagctgaaacctgagatggacgagaagggcaacctgaccaccgccggctttgcctgctctcagtgtggccagcccctgttcgtgtacaagctggagcaggtgtctgagaagggcaaggcttacaccaactacttcggacggtgcaatgtggccgagcacgaaaagctgatcctgctggcccagctgaagcccgagaaggatagcgacgaagccgtgacatatagcctgggaaagtttgggcagagggccctggatttctacagcattcatgtgaccaaggagtccacccaccccgtgaagcccctggcccagatcgccggaaacagatacgcctccggacctgtgggaaaggccctgagcgacgcatgtatgggcacaatcgcctccttcctgtctaagtaccaggacatcatcatcgaacaccagaaggtggtgaagggcaaccagaagagactggagagcctgcgggagctggccggcaaggaaaacctggaataccctagcgtgaccctgccacctcagcctcacaccaaggagggcgttgatgcctacaacgaagtgatcgcccgggtgcgaatgtgggtgaacctgaacctgtggcagaagctgaagctaagcagagatgatgccaagcctctgctgagactgaagggattcccttcctttcctctggtcgagagacaggccaacgaagtggactggtgggacatggtgtgtaacgtgaagaagctgatcaacgagaaaaaggaggatggcaaggtgttttggcagaatctggctggctacaagagacaggaagccctgagaccatacctgagcagcgaggaagatcggaagaagggaaagaaattcgctcggtaccagctgggcgacctgctgctgcacctggaaaagaagcacggcgaggactggggaaaggtgtacgacgaggcctgggagcggattgacaagaaagtggaaggcctgagcaagcacatcaagctggaagaggaacggagaagcgaggacgcccagagcaaggccgccctgaccgactggctgcgggctaaggccagcttcgtgatcgagggcctgaaggaggccgacaaggacgagttctgcagatgcgagctgaagctgcagaagtggtacggggacctgcggggaaagcccttcgccatcgaagccgagaacagcatcctggacatcagcggcttcagcaagcagtacaactgtgccttcatctggcagaaggacggcgtgaagaagctgaacctgtacctgatcatcaactacttcaagggcggcaagctgcggttcaagaagatcaaacctgaagccttcgaagccaacagattctacaccgtgatcaacaaaaagagcggcgagatcgtgcccatggaggtgaacttcaacttcgacgaccccaacctgatcatcctgcctctggcctttggcaagagacagggcagagaattcatctggaacgacctgctgtccctggaaaccggcagcctgaagctggccaacggaagagtgatcgagaagacactgtacaacagaagaacccggcaggatgagcctgccctgttcgtggccctgaccttcgagcggcgggaggtcctggactcctccaatatcaaaccaatgaacctgatcggcgtggcaagaggcgaaaacatccccgccgtgatcgccctgaccgaccccgagggctgcccactgagccggtttaaggatagcctgggaaacccaacccacatcctgagaatcggcgagagctataaggagaagcagcggaccatccaggccaagaaggaggtggagcagcggagagccggcggctacagccggaagtacgccagcaaagccaagaatctggcagacgatatggtgagaaacaccgctagagatctgctgtactacgccgtgacccaggatgccatgctgatcttcgccaacctgagccggggcttcggccggcagggcaagcggaccttcatggccgagagacagtacacacggatggaggactggctgaccgccaagctggcctacgagggcctgagcaagacctacctgtccaagacactggcccagtacacctccaagacatgcagcaactgtgggtttaccatcaccagcgccgactacgacagggtgctggagaagctgaagaagacagcaacaggctggatgaccacaattaacggcaaggagctgaaggtggagggccagattacctactacaacagatacaagagacagaacgtagtcaaggacctgtccgtcgagctggatagactgagcgaagaatctgtgaacaacgacatctcctcctggacaaagggcagaagcggagaagctctgagcctcctgaagaaaagattctcccatagacccgtgcaggagaagttcgtgtgcctgaactgcggcttcgagacacacgcagccgagcaagccgccctgaacatcgccagatcctggctgttcctgcggagccaggagtacaagaaataccagacaaacaagacaaccggcaacaccgataagagagccttcgtcgagacctggcagtccttttaccggaagaagcttaaggaggtgtggaaacctgccgtgcggtctggcggatctggcggaggctccacaagcggcccctggaccctgctgaccttcagggacgtggccatcgagttcagccaggaggagtggggctgcctgaaccacagccagagggagctgtacagggacgtgatgctggagacctacggccacctgctgttcctgggcctggtgagcaagcccgacctggtgatcctgctggagcagaagaaggagctgtggggcgtgaagaggaaggagaccgtggccagccaccccggcaggtgggagatcaccagccccaagaaaaagagaaaagtctaagctgccttctgcggggcttgccttctggccatgcccttcttctctcccttgcacctgtacctcttggtctttgaataaagcctgagtaggaaggctagcaaaaaaaaaaaaaaaaaaaaaaaaaaaaaaaaaaaaaaaaaaaaaaaaaaaaaaaaaaaaaaaaaaaaaaaaaaaaaaaa

SEQ ID NO: 3886 - RNA, 5419 nt, synthetic construct
  source 1..5419: mol_type = other RNA
aggaaataagagagaaaagaagagtaagaagaaatataagagccaccatggcccctaagaagaagcgtaaagtgagccgggtgaacggcagcggcagcggcggcggcatgaaccacgaccaggagttcgacccccctaaggtgtaccctcccgtccccgccgagaagagaaagcccatccgggtcctgagcctgttcgatggcatcgccaccggtctgctggtgctgaaggacctgggcatccaggtggataggtacattgcctccgaggtgtgcgaggactccatcaccgtgggaatggtgcgtcatcagggcaagatcatgtacgtgggcgacgtgcggagcgtgacacagaagcatatccaggagtggggccctttcgacctggtgatcggcggcagcccttgcaatgacctgagcatcgtgaacccagcccggaagggcctgtacgagggaaccggcagactgttcttcgagttttacagactgctgcacgacgcccggcctaaggaaggcgacgaccggcccttcttttggctgttcgagaatgtggtggccatgggagtcagcgacaagcgggatattagccggttcctggagagcaaccccgtgatgatcgatgccaaggaagtgagcgccgcccaccgggccagatacttctggggcaatctgcctggcatgaacagacccctggccagcaccgtgaacgacaagctggagctgcaggagtgcctggagcacggccggatcgccaagttcagcaaggtgagaaccatcaccacccgaagcaacagcatcaaacaaggcaaggaccagcactttcctgtgttcatgaacgagaaggaggacatcctgtggtgtaccgagatggagagagtgttcgggttcccagtccactacacagatgtcagcaacatgtctagactggccagacagagactgctgggaagaagctggtccgtccctgtgatcagacacctgttcgcccctctgaaggagtacttcgcctgcgtgagcagcggcaacagcaacgccaacagccggggccccagcttctctagcggcctggtgccactgtccctgagagggagccacatgggccccatggagatctacaaaaccgtgagcgcctggaagcggcagcctgtgcgcgtgctgagcctgtttcggaatatcgataaagtcctgaaaagcctgggattcctggagagcggctctggctccggcggtggcaccctgaagtacgtggaggatgtgacaaacgtggtcagacgggatgtggagaagtggggccccttcgatctggtgtacggcagcacccaacccctgggcagctcttgtgaccggtgccctggctggtacatgtttcagttccaccggatcctgcagtacgccctgccgagacaggagtcccagcggccattcttttggattttcatggacaacttgctgctgaccgaggatgaccaggaaactaccactcggttcctgcagaccgaagccgtgaccctgcaggacgtgagaggccgggactaccagaacgccatgcgggtgtggtccaacatccctggactgaaaagcaagcacgcacctctgacccctaaagaagaggagtacctgcaggcccaggtgcggagcagaagcaagctggacgcccctaaggtggatctgctggtgaagaattgcctcctgcccctgagagagtacttcaagtatttcagccagaatagtctgcccctgggcggcccaagcagcggcgcccctcctcccagcggcggcagcccagccggctccccaacctctaccgaggagggcacctctgagtccgccacccccgagagcggccctggcacctccaccgagcccagcgagggcagcgcacccggcagccctgccggcagccccacctccacagaggagggaaccagcaccgagcccagcgaaggcagcgccccaggcaccagcaccgagcctagtgagggcggctctggcggcggcagcgcccaggagattaaacggatcaacaagatcagaagaagacttgtgaaagacagcaacaccaagaaggccggcaagacaggccccatgaaaaccctgctggttagagtgatgacacccgatctgagagagcggctggaaaacctgagaaagaagcctgaaaatatcccccagcccatcagcaatacatctagagccaacctgaataagctgctgaccgattacaccgaaatgaagaaggcgatcctgcatgtgtactgggaagagttccagaaggaccctgtgggcctgatgagccgggtggcccagcctgccagcaagaagatcgatcagaacaagctgaaacctgagatggacgagaagggcaacctgaccaccgccggctttgcctgctctcagtgtggccagcccctgttcgtgtacaagctggagcaggtgtctgagaagggcaaggcttacaccaactacttcggacggtgcaatgtggccgagcacgaaaagctgatcctgctggcccagctgaagcccgagaaggatagcgacgaagccgtgacatatagcctgggaaagtttgggcagagggccctggatttctacagcattcatgtgaccaaggagtccacccaccccgtgaagcccctggcccagatcgccggaaacagatacgcctccggacctgtgggaaaggccctgagcgacgcatgtatgggcacaatcgcctccttcctgtctaagtaccaggacatcatcatcgaacaccagaaggtggtgaagggcaaccagaagagactggagagcctgcgggagctggccggcaaggaaaacctggaataccctagcgtgaccctgccacctcagcctcacaccaaggagggcgttgatgcctacaacgaagtgatcgcccgggtgcgaatgtgggtgaacctgaacctgtggcagaagctgaagctaagcagagatgatgccaagcctctgctgagactgaagggattcccttcctttcctctggtcgagagacaggccaacgaagtggactggtgggacatggtgtgtaacgtgaagaagctgatcaacgagaaaaaggaggatggcaaggtgttttggcagaatctggctggctacaagagacaggaagccctgagaccatacctgagcagcgaggaagatcggaagaagggaaagaaattcgctcggtaccagctgggcgacctgctgctgcacctggaaaagaagcacggcgaggactggggaaaggtgtacgacgaggcctgggagcggattgacaagaaagtggaaggcctgagcaagcacatcaagctggaagaggaacggagaagcgaggacgcccagagcaaggccgccctgaccgactggctgcgggctaaggccagcttcgtgatcgagggcctgaaggaggccgacaaggacgagttctgcagatgcgagctgaagctgcagaagtggtacggggacctgcggggaaagcccttcgccatcgaagccgagaacagcatcctggacatcagcggcttcagcaagcagtacaactgtgccttcatctggcagaaggacggcgtgaagaagctgaacctgtacctgatcatcaactacttcaagggcggcaagctgcggttcaagaagatcaaacctgaagccttcgaagccaacagattctacaccgtgatcaacaaaaagagcggcgagatcgtgcccatggaggtgaacttcaacttcgacgaccccaacctgatcatcctgcctctggcctttggcaagagacagggcagagaattcatctggaacgacctgctgtccctggaaaccggcagcctgaagctggccaacggaagagtgatcgagaagacactgtacaacagaagaacccggcaggatgagcctgccctgttcgtggccctgaccttcgagcggcgggaggtcctggactcctccaatatcaaaccaatgaacctgatcggcgtggcaagaggcgaaaacatccccgccgtgatcgccctgaccgaccccgagggctgcccactgagccggtttaaggatagcctgggaaacccaacccacatcctgagaatcggcgagagctataaggagaagcagcggaccatccaggccaagaaggaggtggagcagcggagagccggcggctacagccggaagtacgccagcaaagccaagaatctggcagacgatatggtgagaaacaccgctagagatctgctgtactacgccgtgacccaggatgccatgctgatcttcgccaacctgagccggggcttcggccggcagggcaagcggaccttcatggccgagagacagtacacacggatggaggactggctgaccgccaagctggcctacgagggcctgagcaagacctacctgtccaagacactggcccagtacacctccaagacatgcagcaactgtgggtttaccatcaccagcgccgactacgacagggtgctggagaagctgaagaagacagcaacaggctggatgaccacaattaacggcaaggagctgaaggtggagggccagattacctactacaacagatacaagagacagaacgtagtcaaggacctgtccgtcgagctggatagactgagcgaagaatctgtgaacaacgacatctcctcctggacaaagggcagaagcggagaagctctgagcctcctgaagaaaagattctcccatagacccgtgcaggagaagttcgtgtgcctgaactgcggcttcgagacacacgcagccgagcaagccgccctgaacatcgccagatcctggctgttcctgcggagccaggagtacaagaaataccagacaaacaagacaaccggcaacaccgataagagagccttcgtcgagacctggcagtccttttaccggaagaagcttaaggaggtgtggaaacctgccgtgcggtctggcggatctggcggaggctccacaagcatggaggacctgctgagcttcaccgacgtggccatcgacttcagcgccgacgagtgcgagtgcctggacagcgcccagtggaacctgtacaaggaggtgatgctggagaactacagcaacctggtgttcctgggcctggccttcagcaagccccacctggtgaccttcctggagcagagcagcgacccctggagcgtgaagaggaaggccagcgccgccatcagcctgggcagcaagccccacaccagccccaagaaaaagagaaaagtctaagctgccttctgcggggcttgccttctggccatgcccttcttctctcccttgcacctgtacctcttggtctttgaataaagcctgagtaggaaggctagcaaaaaaaaaaaaaaaaaaaaaaaaaaaaaaaaaaaaaaaaaaaaaaaaaaaaaaaaaaaaaaaaaaaaaaaaaaaaaaaa

SEQ ID NO: 3887 - RNA, 5419 nt, synthetic construct
  source 1..5419: mol_type = other RNA
aggaaataagagagaaaagaagagtaagaagaaatataagagccaccatggcccctaagaagaagcgtaaagtgagccgggtgaacggcagcggcagcggcggcggcatgaaccacgaccaggagttcgacccccctaaggtgtaccctcccgtccccgccgagaagagaaagcccatccgggtcctgagcctgttcgatggcatcgccaccggtctgctggtgctgaaggacctgggcatccaggtggataggtacattgcctccgaggtgtgcgaggactccatcaccgtgggaatggtgcgtcatcagggcaagatcatgtacgtgggcgacgtgcggagcgtgacacagaagcatatccaggagtggggccctttcgacctggtgatcggcggcagcccttgcaatgacctgagcatcgtgaacccagcccggaagggcctgtacgagggaaccggcagactgttcttcgagttttacagactgctgcacgacgcccggcctaaggaaggcgacgaccggcccttcttttggctgttcgagaatgtggtggccatgggagtcagcgacaagcgggatattagccggttcctggagagcaaccccgtgatgatcgatgccaaggaagtgagcgccgcccaccgggccagatacttctggggcaatctgcctggcatgaacagacccctggccagcaccgtgaacgacaagctggagctgcaggagtgcctggagcacggccggatcgccaagttcagcaaggtgagaaccatcaccacccgaagcaacagcatcaaacaaggcaaggaccagcactttcctgtgttcatgaacgagaaggaggacatcctgtggtgtaccgagatggagagagtgttcgggttcccagtccactacacagatgtcagcaacatgtctagactggccagacagagactgctgggaagaagctggtccgtccctgtgatcagacacctgttcgcccctctgaaggagtacttcgcctgcgtgagcagcggcaacagcaacgccaacagccggggccccagcttctctagcggcctggtgccactgtccctgagagggagccacatgggccccatggagatctacaaaaccgtgagcgcctggaagcggcagcctgtgcgcgtgctgagcctgtttcggaatatcgataaagtcctgaaaagcctgggattcctggagagcggctctggctccggcggtggcaccctgaagtacgtggaggatgtgacaaacgtggtcagacgggatgtggagaagtggggccccttcgatctggtgtacggcagcacccaacccctgggcagctcttgtgaccggtgccctggctggtacatgtttcagttccaccggatcctgcagtacgccctgccgagacaggagtcccagcggccattcttttggattttcatggacaacttgctgctgaccgaggatgaccaggaaactaccactcggttcctgcagaccgaagccgtgaccctgcaggacgtgagaggccgggactaccagaacgccatgcgggtgtggtccaacatccctggactgaaaagcaagcacgcacctctgacccctaaagaagaggagtacctgcaggcccaggtgcggagcagaagcaagctggacgcccctaaggtggatctgctggtgaagaattgcctcctgcccctgagagagtacttcaagtatttcagccagaatagtctgcccctgggcggcccaagcagcggcgcccctcctcccagcggcggcagcccagccggctccccaacctctaccgaggagggcacctctgagtccgccacccccgagagcggccctggcacctccaccgagcccagcgagggcagcgcacccggcagccctgccggcagccccacctccacagaggagggaaccagcaccgagcccagcgaaggcagcgccccaggcaccagcaccgagcctagtgagggcggctctggcggcggcagcgcccaggagattaaacggatcaacaagatcagaagaagacttgtgaaagacagcaacaccaagaaggccggcaagacaggccccatgaaaaccctgctggttagagtgatgacacccgatctgagagagcggctggaaaacctgagaaagaagcctgaaaatatcccccagcccatcagcaatacatctagagccaacctgaataagctgctgaccgattacaccgaaatgaagaaggcgatcctgcatgtgtactgggaagagttccagaaggaccctgtgggcctgatgagccgggtggcccagcctgccagcaagaagatcgatcagaacaagctgaaacctgagatggacgagaagggcaacctgaccaccgccggctttgcctgctctcagtgtggccagcccctgttcgtgtacaagctggagcaggtgtctgagaagggcaaggcttacaccaactacttcggacggtgcaatgtggccgagcacgaaaagctgatcctgctggcccagctgaagcccgagaaggatagcgacgaagccgtgacatatagcctgggaaagtttgggcagagggccctggatttctacagcattcatgtgaccaaggagtccacccaccccgtgaagcccctggcccagatcgccggaaacagatacgcctccggacctgtgggaaaggccctgagcgacgcatgtatgggcacaatcgcctccttcctgtctaagtaccaggacatcatcatcgaacaccagaaggtggtgaagggcaaccagaagagactggagagcctgcgggagctggccggcaaggaaaacctggaataccctagcgtgaccctgccacctcagcctcacaccaaggagggcgttgatgcctacaacgaagtgatcgcccgggtgcgaatgtgggtgaacctgaacctgtggcagaagctgaagctaagcagagatgatgccaagcctctgctgagactgaagggattcccttcctttcctctggtcgagagacaggccaacgaagtggactggtgggacatggtgtgtaacgtgaagaagctgatcaacgagaaaaaggaggatggcaaggtgttttggcagaatctggctggctacaagagacaggaagccctgagaccatacctgagcagcgaggaagatcggaagaagggaaagaaattcgctcggtaccagctgggcgacctgctgctgcacctggaaaagaagcacggcgaggactggggaaaggtgtacgacgaggcctgggagcggattgacaagaaagtggaaggcctgagcaagcacatcaagctggaagaggaacggagaagcgaggacgcccagagcaaggccgccctgaccgactggctgcgggctaaggccagcttcgtgatcgagggcctgaaggaggccgacaaggacgagttctgcagatgcgagctgaagctgcagaagtggtacggggacctgcggggaaagcccttcgccatcgaagccgagaacagcatcctggacatcagcggcttcagcaagcagtacaactgtgccttcatctggcagaaggacggcgtgaagaagctgaacctgtacctgatcatcaactacttcaagggcggcaagctgcggttcaagaagatcaaacctgaagccttcgaagccaacagattctacaccgtgatcaacaaaaagagcggcgagatcgtgcccatggaggtgaacttcaacttcgacgaccccaacctgatcatcctgcctctggcctttggcaagagacagggcagagaattcatctggaacgacctgctgtccctggaaaccggcagcctgaagctggccaacggaagagtgatcgagaagacactgtacaacagaagaacccggcaggatgagcctgccctgttcgtggccctgaccttcgagcggcgggaggtcctggactcctccaatatcaaaccaatgaacctgatcggcgtggcaagaggcgaaaacatccccgccgtgatcgccctgaccgaccccgagggctgcccactgagccggtttaaggatagcctgggaaacccaacccacatcctgagaatcggcgagagctataaggagaagcagcggaccatccaggccaagaaggaggtggagcagcggagagccggcggctacagccggaagtacgccagcaaagccaagaatctggcagacgatatggtgagaaacaccgctagagatctgctgtactacgccgtgacccaggatgccatgctgatcttcgccaacctgagccggggcttcggccggcagggcaagcggaccttcatggccgagagacagtacacacggatggaggactggctgaccgccaagctggcctacgagggcctgagcaagacctacctgtccaagacactggcccagtacacctccaagacatgcagcaactgtgggtttaccatcaccagcgccgactacgacagggtgctggagaagctgaagaagacagcaacaggctggatgaccacaattaacggcaaggagctgaaggtggagggccagattacctactacaacagatacaagagacagaacgtagtcaaggacctgtccgtcgagctggatagactgagcgaagaatctgtgaacaacgacatctcctcctggacaaagggcagaagcggagaagctctgagcctcctgaagaaaagattctcccatagacccgtgcaggagaagttcgtgtgcctgaactgcggcttcgagacacacgcagccgagcaagccgccctgaacatcgccagatcctggctgttcctgcggagccaggagtacaagaaataccagacaaacaagacaaccggcaacaccgataagagagccttcgtcgagacctggcagtccttttaccggaagaagcttaaggaggtgtggaaacctgccgtgcggtctggcggatctggcggaggctccacaagcgcccacgacctggtggtgttcagggacgtgagcgtggacttcagccaggaggagtgggagtgcctgaacagctaccagaggaacctgtacagggacgtgatcctggagaactacagcaacctggtgagcctgggctgcagcatcagcaagcccgacgtgatcaccctgctggagcagggcaaggagccctggatggtggtgaggaacgagaagaggaggtggaacctggacctggagagcaagaccagccccaagaaaaagagaaaagtctaagctgccttctgcggggcttgccttctggccatgcccttcttctctcccttgcacctgtacctcttggtctttgaataaagcctgagtaggaaggctagcaaaaaaaaaaaaaaaaaaaaaaaaaaaaaaaaaaaaaaaaaaaaaaaaaaaaaaaaaaaaaaaaaaaaaaaaaaaaaaaa

SEQ ID NO: 3888 - RNA, 5419 nt, synthetic construct
  source 1..5419: mol_type = other RNA
aggaaataagagagaaaagaagagtaagaagaaatataagagccaccatggcccctaagaagaagcgtaaagtgagccgggtgaacggcagcggcagcggcggcggcatgaaccacgaccaggagttcgacccccctaaggtgtaccctcccgtccccgccgagaagagaaagcccatccgggtcctgagcctgttcgatggcatcgccaccggtctgctggtgctgaaggacctgggcatccaggtggataggtacattgcctccgaggtgtgcgaggactccatcaccgtgggaatggtgcgtcatcagggcaagatcatgtacgtgggcgacgtgcggagcgtgacacagaagcatatccaggagtggggccctttcgacctggtgatcggcggcagcccttgcaatgacctgagcatcgtgaacccagcccggaagggcctgtacgagggaaccggcagactgttcttcgagttttacagactgctgcacgacgcccggcctaaggaaggcgacgaccggcccttcttttggctgttcgagaatgtggtggccatgggagtcagcgacaagcgggatattagccggttcctggagagcaaccccgtgatgatcgatgccaaggaagtgagcgccgcccaccgggccagatacttctggggcaatctgcctggcatgaacagacccctggccagcaccgtgaacgacaagctggagctgcaggagtgcctggagcacggccggatcgccaagttcagcaaggtgagaaccatcaccacccgaagcaacagcatcaaacaaggcaaggaccagcactttcctgtgttcatgaacgagaaggaggacatcctgtggtgtaccgagatggagagagtgttcgggttcccagtccactacacagatgtcagcaacatgtctagactggccagacagagactgctgggaagaagctggtccgtccctgtgatcagacacctgttcgcccctctgaaggagtacttcgcctgcgtgagcagcggcaacagcaacgccaacagccggggccccagcttctctagcggcctggtgccactgtccctgagagggagccacatgggccccatggagatctacaaaaccgtgagcgcctggaagcggcagcctgtgcgcgtgctgagcctgtttcggaatatcgataaagtcctgaaaagcctgggattcctggagagcggctctggctccggcggtggcaccctgaagtacgtggaggatgtgacaaacgtggtcagacgggatgtggagaagtggggccccttcgatctggtgtacggcagcacccaacccctgggcagctcttgtgaccggtgccctggctggtacatgtttcagttccaccggatcctgcagtacgccctgccgagacaggagtcccagcggccattcttttggattttcatggacaacttgctgctgaccgaggatgaccaggaaactaccactcggttcctgcagaccgaagccgtgaccctgcaggacgtgagaggccgggactaccagaacgccatgcgggtgtggtccaacatccctggactgaaaagcaagcacgcacctctgacccctaaagaagaggagtacctgcaggcccaggtgcggagcagaagcaagctggacgcccctaaggtggatctgctggtgaagaattgcctcctgcccctgagagagtacttcaagtatttcagccagaatagtctgcccctgggcggcccaagcagcggcgcccctcctcccagcggcggcagcccagccggctccccaacctctaccgaggagggcacctctgagtccgccacccccgagagcggccctggcacctccaccgagcccagcgagggcagcgcacccggcagccctgccggcagccccacctccacagaggagggaaccagcaccgagcccagcgaaggcagcgccccaggcaccagcaccgagcctagtgagggcggctctggcggcggcagcgcccaggagattaaacggatcaacaagatcagaagaagacttgtgaaagacagcaacaccaagaaggccggcaagacaggccccatgaaaaccctgctggttagagtgatgacacccgatctgagagagcggctggaaaacctgagaaagaagcctgaaaatatcccccagcccatcagcaatacatctagagccaacctgaataagctgctgaccgattacaccgaaatgaagaaggcgatcctgcatgtgtactgggaagagttccagaaggaccctgtgggcctgatgagccgggtggcccagcctgccagcaagaagatcgatcagaacaagctgaaacctgagatggacgagaagggcaacctgaccaccgccggctttgcctgctctcagtgtggccagcccctgttcgtgtacaagctggagcaggtgtctgagaagggcaaggcttacaccaactacttcggacggtgcaatgtggccgagcacgaaaagctgatcctgctggcccagctgaagcccgagaaggatagcgacgaagccgtgacatatagcctgggaaagtttgggcagagggccctggatttctacagcattcatgtgaccaaggagtccacccaccccgtgaagcccctggcccagatcgccggaaacagatacgcctccggacctgtgggaaaggccctgagcgacgcatgtatgggcacaatcgcctccttcctgtctaagtaccaggacatcatcatcgaacaccagaaggtggtgaagggcaaccagaagagactggagagcctgcgggagctggccggcaaggaaaacctggaataccctagcgtgaccctgccacctcagcctcacaccaaggagggcgttgatgcctacaacgaagtgatcgcccgggtgcgaatgtgggtgaacctgaacctgtggcagaagctgaagctaagcagagatgatgccaagcctctgctgagactgaagggattcccttcctttcctctggtcgagagacaggccaacgaagtggactggtgggacatggtgtgtaacgtgaagaagctgatcaacgagaaaaaggaggatggcaaggtgttttggcagaatctggctggctacaagagacaggaagccctgagaccatacctgagcagcgaggaagatcggaagaagggaaagaaattcgctcggtaccagctgggcgacctgctgctgcacctggaaaagaagcacggcgaggactggggaaaggtgtacgacgaggcctgggagcggattgacaagaaagtggaaggcctgagcaagcacatcaagctggaagaggaacggagaagcgaggacgcccagagcaaggccgccctgaccgactggctgcgggctaaggccagcttcgtgatcgagggcctgaaggaggccgacaaggacgagttctgcagatgcgagctgaagctgcagaagtggtacggggacctgcggggaaagcccttcgccatcgaagccgagaacagcatcctggacatcagcggcttcagcaagcagtacaactgtgccttcatctggcagaaggacggcgtgaagaagctgaacctgtacctgatcatcaactacttcaagggcggcaagctgcggttcaagaagatcaaacctgaagccttcgaagccaacagattctacaccgtgatcaacaaaaagagcggcgagatcgtgcccatggaggtgaacttcaacttcgacgaccccaacctgatcatcctgcctctggcctttggcaagagacagggcagagaattcatctggaacgacctgctgtccctggaaaccggcagcctgaagctggccaacggaagagtgatcgagaagacactgtacaacagaagaacccggcaggatgagcctgccctgttcgtggccctgaccttcgagcggcgggaggtcctggactcctccaatatcaaaccaatgaacctgatcggcgtggcaagaggcgaaaacatccccgccgtgatcgccctgaccgaccccgagggctgcccactgagccggtttaaggatagcctgggaaacccaacccacatcctgagaatcggcgagagctataaggagaagcagcggaccatccaggccaagaaggaggtggagcagcggagagccggcggctacagccggaagtacgccagcaaagccaagaatctggcagacgatatggtgagaaacaccgctagagatctgctgtactacgccgtgacccaggatgccatgctgatcttcgccaacctgagccggggcttcggccggcagggcaagcggaccttcatggccgagagacagtacacacggatggaggactggctgaccgccaagctggcctacgagggcctgagcaagacctacctgtccaagacactggcccagtacacctccaagacatgcagcaactgtgggtttaccatcaccagcgccgactacgacagggtgctggagaagctgaagaagacagcaacaggctggatgaccacaattaacggcaaggagctgaaggtggagggccagattacctactacaacagatacaagagacagaacgtagtcaaggacctgtccgtcgagctggatagactgagcgaagaatctgtgaacaacgacatctcctcctggacaaagggcagaagcggagaagctctgagcctcctgaagaaaagattctcccatagacccgtgcaggagaagttcgtgtgcctgaactgcggcttcgagacacacgcagccgagcaagccgccctgaacatcgccagatcctggctgttcctgcggagccaggagtacaagaaataccagacaaacaagacaaccggcaacaccgataagagagccttcgtcgagacctggcagtccttttaccggaagaagcttaaggaggtgtggaaacctgccgtgcggtctggcggatctggcggaggctccacaagcatgctgcccatcgtgcagctgtacccccagggcctggtgagcttcaaggacgtggccgtggacttcacccaggaggagtggcagcagctggaccccagccagaggaccctgtacagggacgtgatgctggagaactacagccacctggtgagcatgggctaccccgtgagcaagcccgacgtgatcagcaagctggagcagggcgaggagccctggatcatcaagggcgacatcagcaactggaccagccccaagaaaaagagaaaagtctaagctgccttctgcggggcttgccttctggccatgcccttcttctctcccttgcacctgtacctcttggtctttgaataaagcctgagtaggaaggctagcaaaaaaaaaaaaaaaaaaaaaaaaaaaaaaaaaaaaaaaaaaaaaaaaaaaaaaaaaaaaaaaaaaaaaaaaaaaaaaaa

SEQ ID NO: 3889 - RNA, 5419 nt, synthetic construct
  source 1..5419: mol_type = other RNA
aggaaataagagagaaaagaagagtaagaagaaatataagagccaccatggcccctaagaagaagcgtaaagtgagccgggtgaacggcagcggcagcggcggcggcatgaaccacgaccaggagttcgacccccctaaggtgtaccctcccgtccccgccgagaagagaaagcccatccgggtcctgagcctgttcgatggcatcgccaccggtctgctggtgctgaaggacctgggcatccaggtggataggtacattgcctccgaggtgtgcgaggactccatcaccgtgggaatggtgcgtcatcagggcaagatcatgtacgtgggcgacgtgcggagcgtgacacagaagcatatccaggagtggggccctttcgacctggtgatcggcggcagcccttgcaatgacctgagcatcgtgaacccagcccggaagggcctgtacgagggaaccggcagactgttcttcgagttttacagactgctgcacgacgcccggcctaaggaaggcgacgaccggcccttcttttggctgttcgagaatgtggtggccatgggagtcagcgacaagcgggatattagccggttcctggagagcaaccccgtgatgatcgatgccaaggaagtgagcgccgcccaccgggccagatacttctggggcaatctgcctggcatgaacagacccctggccagcaccgtgaacgacaagctggagctgcaggagtgcctggagcacggccggatcgccaagttcagcaaggtgagaaccatcaccacccgaagcaacagcatcaaacaaggcaaggaccagcactttcctgtgttcatgaacgagaaggaggacatcctgtggtgtaccgagatggagagagtgttcgggttcccagtccactacacagatgtcagcaacatgtctagactggccagacagagactgctgggaagaagctggtccgtccctgtgatcagacacctgttcgcccctctgaaggagtacttcgcctgcgtgagcagcggcaacagcaacgccaacagccggggccccagcttctctagcggcctggtgccactgtccctgagagggagccacatgggccccatggagatctacaaaaccgtgagcgcctggaagcggcagcctgtgcgcgtgctgagcctgtttcggaatatcgataaagtcctgaaaagcctgggattcctggagagcggctctggctccggcggtggcaccctgaagtacgtggaggatgtgacaaacgtggtcagacgggatgtggagaagtggggccccttcgatctggtgtacggcagcacccaacccctgggcagctcttgtgaccggtgccctggctggtacatgtttcagttccaccggatcctgcagtacgccctgccgagacaggagtcccagcggccattcttttggattttcatggacaacttgctgctgaccgaggatgaccaggaaactaccactcggttcctgcagaccgaagccgtgaccctgcaggacgtgagaggccgggactaccagaacgccatgcgggtgtggtccaacatccctggactgaaaagcaagcacgcacctctgacccctaaagaagaggagtacctgcaggcccaggtgcggagcagaagcaagctggacgcccctaaggtggatctgctggtgaagaattgcctcctgcccctgagagagtacttcaagtatttcagccagaatagtctgcccctgggcggcccaagcagcggcgcccctcctcccagcggcggcagcccagccggctccccaacctctaccgaggagggcacctctgagtccgccacccccgagagcggccctggcacctccaccgagcccagcgagggcagcgcacccggcagccctgccggcagccccacctccacagaggagggaaccagcaccgagcccagcgaaggcagcgccccaggcaccagcaccgagcctagtgagggcggctctggcggcggcagcgcccaggagattaaacggatcaacaagatcagaagaagacttgtgaaagacagcaacaccaagaaggccggcaagacaggccccatgaaaaccctgctggttagagtgatgacacccgatctgagagagcggctggaaaacctgagaaagaagcctgaaaatatcccccagcccatcagcaatacatctagagccaacctgaataagctgctgaccgattacaccgaaatgaagaaggcgatcctgcatgtgtactgggaagagttccagaaggaccctgtgggcctgatgagccgggtggcccagcctgccagcaagaagatcgatcagaacaagctgaaacctgagatggacgagaagggcaacctgaccaccgccggctttgcctgctctcagtgtggccagcccctgttcgtgtacaagctggagcaggtgtctgagaagggcaaggcttacaccaactacttcggacggtgcaatgtggccgagcacgaaaagctgatcctgctggcccagctgaagcccgagaaggatagcgacgaagccgtgacatatagcctgggaaagtttgggcagagggccctggatttctacagcattcatgtgaccaaggagtccacccaccccgtgaagcccctggcccagatcgccggaaacagatacgcctccggacctgtgggaaaggccctgagcgacgcatgtatgggcacaatcgcctccttcctgtctaagtaccaggacatcatcatcgaacaccagaaggtggtgaagggcaaccagaagagactggagagcctgcgggagctggccggcaaggaaaacctggaataccctagcgtgaccctgccacctcagcctcacaccaaggagggcgttgatgcctacaacgaagtgatcgcccgggtgcgaatgtgggtgaacctgaacctgtggcagaagctgaagctaagcagagatgatgccaagcctctgctgagactgaagggattcccttcctttcctctggtcgagagacaggccaacgaagtggactggtgggacatggtgtgtaacgtgaagaagctgatcaacgagaaaaaggaggatggcaaggtgttttggcagaatctggctggctacaagagacaggaagccctgagaccatacctgagcagcgaggaagatcggaagaagggaaagaaattcgctcggtaccagctgggcgacctgctgctgcacctggaaaagaagcacggcgaggactggggaaaggtgtacgacgaggcctgggagcggattgacaagaaagtggaaggcctgagcaagcacatcaagctggaagaggaacggagaagcgaggacgcccagagcaaggccgccctgaccgactggctgcgggctaaggccagcttcgtgatcgagggcctgaaggaggccgacaaggacgagttctgcagatgcgagctgaagctgcagaagtggtacggggacctgcggggaaagcccttcgccatcgaagccgagaacagcatcctggacatcagcggcttcagcaagcagtacaactgtgccttcatctggcagaaggacggcgtgaagaagctgaacctgtacctgatcatcaactacttcaagggcggcaagctgcggttcaagaagatcaaacctgaagccttcgaagccaacagattctacaccgtgatcaacaaaaagagcggcgagatcgtgcccatggaggtgaacttcaacttcgacgaccccaacctgatcatcctgcctctggcctttggcaagagacagggcagagaattcatctggaacgacctgctgtccctggaaaccggcagcctgaagctggccaacggaagagtgatcgagaagacactgtacaacagaagaacccggcaggatgagcctgccctgttcgtggccctgaccttcgagcggcgggaggtcctggactcctccaatatcaaaccaatgaacctgatcggcgtggcaagaggcgaaaacatccccgccgtgatcgccctgaccgaccccgagggctgcccactgagccggtttaaggatagcctgggaaacccaacccacatcctgagaatcggcgagagctataaggagaagcagcggaccatccaggccaagaaggaggtggagcagcggagagccggcggctacagccggaagtacgccagcaaagccaagaatctggcagacgatatggtgagaaacaccgctagagatctgctgtactacgccgtgacccaggatgccatgctgatcttcgccaacctgagccggggcttcggccggcagggcaagcggaccttcatggccgagagacagtacacacggatggaggactggctgaccgccaagctggcctacgagggcctgagcaagacctacctgtccaagacactggcccagtacacctccaagacatgcagcaactgtgggtttaccatcaccagcgccgactacgacagggtgctggagaagctgaagaagacagcaacaggctggatgaccacaattaacggcaaggagctgaaggtggagggccagattacctactacaacagatacaagagacagaacgtagtcaaggacctgtccgtcgagctggatagactgagcgaagaatctgtgaacaacgacatctcctcctggacaaagggcagaagcggagaagctctgagcctcctgaagaaaagattctcccatagacccgtgcaggagaagttcgtgtgcctgaactgcggcttcgagacacacgcagccgagcaagccgccctgaacatcgccagatcctggctgttcctgcggagccaggagtacaagaaataccagacaaacaagacaaccggcaacaccgataagagagccttcgtcgagacctggcagtccttttaccggaagaagcttaaggaggtgtggaaacctgccgtgcggtctggcggatctggcggaggctccacaagccccgagaacggcgtgaccttcgaggacatcgccctgtacttcagctgggaggagtggaagctgctggacgaggcccagaggaggctgtaccacgacgtgatgctggagaacttcgccctgatcagcagcctgggcgtgtggagcggcgaggagaacgtggaggccagcttcgagcagagcgtgagcgtggtgatgagccaggtgaggaccagcaaggagcccagcagcagccagaagacccacaccagccccaagaaaaagagaaaagtctaagctgccttctgcggggcttgccttctggccatgcccttcttctctcccttgcacctgtacctcttggtctttgaataaagcctgagtaggaaggctagcaaaaaaaaaaaaaaaaaaaaaaaaaaaaaaaaaaaaaaaaaaaaaaaaaaaaaaaaaaaaaaaaaaaaaaaaaaaaaaaa

SEQ ID NO: 3890 - RNA, 5419 nt, synthetic construct
  source 1..5419: mol_type = other RNA
aggaaataagagagaaaagaagagtaagaagaaatataagagccaccatggcccctaagaagaagcgtaaagtgagccgggtgaacggcagcggcagcggcggcggcatgaaccacgaccaggagttcgacccccctaaggtgtaccctcccgtccccgccgagaagagaaagcccatccgggtcctgagcctgttcgatggcatcgccaccggtctgctggtgctgaaggacctgggcatccaggtggataggtacattgcctccgaggtgtgcgaggactccatcaccgtgggaatggtgcgtcatcagggcaagatcatgtacgtgggcgacgtgcggagcgtgacacagaagcatatccaggagtggggccctttcgacctggtgatcggcggcagcccttgcaatgacctgagcatcgtgaacccagcccggaagggcctgtacgagggaaccggcagactgttcttcgagttttacagactgctgcacgacgcccggcctaaggaaggcgacgaccggcccttcttttggctgttcgagaatgtggtggccatgggagtcagcgacaagcgggatattagccggttcctggagagcaaccccgtgatgatcgatgccaaggaagtgagcgccgcccaccgggccagatacttctggggcaatctgcctggcatgaacagacccctggccagcaccgtgaacgacaagctggagctgcaggagtgcctggagcacggccggatcgccaagttcagcaaggtgagaaccatcaccacccgaagcaacagcatcaaacaaggcaaggaccagcactttcctgtgttcatgaacgagaaggaggacatcctgtggtgtaccgagatggagagagtgttcgggttcccagtccactacacagatgtcagcaacatgtctagactggccagacagagactgctgggaagaagctggtccgtccctgtgatcagacacctgttcgcccctctgaaggagtacttcgcctgcgtgagcagcggcaacagcaacgccaacagccggggccccagcttctctagcggcctggtgccactgtccctgagagggagccacatgggccccatggagatctacaaaaccgtgagcgcctggaagcggcagcctgtgcgcgtgctgagcctgtttcggaatatcgataaagtcctgaaaagcctgggattcctggagagcggctctggctccggcggtggcaccctgaagtacgtggaggatgtgacaaacgtggtcagacgggatgtggagaagtggggccccttcgatctggtgtacggcagcacccaacccctgggcagctcttgtgaccggtgccctggctggtacatgtttcagttccaccggatcctgcagtacgccctgccgagacaggagtcccagcggccattcttttggattttcatggacaacttgctgctgaccgaggatgaccaggaaactaccactcggttcctgcagaccgaagccgtgaccctgcaggacgtgagaggccgggactaccagaacgccatgcgggtgtggtccaacatccctggactgaaaagcaagcacgcacctctgacccctaaagaagaggagtacctgcaggcccaggtgcggagcagaagcaagctggacgcccctaaggtggatctgctggtgaagaattgcctcctgcccctgagagagtacttcaagtatttcagccagaatagtctgcccctgggcggcccaagcagcggcgcccctcctcccagcggcggcagcccagccggctccccaacctctaccgaggagggcacctctgagtccgccacccccgagagcggccctggcacctccaccgagcccagcgagggcagcgcacccggcagccctgccggcagccccacctccacagaggagggaaccagcaccgagcccagcgaaggcagcgccccaggcaccagcaccgagcctagtgagggcggctctggcggcggcagcgcccaggagattaaacggatcaacaagatcagaagaagacttgtgaaagacagcaacaccaagaaggccggcaagacaggccccatgaaaaccctgctggttagagtgatgacacccgatctgagagagcggctggaaaacctgagaaagaagcctgaaaatatcccccagcccatcagcaatacatctagagccaacctgaataagctgctgaccgattacaccgaaatgaagaaggcgatcctgcatgtgtactgggaagagttccagaaggaccctgtgggcctgatgagccgggtggcccagcctgccagcaagaagatcgatcagaacaagctgaaacctgagatggacgagaagggcaacctgaccaccgccggctttgcctgctctcagtgtggccagcccctgttcgtgtacaagctggagcaggtgtctgagaagggcaaggcttacaccaactacttcggacggtgcaatgtggccgagcacgaaaagctgatcctgctggcccagctgaagcccgagaaggatagcgacgaagccgtgacatatagcctgggaaagtttgggcagagggccctggatttctacagcattcatgtgaccaaggagtccacccaccccgtgaagcccctggcccagatcgccggaaacagatacgcctccggacctgtgggaaaggccctgagcgacgcatgtatgggcacaatcgcctccttcctgtctaagtaccaggacatcatcatcgaacaccagaaggtggtgaagggcaaccagaagagactggagagcctgcgggagctggccggcaaggaaaacctggaataccctagcgtgaccctgccacctcagcctcacaccaaggagggcgttgatgcctacaacgaagtgatcgcccgggtgcgaatgtgggtgaacctgaacctgtggcagaagctgaagctaagcagagatgatgccaagcctctgctgagactgaagggattcccttcctttcctctggtcgagagacaggccaacgaagtggactggtgggacatggtgtgtaacgtgaagaagctgatcaacgagaaaaaggaggatggcaaggtgttttggcagaatctggctggctacaagagacaggaagccctgagaccatacctgagcagcgaggaagatcggaagaagggaaagaaattcgctcggtaccagctgggcgacctgctgctgcacctggaaaagaagcacggcgaggactggggaaaggtgtacgacgaggcctgggagcggattgacaagaaagtggaaggcctgagcaagcacatcaagctggaagaggaacggagaagcgaggacgcccagagcaaggccgccctgaccgactggctgcgggctaaggccagcttcgtgatcgagggcctgaaggaggccgacaaggacgagttctgcagatgcgagctgaagctgcagaagtggtacggggacctgcggggaaagcccttcgccatcgaagccgagaacagcatcctggacatcagcggcttcagcaagcagtacaactgtgccttcatctggcagaaggacggcgtgaagaagctgaacctgtacctgatcatcaactacttcaagggcggcaagctgcggttcaagaagatcaaacctgaagccttcgaagccaacagattctacaccgtgatcaacaaaaagagcggcgagatcgtgcccatggaggtgaacttcaacttcgacgaccccaacctgatcatcctgcctctggcctttggcaagagacagggcagagaattcatctggaacgacctgctgtccctggaaaccggcagcctgaagctggccaacggaagagtgatcgagaagacactgtacaacagaagaacccggcaggatgagcctgccctgttcgtggccctgaccttcgagcggcgggaggtcctggactcctccaatatcaaaccaatgaacctgatcggcgtggcaagaggcgaaaacatccccgccgtgatcgccctgaccgaccccgagggctgcccactgagccggtttaaggatagcctgggaaacccaacccacatcctgagaatcggcgagagctataaggagaagcagcggaccatccaggccaagaaggaggtggagcagcggagagccggcggctacagccggaagtacgccagcaaagccaagaatctggcagacgatatggtgagaaacaccgctagagatctgctgtactacgccgtgacccaggatgccatgctgatcttcgccaacctgagccggggcttcggccggcagggcaagcggaccttcatggccgagagacagtacacacggatggaggactggctgaccgccaagctggcctacgagggcctgagcaagacctacctgtccaagacactggcccagtacacctccaagacatgcagcaactgtgggtttaccatcaccagcgccgactacgacagggtgctggagaagctgaagaagacagcaacaggctggatgaccacaattaacggcaaggagctgaaggtggagggccagattacctactacaacagatacaagagacagaacgtagtcaaggacctgtccgtcgagctggatagactgagcgaagaatctgtgaacaacgacatctcctcctggacaaagggcagaagcggagaagctctgagcctcctgaagaaaagattctcccatagacccgtgcaggagaagttcgtgtgcctgaactgcggcttcgagacacacgcagccgagcaagccgccctgaacatcgccagatcctggctgttcctgcggagccaggagtacaagaaataccagacaaacaagacaaccggcaacaccgataagagagccttcgtcgagacctggcagtccttttaccggaagaagcttaaggaggtgtggaaacctgccgtgcggtctggcggatctggcggaggctccacaagcatgcccgtgaccttcgaggaggtggccgtgtacttcaccgagggccagggcgccctgctggaccccgcccagagggccctgtacagggacgtgatgcaggagatctacgagatggtgatcagcctgggcttcctgctgcccaagcccgacgtgatcatccagctggagaggggcgaggagccctgggtgcccgacctgcagggcagcgccgagagggagatgagcaggggcacctgcgccggcaccagccccaagaaaaagagaaaagtctaagctgccttctgcggggcttgccttctggccatgcccttcttctctcccttgcacctgtacctcttggtctttgaataaagcctgagtaggaaggctagcaaaaaaaaaaaaaaaaaaaaaaaaaaaaaaaaaaaaaaaaaaaaaaaaaaaaaaaaaaaaaaaaaaaaaaaaaaaaaaaa

SEQ ID NO: 3891 - RNA, 5416 nt, synthetic construct
  source 1..5416: mol_type = other RNA
aggaaataagagagaaaagaagagtaagaagaaatataagagccaccatggcccctaagaagaagcgtaaagtgagccgggtgaacggcagcggcagcggcggcggcatgaaccacgaccaggagttcgacccccctaaggtgtaccctcccgtccccgccgagaagagaaagcccatccgggtcctgagcctgttcgatggcatcgccaccggtctgctggtgctgaaggacctgggcatccaggtggataggtacattgcctccgaggtgtgcgaggactccatcaccgtgggaatggtgcgtcatcagggcaagatcatgtacgtgggcgacgtgcggagcgtgacacagaagcatatccaggagtggggccctttcgacctggtgatcggcggcagcccttgcaatgacctgagcatcgtgaacccagcccggaagggcctgtacgagggaaccggcagactgttcttcgagttttacagactgctgcacgacgcccggcctaaggaaggcgacgaccggcccttcttttggctgttcgagaatgtggtggccatgggagtcagcgacaagcgggatattagccggttcctggagagcaaccccgtgatgatcgatgccaaggaagtgagcgccgcccaccgggccagatacttctggggcaatctgcctggcatgaacagacccctggccagcaccgtgaacgacaagctggagctgcaggagtgcctggagcacggccggatcgccaagttcagcaaggtgagaaccatcaccacccgaagcaacagcatcaaacaaggcaaggaccagcactttcctgtgttcatgaacgagaaggaggacatcctgtggtgtaccgagatggagagagtgttcgggttcccagtccactacacagatgtcagcaacatgtctagactggccagacagagactgctgggaagaagctggtccgtccctgtgatcagacacctgttcgcccctctgaaggagtacttcgcctgcgtgagcagcggcaacagcaacgccaacagccggggccccagcttctctagcggcctggtgccactgtccctgagagggagccacatgggccccatggagatctacaaaaccgtgagcgcctggaagcggcagcctgtgcgcgtgctgagcctgtttcggaatatcgataaagtcctgaaaagcctgggattcctggagagcggctctggctccggcggtggcaccctgaagtacgtggaggatgtgacaaacgtggtcagacgggatgtggagaagtggggccccttcgatctggtgtacggcagcacccaacccctgggcagctcttgtgaccggtgccctggctggtacatgtttcagttccaccggatcctgcagtacgccctgccgagacaggagtcccagcggccattcttttggattttcatggacaacttgctgctgaccgaggatgaccaggaaactaccactcggttcctgcagaccgaagccgtgaccctgcaggacgtgagaggccgggactaccagaacgccatgcgggtgtggtccaacatccctggactgaaaagcaagcacgcacctctgacccctaaagaagaggagtacctgcaggcccaggtgcggagcagaagcaagctggacgcccctaaggtggatctgctggtgaagaattgcctcctgcccctgagagagtacttcaagtatttcagccagaatagtctgcccctgggcggcccaagcagcggcgcccctcctcccagcggcggcagcccagccggctccccaacctctaccgaggagggcacctctgagtccgccacccccgagagcggccctggcacctccaccgagcccagcgagggcagcgcacccggcagccctgccggcagccccacctccacagaggagggaaccagcaccgagcccagcgaaggcagcgccccaggcaccagcaccgagcctagtgagggcggctctggcggcggcagcgcccaggagattaaacggatcaacaagatcagaagaagacttgtgaaagacagcaacaccaagaaggccggcaagacaggccccatgaaaaccctgctggttagagtgatgacacccgatctgagagagcggctggaaaacctgagaaagaagcctgaaaatatcccccagcccatcagcaatacatctagagccaacctgaataagctgctgaccgattacaccgaaatgaagaaggcgatcctgcatgtgtactgggaagagttccagaaggaccctgtgggcctgatgagccgggtggcccagcctgccagcaagaagatcgatcagaacaagctgaaacctgagatggacgagaagggcaacctgaccaccgccggctttgcctgctctcagtgtggccagcccctgttcgtgtacaagctggagcaggtgtctgagaagggcaaggcttacaccaactacttcggacggtgcaatgtggccgagcacgaaaagctgatcctgctggcccagctgaagcccgagaaggatagcgacgaagccgtgacatatagcctgggaaagtttgggcagagggccctggatttctacagcattcatgtgaccaaggagtccacccaccccgtgaagcccctggcccagatcgccggaaacagatacgcctccggacctgtgggaaaggccctgagcgacgcatgtatgggcacaatcgcctccttcctgtctaagtaccaggacatcatcatcgaacaccagaaggtggtgaagggcaaccagaagagactggagagcctgcgggagctggccggcaaggaaaacctggaataccctagcgtgaccctgccacctcagcctcacaccaaggagggcgttgatgcctacaacgaagtgatcgcccgggtgcgaatgtgggtgaacctgaacctgtggcagaagctgaagctaagcagagatgatgccaagcctctgctgagactgaagggattcccttcctttcctctggtcgagagacaggccaacgaagtggactggtgggacatggtgtgtaacgtgaagaagctgatcaacgagaaaaaggaggatggcaaggtgttttggcagaatctggctggctacaagagacaggaagccctgagaccatacctgagcagcgaggaagatcggaagaagggaaagaaattcgctcggtaccagctgggcgacctgctgctgcacctggaaaagaagcacggcgaggactggggaaaggtgtacgacgaggcctgggagcggattgacaagaaagtggaaggcctgagcaagcacatcaagctggaagaggaacggagaagcgaggacgcccagagcaaggccgccctgaccgactggctgcgggctaaggccagcttcgtgatcgagggcctgaaggaggccgacaaggacgagttctgcagatgcgagctgaagctgcagaagtggtacggggacctgcggggaaagcccttcgccatcgaagccgagaacagcatcctggacatcagcggcttcagcaagcagtacaactgtgccttcatctggcagaaggacggcgtgaagaagctgaacctgtacctgatcatcaactacttcaagggcggcaagctgcggttcaagaagatcaaacctgaagccttcgaagccaacagattctacaccgtgatcaacaaaaagagcggcgagatcgtgcccatggaggtgaacttcaacttcgacgaccccaacctgatcatcctgcctctggcctttggcaagagacagggcagagaattcatctggaacgacctgctgtccctggaaaccggcagcctgaagctggccaacggaagagtgatcgagaagacactgtacaacagaagaacccggcaggatgagcctgccctgttcgtggccctgaccttcgagcggcgggaggtcctggactcctccaatatcaaaccaatgaacctgatcggcgtggcaagaggcgaaaacatccccgccgtgatcgccctgaccgaccccgagggctgcccactgagccggtttaaggatagcctgggaaacccaacccacatcctgagaatcggcgagagctataaggagaagcagcggaccatccaggccaagaaggaggtggagcagcggagagccggcggctacagccggaagtacgccagcaaagccaagaatctggcagacgatatggtgagaaacaccgctagagatctgctgtactacgccgtgacccaggatgccatgctgatcttcgccaacctgagccggggcttcggccggcagggcaagcggaccttcatggccgagagacagtacacacggatggaggactggctgaccgccaagctggcctacgagggcctgagcaagacctacctgtccaagacactggcccagtacacctccaagacatgcagcaactgtgggtttaccatcaccagcgccgactacgacagggtgctggagaagctgaagaagacagcaacaggctggatgaccacaattaacggcaaggagctgaaggtggagggccagattacctactacaacagatacaagagacagaacgtagtcaaggacctgtccgtcgagctggatagactgagcgaagaatctgtgaacaacgacatctcctcctggacaaagggcagaagcggagaagctctgagcctcctgaagaaaagattctcccatagacccgtgcaggagaagttcgtgtgcctgaactgcggcttcgagacacacgcagccgagcaagccgccctgaacatcgccagatcctggctgttcctgcggagccaggagtacaagaaataccagacaaacaagacaaccggcaacaccgataagagagccttcgtcgagacctggcagtccttttaccggaagaagcttaaggaggtgtggaaacctgccgtgcggtctggcggatctggcggaggctccacaagcgaggagacccagggcgagctgaccagcagctgcggcagcaagaccatggccaacgtgagcctggccttcagagacgtgagcatcgacctgagccaggaggagtgggagtgcctggacgccgtgcagagagacctgtacaaggacgtgatgctggagaactacagcaacctggtgagcctgggctacaccatccccaagcccgacgtgatcaccctgctggagcaggagaaggagccctggaccagccccaagaaaaagagaaaagtctaagctgccttctgcggggcttgccttctggccatgcccttcttctctcccttgcacctgtacctcttggtctttgaataaagcctgagtaggaaggctagcaaaaaaaaaaaaaaaaaaaaaaaaaaaaaaaaaaaaaaaaaaaaaaaaaaaaaaaaaaaaaaaaaaaaaaaaaaaaaaaa

SEQ ID NO: 3892 - RNA, 5419 nt, synthetic construct
  source 1..5419: mol_type = other RNA
aggaaataagagagaaaagaagagtaagaagaaatataagagccaccatggcccctaagaagaagcgtaaagtgagccgggtgaacggcagcggcagcggcggcggcatgaaccacgaccaggagttcgacccccctaaggtgtaccctcccgtccccgccgagaagagaaagcccatccgggtcctgagcctgttcgatggcatcgccaccggtctgctggtgctgaaggacctgggcatccaggtggataggtacattgcctccgaggtgtgcgaggactccatcaccgtgggaatggtgcgtcatcagggcaagatcatgtacgtgggcgacgtgcggagcgtgacacagaagcatatccaggagtggggccctttcgacctggtgatcggcggcagcccttgcaatgacctgagcatcgtgaacccagcccggaagggcctgtacgagggaaccggcagactgttcttcgagttttacagactgctgcacgacgcccggcctaaggaaggcgacgaccggcccttcttttggctgttcgagaatgtggtggccatgggagtcagcgacaagcgggatattagccggttcctggagagcaaccccgtgatgatcgatgccaaggaagtgagcgccgcccaccgggccagatacttctggggcaatctgcctggcatgaacagacccctggccagcaccgtgaacgacaagctggagctgcaggagtgcctggagcacggccggatcgccaagttcagcaaggtgagaaccatcaccacccgaagcaacagcatcaaacaaggcaaggaccagcactttcctgtgttcatgaacgagaaggaggacatcctgtggtgtaccgagatggagagagtgttcgggttcccagtccactacacagatgtcagcaacatgtctagactggccagacagagactgctgggaagaagctggtccgtccctgtgatcagacacctgttcgcccctctgaaggagtacttcgcctgcgtgagcagcggcaacagcaacgccaacagccggggccccagcttctctagcggcctggtgccactgtccctgagagggagccacatgggccccatggagatctacaaaaccgtgagcgcctggaagcggcagcctgtgcgcgtgctgagcctgtttcggaatatcgataaagtcctgaaaagcctgggattcctggagagcggctctggctccggcggtggcaccctgaagtacgtggaggatgtgacaaacgtggtcagacgggatgtggagaagtggggccccttcgatctggtgtacggcagcacccaacccctgggcagctcttgtgaccggtgccctggctggtacatgtttcagttccaccggatcctgcagtacgccctgccgagacaggagtcccagcggccattcttttggattttcatggacaacttgctgctgaccgaggatgaccaggaaactaccactcggttcctgcagaccgaagccgtgaccctgcaggacgtgagaggccgggactaccagaacgccatgcgggtgtggtccaacatccctggactgaaaagcaagcacgcacctctgacccctaaagaagaggagtacctgcaggcccaggtgcggagcagaagcaagctggacgcccctaaggtggatctgctggtgaagaattgcctcctgcccctgagagagtacttcaagtatttcagccagaatagtctgcccctgggcggcccaagcagcggcgcccctcctcccagcggcggcagcccagccggctccccaacctctaccgaggagggcacctctgagtccgccacccccgagagcggccctggcacctccaccgagcccagcgagggcagcgcacccggcagccctgccggcagccccacctccacagaggagggaaccagcaccgagcccagcgaaggcagcgccccaggcaccagcaccgagcctagtgagggcggctctggcggcggcagcgcccaggagattaaacggatcaacaagatcagaagaagacttgtgaaagacagcaacaccaagaaggccggcaagacaggccccatgaaaaccctgctggttagagtgatgacacccgatctgagagagcggctggaaaacctgagaaagaagcctgaaaatatcccccagcccatcagcaatacatctagagccaacctgaataagctgctgaccgattacaccgaaatgaagaaggcgatcctgcatgtgtactgggaagagttccagaaggaccctgtgggcctgatgagccgggtggcccagcctgccagcaagaagatcgatcagaacaagctgaaacctgagatggacgagaagggcaacctgaccaccgccggctttgcctgctctcagtgtggccagcccctgttcgtgtacaagctggagcaggtgtctgagaagggcaaggcttacaccaactacttcggacggtgcaatgtggccgagcacgaaaagctgatcctgctggcccagctgaagcccgagaaggatagcgacgaagccgtgacatatagcctgggaaagtttgggcagagggccctggatttctacagcattcatgtgaccaaggagtccacccaccccgtgaagcccctggcccagatcgccggaaacagatacgcctccggacctgtgggaaaggccctgagcgacgcatgtatgggcacaatcgcctccttcctgtctaagtaccaggacatcatcatcgaacaccagaaggtggtgaagggcaaccagaagagactggagagcctgcgggagctggccggcaaggaaaacctggaataccctagcgtgaccctgccacctcagcctcacaccaaggagggcgttgatgcctacaacgaagtgatcgcccgggtgcgaatgtgggtgaacctgaacctgtggcagaagctgaagctaagcagagatgatgccaagcctctgctgagactgaagggattcccttcctttcctctggtcgagagacaggccaacgaagtggactggtgggacatggtgtgtaacgtgaagaagctgatcaacgagaaaaaggaggatggcaaggtgttttggcagaatctggctggctacaagagacaggaagccctgagaccatacctgagcagcgaggaagatcggaagaagggaaagaaattcgctcggtaccagctgggcgacctgctgctgcacctggaaaagaagcacggcgaggactggggaaaggtgtacgacgaggcctgggagcggattgacaagaaagtggaaggcctgagcaagcacatcaagctggaagaggaacggagaagcgaggacgcccagagcaaggccgccctgaccgactggctgcgggctaaggccagcttcgtgatcgagggcctgaaggaggccgacaaggacgagttctgcagatgcgagctgaagctgcagaagtggtacggggacctgcggggaaagcccttcgccatcgaagccgagaacagcatcctggacatcagcggcttcagcaagcagtacaactgtgccttcatctggcagaaggacggcgtgaagaagctgaacctgtacctgatcatcaactacttcaagggcggcaagctgcggttcaagaagatcaaacctgaagccttcgaagccaacagattctacaccgtgatcaacaaaaagagcggcgagatcgtgcccatggaggtgaacttcaacttcgacgaccccaacctgatcatcctgcctctggcctttggcaagagacagggcagagaattcatctggaacgacctgctgtccctggaaaccggcagcctgaagctggccaacggaagagtgatcgagaagacactgtacaacagaagaacccggcaggatgagcctgccctgttcgtggccctgaccttcgagcggcgggaggtcctggactcctccaatatcaaaccaatgaacctgatcggcgtggcaagaggcgaaaacatccccgccgtgatcgccctgaccgaccccgagggctgcccactgagccggtttaaggatagcctgggaaacccaacccacatcctgagaatcggcgagagctataaggagaagcagcggaccatccaggccaagaaggaggtggagcagcggagagccggcggctacagccggaagtacgccagcaaagccaagaatctggcagacgatatggtgagaaacaccgctagagatctgctgtactacgccgtgacccaggatgccatgctgatcttcgccaacctgagccggggcttcggccggcagggcaagcggaccttcatggccgagagacagtacacacggatggaggactggctgaccgccaagctggcctacgagggcctgagcaagacctacctgtccaagacactggcccagtacacctccaagacatgcagcaactgtgggtttaccatcaccagcgccgactacgacagggtgctggagaagctgaagaagacagcaacaggctggatgaccacaattaacggcaaggagctgaaggtggagggccagattacctactacaacagatacaagagacagaacgtagtcaaggacctgtccgtcgagctggatagactgagcgaagaatctgtgaacaacgacatctcctcctggacaaagggcagaagcggagaagctctgagcctcctgaagaaaagattctcccatagacccgtgcaggagaagttcgtgtgcctgaactgcggcttcgagacacacgcagccgagcaagccgccctgaacatcgccagatcctggctgttcctgcggagccaggagtacaagaaataccagacaaacaagacaaccggcaacaccgataagagagccttcgtcgagacctggcagtccttttaccggaagaagcttaaggaggtgtggaaacctgccgtgcggtctggcggatctggcggaggctccacaagcatgggcccccagggcgccaggaggcaggccttcctggccttcggcgacgtgaccgtggacttcacccagaaggagtggaggctgctgagccccgcccagagggccctgtacagggaggtgaccctggagaactacagccacctggtgagcctgggcatcctgcacagcaagcccgagctgatcaggaggctggagcagggcgaggccccctggggcgaggagaggaggaggaggcccggccccaccagccccaagaaaaagagaaaagtctaagctgccttctgcggggcttgccttctggccatgcccttcttctctcccttgcacctgtacctcttggtctttgaataaagcctgagtaggaaggctagcaaaaaaaaaaaaaaaaaaaaaaaaaaaaaaaaaaaaaaaaaaaaaaaaaaaaaaaaaaaaaaaaaaaaaaaaaaaaaaaa

SEQ ID NO: 3893 - RNA, 5419 nt, synthetic construct
  source 1..5419: mol_type = other RNA
aggaaataagagagaaaagaagagtaagaagaaatataagagccaccatggcccctaagaagaagcgtaaagtgagccgggtgaacggcagcggcagcggcggcggcatgaaccacgaccaggagttcgacccccctaaggtgtaccctcccgtccccgccgagaagagaaagcccatccgggtcctgagcctgttcgatggcatcgccaccggtctgctggtgctgaaggacctgggcatccaggtggataggtacattgcctccgaggtgtgcgaggactccatcaccgtgggaatggtgcgtcatcagggcaagatcatgtacgtgggcgacgtgcggagcgtgacacagaagcatatccaggagtggggccctttcgacctggtgatcggcggcagcccttgcaatgacctgagcatcgtgaacccagcccggaagggcctgtacgagggaaccggcagactgttcttcgagttttacagactgctgcacgacgcccggcctaaggaaggcgacgaccggcccttcttttggctgttcgagaatgtggtggccatgggagtcagcgacaagcgggatattagccggttcctggagagcaaccccgtgatgatcgatgccaaggaagtgagcgccgcccaccgggccagatacttctggggcaatctgcctggcatgaacagacccctggccagcaccgtgaacgacaagctggagctgcaggagtgcctggagcacggccggatcgccaagttcagcaaggtgagaaccatcaccacccgaagcaacagcatcaaacaaggcaaggaccagcactttcctgtgttcatgaacgagaaggaggacatcctgtggtgtaccgagatggagagagtgttcgggttcccagtccactacacagatgtcagcaacatgtctagactggccagacagagactgctgggaagaagctggtccgtccctgtgatcagacacctgttcgcccctctgaaggagtacttcgcctgcgtgagcagcggcaacagcaacgccaacagccggggccccagcttctctagcggcctggtgccactgtccctgagagggagccacatgggccccatggagatctacaaaaccgtgagcgcctggaagcggcagcctgtgcgcgtgctgagcctgtttcggaatatcgataaagtcctgaaaagcctgggattcctggagagcggctctggctccggcggtggcaccctgaagtacgtggaggatgtgacaaacgtggtcagacgggatgtggagaagtggggccccttcgatctggtgtacggcagcacccaacccctgggcagctcttgtgaccggtgccctggctggtacatgtttcagttccaccggatcctgcagtacgccctgccgagacaggagtcccagcggccattcttttggattttcatggacaacttgctgctgaccgaggatgaccaggaaactaccactcggttcctgcagaccgaagccgtgaccctgcaggacgtgagaggccgggactaccagaacgccatgcgggtgtggtccaacatccctggactgaaaagcaagcacgcacctctgacccctaaagaagaggagtacctgcaggcccaggtgcggagcagaagcaagctggacgcccctaaggtggatctgctggtgaagaattgcctcctgcccctgagagagtacttcaagtatttcagccagaatagtctgcccctgggcggcccaagcagcggcgcccctcctcccagcggcggcagcccagccggctccccaacctctaccgaggagggcacctctgagtccgccacccccgagagcggccctggcacctccaccgagcccagcgagggcagcgcacccggcagccctgccggcagccccacctccacagaggagggaaccagcaccgagcccagcgaaggcagcgccccaggcaccagcaccgagcctagtgagggcggctctggcggcggcagcgcccaggagattaaacggatcaacaagatcagaagaagacttgtgaaagacagcaacaccaagaaggccggcaagacaggccccatgaaaaccctgctggttagagtgatgacacccgatctgagagagcggctggaaaacctgagaaagaagcctgaaaatatcccccagcccatcagcaatacatctagagccaacctgaataagctgctgaccgattacaccgaaatgaagaaggcgatcctgcatgtgtactgggaagagttccagaaggaccctgtgggcctgatgagccgggtggcccagcctgccagcaagaagatcgatcagaacaagctgaaacctgagatggacgagaagggcaacctgaccaccgccggctttgcctgctctcagtgtggccagcccctgttcgtgtacaagctggagcaggtgtctgagaagggcaaggcttacaccaactacttcggacggtgcaatgtggccgagcacgaaaagctgatcctgctggcccagctgaagcccgagaaggatagcgacgaagccgtgacatatagcctgggaaagtttgggcagagggccctggatttctacagcattcatgtgaccaaggagtccacccaccccgtgaagcccctggcccagatcgccggaaacagatacgcctccggacctgtgggaaaggccctgagcgacgcatgtatgggcacaatcgcctccttcctgtctaagtaccaggacatcatcatcgaacaccagaaggtggtgaagggcaaccagaagagactggagagcctgcgggagctggccggcaaggaaaacctggaataccctagcgtgaccctgccacctcagcctcacaccaaggagggcgttgatgcctacaacgaagtgatcgcccgggtgcgaatgtgggtgaacctgaacctgtggcagaagctgaagctaagcagagatgatgccaagcctctgctgagactgaagggattcccttcctttcctctggtcgagagacaggccaacgaagtggactggtgggacatggtgtgtaacgtgaagaagctgatcaacgagaaaaaggaggatggcaaggtgttttggcagaatctggctggctacaagagacaggaagccctgagaccatacctgagcagcgaggaagatcggaagaagggaaagaaattcgctcggtaccagctgggcgacctgctgctgcacctggaaaagaagcacggcgaggactggggaaaggtgtacgacgaggcctgggagcggattgacaagaaagtggaaggcctgagcaagcacatcaagctggaagaggaacggagaagcgaggacgcccagagcaaggccgccctgaccgactggctgcgggctaaggccagcttcgtgatcgagggcctgaaggaggccgacaaggacgagttctgcagatgcgagctgaagctgcagaagtggtacggggacctgcggggaaagcccttcgccatcgaagccgagaacagcatcctggacatcagcggcttcagcaagcagtacaactgtgccttcatctggcagaaggacggcgtgaagaagctgaacctgtacctgatcatcaactacttcaagggcggcaagctgcggttcaagaagatcaaacctgaagccttcgaagccaacagattctacaccgtgatcaacaaaaagagcggcgagatcgtgcccatggaggtgaacttcaacttcgacgaccccaacctgatcatcctgcctctggcctttggcaagagacagggcagagaattcatctggaacgacctgctgtccctggaaaccggcagcctgaagctggccaacggaagagtgatcgagaagacactgtacaacagaagaacccggcaggatgagcctgccctgttcgtggccctgaccttcgagcggcgggaggtcctggactcctccaatatcaaaccaatgaacctgatcggcgtggcaagaggcgaaaacatccccgccgtgatcgccctgaccgaccccgagggctgcccactgagccggtttaaggatagcctgggaaacccaacccacatcctgagaatcggcgagagctataaggagaagcagcggaccatccaggccaagaaggaggtggagcagcggagagccggcggctacagccggaagtacgccagcaaagccaagaatctggcagacgatatggtgagaaacaccgctagagatctgctgtactacgccgtgacccaggatgccatgctgatcttcgccaacctgagccggggcttcggccggcagggcaagcggaccttcatggccgagagacagtacacacggatggaggactggctgaccgccaagctggcctacgagggcctgagcaagacctacctgtccaagacactggcccagtacacctccaagacatgcagcaactgtgggtttaccatcaccagcgccgactacgacagggtgctggagaagctgaagaagacagcaacaggctggatgaccacaattaacggcaaggagctgaaggtggagggccagattacctactacaacagatacaagagacagaacgtagtcaaggacctgtccgtcgagctggatagactgagcgaagaatctgtgaacaacgacatctcctcctggacaaagggcagaagcggagaagctctgagcctcctgaagaaaagattctcccatagacccgtgcaggagaagttcgtgtgcctgaactgcggcttcgagacacacgcagccgagcaagccgccctgaacatcgccagatcctggctgttcctgcggagccaggagtacaagaaataccagacaaacaagacaaccggcaacaccgataagagagccttcgtcgagacctggcagtccttttaccggaagaagcttaaggaggtgtggaaacctgccgtgcggtctggcggatctggcggaggctccacaagcttccagggcagcgtgaccttcaccgacgtggccatcgacttcagccaggaggagtggaggtggctgcagcccgcccagagggacctgtacaggtgcgtgatgctggagaactacggccacctggtgagcctgggcctgagcatcagcaagcccgacgtggtgagcctgctggagcagggcaaggagccctggctgggcaagaggaacgtgaacagggacctgttcagcgtgagcgagagcaggaccagccccaagaaaaagagaaaagtctaagctgccttctgcggggcttgccttctggccatgcccttcttctctcccttgcacctgtacctcttggtctttgaataaagcctgagtaggaaggctagcaaaaaaaaaaaaaaaaaaaaaaaaaaaaaaaaaaaaaaaaaaaaaaaaaaaaaaaaaaaaaaaaaaaaaaaaaaaaaaaa

SEQ ID NO: 3894 - RNA, 5419 nt, synthetic construct
  source 1..5419: mol_type = other RNA
aggaaataagagagaaaagaagagtaagaagaaatataagagccaccatggcccctaagaagaagcgtaaagtgagccgggtgaacggcagcggcagcggcggcggcatgaaccacgaccaggagttcgacccccctaaggtgtaccctcccgtccccgccgagaagagaaagcccatccgggtcctgagcctgttcgatggcatcgccaccggtctgctggtgctgaaggacctgggcatccaggtggataggtacattgcctccgaggtgtgcgaggactccatcaccgtgggaatggtgcgtcatcagggcaagatcatgtacgtgggcgacgtgcggagcgtgacacagaagcatatccaggagtggggccctttcgacctggtgatcggcggcagcccttgcaatgacctgagcatcgtgaacccagcccggaagggcctgtacgagggaaccggcagactgttcttcgagttttacagactgctgcacgacgcccggcctaaggaaggcgacgaccggcccttcttttggctgttcgagaatgtggtggccatgggagtcagcgacaagcgggatattagccggttcctggagagcaaccccgtgatgatcgatgccaaggaagtgagcgccgcccaccgggccagatacttctggggcaatctgcctggcatgaacagacccctggccagcaccgtgaacgacaagctggagctgcaggagtgcctggagcacggccggatcgccaagttcagcaaggtgagaaccatcaccacccgaagcaacagcatcaaacaaggcaaggaccagcactttcctgtgttcatgaacgagaaggaggacatcctgtggtgtaccgagatggagagagtgttcgggttcccagtccactacacagatgtcagcaacatgtctagactggccagacagagactgctgggaagaagctggtccgtccctgtgatcagacacctgttcgcccctctgaaggagtacttcgcctgcgtgagcagcggcaacagcaacgccaacagccggggccccagcttctctagcggcctggtgccactgtccctgagagggagccacatgggccccatggagatctacaaaaccgtgagcgcctggaagcggcagcctgtgcgcgtgctgagcctgtttcggaatatcgataaagtcctgaaaagcctgggattcctggagagcggctctggctccggcggtggcaccctgaagtacgtggaggatgtgacaaacgtggtcagacgggatgtggagaagtggggccccttcgatctggtgtacggcagcacccaacccctgggcagctcttgtgaccggtgccctggctggtacatgtttcagttccaccggatcctgcagtacgccctgccgagacaggagtcccagcggccattcttttggattttcatggacaacttgctgctgaccgaggatgaccaggaaactaccactcggttcctgcagaccgaagccgtgaccctgcaggacgtgagaggccgggactaccagaacgccatgcgggtgtggtccaacatccctggactgaaaagcaagcacgcacctctgacccctaaagaagaggagtacctgcaggcccaggtgcggagcagaagcaagctggacgcccctaaggtggatctgctggtgaagaattgcctcctgcccctgagagagtacttcaagtatttcagccagaatagtctgcccctgggcggcccaagcagcggcgcccctcctcccagcggcggcagcccagccggctccccaacctctaccgaggagggcacctctgagtccgccacccccgagagcggccctggcacctccaccgagcccagcgagggcagcgcacccggcagccctgccggcagccccacctccacagaggagggaaccagcaccgagcccagcgaaggcagcgccccaggcaccagcaccgagcctagtgagggcggctctggcggcggcagcgcccaggagattaaacggatcaacaagatcagaagaagacttgtgaaagacagcaacaccaagaaggccggcaagacaggccccatgaaaaccctgctggttagagtgatgacacccgatctgagagagcggctggaaaacctgagaaagaagcctgaaaatatcccccagcccatcagcaatacatctagagccaacctgaataagctgctgaccgattacaccgaaatgaagaaggcgatcctgcatgtgtactgggaagagttccagaaggaccctgtgggcctgatgagccgggtggcccagcctgccagcaagaagatcgatcagaacaagctgaaacctgagatggacgagaagggcaacctgaccaccgccggctttgcctgctctcagtgtggccagcccctgttcgtgtacaagctggagcaggtgtctgagaagggcaaggcttacaccaactacttcggacggtgcaatgtggccgagcacgaaaagctgatcctgctggcccagctgaagcccgagaaggatagcgacgaagccgtgacatatagcctgggaaagtttgggcagagggccctggatttctacagcattcatgtgaccaaggagtccacccaccccgtgaagcccctggcccagatcgccggaaacagatacgcctccggacctgtgggaaaggccctgagcgacgcatgtatgggcacaatcgcctccttcctgtctaagtaccaggacatcatcatcgaacaccagaaggtggtgaagggcaaccagaagagactggagagcctgcgggagctggccggcaaggaaaacctggaataccctagcgtgaccctgccacctcagcctcacaccaaggagggcgttgatgcctacaacgaagtgatcgcccgggtgcgaatgtgggtgaacctgaacctgtggcagaagctgaagctaagcagagatgatgccaagcctctgctgagactgaagggattcccttcctttcctctggtcgagagacaggccaacgaagtggactggtgggacatggtgtgtaacgtgaagaagctgatcaacgagaaaaaggaggatggcaaggtgttttggcagaatctggctggctacaagagacaggaagccctgagaccatacctgagcagcgaggaagatcggaagaagggaaagaaattcgctcggtaccagctgggcgacctgctgctgcacctggaaaagaagcacggcgaggactggggaaaggtgtacgacgaggcctgggagcggattgacaagaaagtggaaggcctgagcaagcacatcaagctggaagaggaacggagaagcgaggacgcccagagcaaggccgccctgaccgactggctgcgggctaaggccagcttcgtgatcgagggcctgaaggaggccgacaaggacgagttctgcagatgcgagctgaagctgcagaagtggtacggggacctgcggggaaagcccttcgccatcgaagccgagaacagcatcctggacatcagcggcttcagcaagcagtacaactgtgccttcatctggcagaaggacggcgtgaagaagctgaacctgtacctgatcatcaactacttcaagggcggcaagctgcggttcaagaagatcaaacctgaagccttcgaagccaacagattctacaccgtgatcaacaaaaagagcggcgagatcgtgcccatggaggtgaacttcaacttcgacgaccccaacctgatcatcctgcctctggcctttggcaagagacagggcagagaattcatctggaacgacctgctgtccctggaaaccggcagcctgaagctggccaacggaagagtgatcgagaagacactgtacaacagaagaacccggcaggatgagcctgccctgttcgtggccctgaccttcgagcggcgggaggtcctggactcctccaatatcaaaccaatgaacctgatcggcgtggcaagaggcgaaaacatccccgccgtgatcgccctgaccgaccccgagggctgcccactgagccggtttaaggatagcctgggaaacccaacccacatcctgagaatcggcgagagctataaggagaagcagcggaccatccaggccaagaaggaggtggagcagcggagagccggcggctacagccggaagtacgccagcaaagccaagaatctggcagacgatatggtgagaaacaccgctagagatctgctgtactacgccgtgacccaggatgccatgctgatcttcgccaacctgagccggggcttcggccggcagggcaagcggaccttcatggccgagagacagtacacacggatggaggactggctgaccgccaagctggcctacgagggcctgagcaagacctacctgtccaagacactggcccagtacacctccaagacatgcagcaactgtgggtttaccatcaccagcgccgactacgacagggtgctggagaagctgaagaagacagcaacaggctggatgaccacaattaacggcaaggagctgaaggtggagggccagattacctactacaacagatacaagagacagaacgtagtcaaggacctgtccgtcgagctggatagactgagcgaagaatctgtgaacaacgacatctcctcctggacaaagggcagaagcggagaagctctgagcctcctgaagaaaagattctcccatagacccgtgcaggagaagttcgtgtgcctgaactgcggcttcgagacacacgcagccgagcaagccgccctgaacatcgccagatcctggctgttcctgcggagccaggagtacaagaaataccagacaaacaagacaaccggcaacaccgataagagagccttcgtcgagacctggcagtccttttaccggaagaagcttaaggaggtgtggaaacctgccgtgcggtctggcggatctggcggaggctccacaagctggaaggagctgctgagcttcgaggacgtggccatgtacttcaccagggaggagtggaacaggctggactgggcccagaaggacctgtacagggacgtgatgctggagaactacaggaacatgatcctgctgggcttccagttccccaagcccgaggtgatctgcctgctggagcagtgggaggagccctggatcctggacctgcccagggccggcaccaggaaggccagcagcagcgcctgcaccagccccaagaaaaagagaaaagtctaagctgccttctgcggggcttgccttctggccatgcccttcttctctcccttgcacctgtacctcttggtctttgaataaagcctgagtaggaaggctagcaaaaaaaaaaaaaaaaaaaaaaaaaaaaaaaaaaaaaaaaaaaaaaaaaaaaaaaaaaaaaaaaaaaaaaaaaaaaaaaa

SEQ ID NO: 3895 - RNA, 5419 nt, synthetic construct
  source 1..5419: mol_type = other RNA
aggaaataagagagaaaagaagagtaagaagaaatataagagccaccatggcccctaagaagaagcgtaaagtgagccgggtgaacggcagcggcagcggcggcggcatgaaccacgaccaggagttcgacccccctaaggtgtaccctcccgtccccgccgagaagagaaagcccatccgggtcctgagcctgttcgatggcatcgccaccggtctgctggtgctgaaggacctgggcatccaggtggataggtacattgcctccgaggtgtgcgaggactccatcaccgtgggaatggtgcgtcatcagggcaagatcatgtacgtgggcgacgtgcggagcgtgacacagaagcatatccaggagtggggccctttcgacctggtgatcggcggcagcccttgcaatgacctgagcatcgtgaacccagcccggaagggcctgtacgagggaaccggcagactgttcttcgagttttacagactgctgcacgacgcccggcctaaggaaggcgacgaccggcccttcttttggctgttcgagaatgtggtggccatgggagtcagcgacaagcgggatattagccggttcctggagagcaaccccgtgatgatcgatgccaaggaagtgagcgccgcccaccgggccagatacttctggggcaatctgcctggcatgaacagacccctggccagcaccgtgaacgacaagctggagctgcaggagtgcctggagcacggccggatcgccaagttcagcaaggtgagaaccatcaccacccgaagcaacagcatcaaacaaggcaaggaccagcactttcctgtgttcatgaacgagaaggaggacatcctgtggtgtaccgagatggagagagtgttcgggttcccagtccactacacagatgtcagcaacatgtctagactggccagacagagactgctgggaagaagctggtccgtccctgtgatcagacacctgttcgcccctctgaaggagtacttcgcctgcgtgagcagcggcaacagcaacgccaacagccggggccccagcttctctagcggcctggtgccactgtccctgagagggagccacatgggccccatggagatctacaaaaccgtgagcgcctggaagcggcagcctgtgcgcgtgctgagcctgtttcggaatatcgataaagtcctgaaaagcctgggattcctggagagcggctctggctccggcggtggcaccctgaagtacgtggaggatgtgacaaacgtggtcagacgggatgtggagaagtggggccccttcgatctggtgtacggcagcacccaacccctgggcagctcttgtgaccggtgccctggctggtacatgtttcagttccaccggatcctgcagtacgccctgccgagacaggagtcccagcggccattcttttggattttcatggacaacttgctgctgaccgaggatgaccaggaaactaccactcggttcctgcagaccgaagccgtgaccctgcaggacgtgagaggccgggactaccagaacgccatgcgggtgtggtccaacatccctggactgaaaagcaagcacgcacctctgacccctaaagaagaggagtacctgcaggcccaggtgcggagcagaagcaagctggacgcccctaaggtggatctgctggtgaagaattgcctcctgcccctgagagagtacttcaagtatttcagccagaatagtctgcccctgggcggcccaagcagcggcgcccctcctcccagcggcggcagcccagccggctccccaacctctaccgaggagggcacctctgagtccgccacccccgagagcggccctggcacctccaccgagcccagcgagggcagcgcacccggcagccctgccggcagccccacctccacagaggagggaaccagcaccgagcccagcgaaggcagcgccccaggcaccagcaccgagcctagtgagggcggctctggcggcggcagcgcccaggagattaaacggatcaacaagatcagaagaagacttgtgaaagacagcaacaccaagaaggccggcaagacaggccccatgaaaaccctgctggttagagtgatgacacccgatctgagagagcggctggaaaacctgagaaagaagcctgaaaatatcccccagcccatcagcaatacatctagagccaacctgaataagctgctgaccgattacaccgaaatgaagaaggcgatcctgcatgtgtactgggaagagttccagaaggaccctgtgggcctgatgagccgggtggcccagcctgccagcaagaagatcgatcagaacaagctgaaacctgagatggacgagaagggcaacctgaccaccgccggctttgcctgctctcagtgtggccagcccctgttcgtgtacaagctggagcaggtgtctgagaagggcaaggcttacaccaactacttcggacggtgcaatgtggccgagcacgaaaagctgatcctgctggcccagctgaagcccgagaaggatagcgacgaagccgtgacatatagcctgggaaagtttgggcagagggccctggatttctacagcattcatgtgaccaaggagtccacccaccccgtgaagcccctggcccagatcgccggaaacagatacgcctccggacctgtgggaaaggccctgagcgacgcatgtatgggcacaatcgcctccttcctgtctaagtaccaggacatcatcatcgaacaccagaaggtggtgaagggcaaccagaagagactggagagcctgcgggagctggccggcaaggaaaacctggaataccctagcgtgaccctgccacctcagcctcacaccaaggagggcgttgatgcctacaacgaagtgatcgcccgggtgcgaatgtgggtgaacctgaacctgtggcagaagctgaagctaagcagagatgatgccaagcctctgctgagactgaagggattcccttcctttcctctggtcgagagacaggccaacgaagtggactggtgggacatggtgtgtaacgtgaagaagctgatcaacgagaaaaaggaggatggcaaggtgttttggcagaatctggctggctacaagagacaggaagccctgagaccatacctgagcagcgaggaagatcggaagaagggaaagaaattcgctcggtaccagctgggcgacctgctgctgcacctggaaaagaagcacggcgaggactggggaaaggtgtacgacgaggcctgggagcggattgacaagaaagtggaaggcctgagcaagcacatcaagctggaagaggaacggagaagcgaggacgcccagagcaaggccgccctgaccgactggctgcgggctaaggccagcttcgtgatcgagggcctgaaggaggccgacaaggacgagttctgcagatgcgagctgaagctgcagaagtggtacggggacctgcggggaaagcccttcgccatcgaagccgagaacagcatcctggacatcagcggcttcagcaagcagtacaactgtgccttcatctggcagaaggacggcgtgaagaagctgaacctgtacctgatcatcaactacttcaagggcggcaagctgcggttcaagaagatcaaacctgaagccttcgaagccaacagattctacaccgtgatcaacaaaaagagcggcgagatcgtgcccatggaggtgaacttcaacttcgacgaccccaacctgatcatcctgcctctggcctttggcaagagacagggcagagaattcatctggaacgacctgctgtccctggaaaccggcagcctgaagctggccaacggaagagtgatcgagaagacactgtacaacagaagaacccggcaggatgagcctgccctgttcgtggccctgaccttcgagcggcgggaggtcctggactcctccaatatcaaaccaatgaacctgatcggcgtggcaagaggcgaaaacatccccgccgtgatcgccctgaccgaccccgagggctgcccactgagccggtttaaggatagcctgggaaacccaacccacatcctgagaatcggcgagagctataaggagaagcagcggaccatccaggccaagaaggaggtggagcagcggagagccggcggctacagccggaagtacgccagcaaagccaagaatctggcagacgatatggtgagaaacaccgctagagatctgctgtactacgccgtgacccaggatgccatgctgatcttcgccaacctgagccggggcttcggccggcagggcaagcggaccttcatggccgagagacagtacacacggatggaggactggctgaccgccaagctggcctacgagggcctgagcaagacctacctgtccaagacactggcccagtacacctccaagacatgcagcaactgtgggtttaccatcaccagcgccgactacgacagggtgctggagaagctgaagaagacagcaacaggctggatgaccacaattaacggcaaggagctgaaggtggagggccagattacctactacaacagatacaagagacagaacgtagtcaaggacctgtccgtcgagctggatagactgagcgaagaatctgtgaacaacgacatctcctcctggacaaagggcagaagcggagaagctctgagcctcctgaagaaaagattctcccatagacccgtgcaggagaagttcgtgtgcctgaactgcggcttcgagacacacgcagccgagcaagccgccctgaacatcgccagatcctggctgttcctgcggagccaggagtacaagaaataccagacaaacaagacaaccggcaacaccgataagagagccttcgtcgagacctggcagtccttttaccggaagaagcttaaggaggtgtggaaacctgccgtgcggtctggcggatctggcggaggctccacaagcagcctgggccccgtgagcttcaaggacgtggccgtgggcttcacccaggaggagtggaggcagctggagcccgcccagaggaggacctacagggaggtgatgctggagaactacagccacctggtggccgtgggctgccacttcatcaagcccgacgtgatcaccaagctggagaggggcgaggagccctggatcgagggcggcttcctgccccagggctgcgccgacgaggtgtggcaggccaccagccccaagaaaaagagaaaagtctaagctgccttctgcggggcttgccttctggccatgcccttcttctctcccttgcacctgtacctcttggtctttgaataaagcctgagtaggaaggctagcaaaaaaaaaaaaaaaaaaaaaaaaaaaaaaaaaaaaaaaaaaaaaaaaaaaaaaaaaaaaaaaaaaaaaaaaaaaaaaaa

SEQ ID NO: 3896 - RNA, 5419 nt, synthetic construct
  source 1..5419: mol_type = other RNA
aggaaataagagagaaaagaagagtaagaagaaatataagagccaccatggcccctaagaagaagcgtaaagtgagccgggtgaacggcagcggcagcggcggcggcatgaaccacgaccaggagttcgacccccctaaggtgtaccctcccgtccccgccgagaagagaaagcccatccgggtcctgagcctgttcgatggcatcgccaccggtctgctggtgctgaaggacctgggcatccaggtggataggtacattgcctccgaggtgtgcgaggactccatcaccgtgggaatggtgcgtcatcagggcaagatcatgtacgtgggcgacgtgcggagcgtgacacagaagcatatccaggagtggggccctttcgacctggtgatcggcggcagcccttgcaatgacctgagcatcgtgaacccagcccggaagggcctgtacgagggaaccggcagactgttcttcgagttttacagactgctgcacgacgcccggcctaaggaaggcgacgaccggcccttcttttggctgttcgagaatgtggtggccatgggagtcagcgacaagcgggatattagccggttcctggagagcaaccccgtgatgatcgatgccaaggaagtgagcgccgcccaccgggccagatacttctggggcaatctgcctggcatgaacagacccctggccagcaccgtgaacgacaagctggagctgcaggagtgcctggagcacggccggatcgccaagttcagcaaggtgagaaccatcaccacccgaagcaacagcatcaaacaaggcaaggaccagcactttcctgtgttcatgaacgagaaggaggacatcctgtggtgtaccgagatggagagagtgttcgggttcccagtccactacacagatgtcagcaacatgtctagactggccagacagagactgctgggaagaagctggtccgtccctgtgatcagacacctgttcgcccctctgaaggagtacttcgcctgcgtgagcagcggcaacagcaacgccaacagccggggccccagcttctctagcggcctggtgccactgtccctgagagggagccacatgggccccatggagatctacaaaaccgtgagcgcctggaagcggcagcctgtgcgcgtgctgagcctgtttcggaatatcgataaagtcctgaaaagcctgggattcctggagagcggctctggctccggcggtggcaccctgaagtacgtggaggatgtgacaaacgtggtcagacgggatgtggagaagtggggccccttcgatctggtgtacggcagcacccaacccctgggcagctcttgtgaccggtgccctggctggtacatgtttcagttccaccggatcctgcagtacgccctgccgagacaggagtcccagcggccattcttttggattttcatggacaacttgctgctgaccgaggatgaccaggaaactaccactcggttcctgcagaccgaagccgtgaccctgcaggacgtgagaggccgggactaccagaacgccatgcgggtgtggtccaacatccctggactgaaaagcaagcacgcacctctgacccctaaagaagaggagtacctgcaggcccaggtgcggagcagaagcaagctggacgcccctaaggtggatctgctggtgaagaattgcctcctgcccctgagagagtacttcaagtatttcagccagaatagtctgcccctgggcggcccaagcagcggcgcccctcctcccagcggcggcagcccagccggctccccaacctctaccgaggagggcacctctgagtccgccacccccgagagcggccctggcacctccaccgagcccagcgagggcagcgcacccggcagccctgccggcagccccacctccacagaggagggaaccagcaccgagcccagcgaaggcagcgccccaggcaccagcaccgagcctagtgagggcggctctggcggcggcagcgcccaggagattaaacggatcaacaagatcagaagaagacttgtgaaagacagcaacaccaagaaggccggcaagacaggccccatgaaaaccctgctggttagagtgatgacacccgatctgagagagcggctggaaaacctgagaaagaagcctgaaaatatcccccagcccatcagcaatacatctagagccaacctgaataagctgctgaccgattacaccgaaatgaagaaggcgatcctgcatgtgtactgggaagagttccagaaggaccctgtgggcctgatgagccgggtggcccagcctgccagcaagaagatcgatcagaacaagctgaaacctgagatggacgagaagggcaacctgaccaccgccggctttgcctgctctcagtgtggccagcccctgttcgtgtacaagctggagcaggtgtctgagaagggcaaggcttacaccaactacttcggacggtgcaatgtggccgagcacgaaaagctgatcctgctggcccagctgaagcccgagaaggatagcgacgaagccgtgacatatagcctgggaaagtttgggcagagggccctggatttctacagcattcatgtgaccaaggagtccacccaccccgtgaagcccctggcccagatcgccggaaacagatacgcctccggacctgtgggaaaggccctgagcgacgcatgtatgggcacaatcgcctccttcctgtctaagtaccaggacatcatcatcgaacaccagaaggtggtgaagggcaaccagaagagactggagagcctgcgggagctggccggcaaggaaaacctggaataccctagcgtgaccctgccacctcagcctcacaccaaggagggcgttgatgcctacaacgaagtgatcgcccgggtgcgaatgtgggtgaacctgaacctgtggcagaagctgaagctaagcagagatgatgccaagcctctgctgagactgaagggattcccttcctttcctctggtcgagagacaggccaacgaagtggactggtgggacatggtgtgtaacgtgaagaagctgatcaacgagaaaaaggaggatggcaaggtgttttggcagaatctggctggctacaagagacaggaagccctgagaccatacctgagcagcgaggaagatcggaagaagggaaagaaattcgctcggtaccagctgggcgacctgctgctgcacctggaaaagaagcacggcgaggactggggaaaggtgtacgacgaggcctgggagcggattgacaagaaagtggaaggcctgagcaagcacatcaagctggaagaggaacggagaagcgaggacgcccagagcaaggccgccctgaccgactggctgcgggctaaggccagcttcgtgatcgagggcctgaaggaggccgacaaggacgagttctgcagatgcgagctgaagctgcagaagtggtacggggacctgcggggaaagcccttcgccatcgaagccgagaacagcatcctggacatcagcggcttcagcaagcagtacaactgtgccttcatctggcagaaggacggcgtgaagaagctgaacctgtacctgatcatcaactacttcaagggcggcaagctgcggttcaagaagatcaaacctgaagccttcgaagccaacagattctacaccgtgatcaacaaaaagagcggcgagatcgtgcccatggaggtgaacttcaacttcgacgaccccaacctgatcatcctgcctctggcctttggcaagagacagggcagagaattcatctggaacgacctgctgtccctggaaaccggcagcctgaagctggccaacggaagagtgatcgagaagacactgtacaacagaagaacccggcaggatgagcctgccctgttcgtggccctgaccttcgagcggcgggaggtcctggactcctccaatatcaaaccaatgaacctgatcggcgtggcaagaggcgaaaacatccccgccgtgatcgccctgaccgaccccgagggctgcccactgagccggtttaaggatagcctgggaaacccaacccacatcctgagaatcggcgagagctataaggagaagcagcggaccatccaggccaagaaggaggtggagcagcggagagccggcggctacagccggaagtacgccagcaaagccaagaatctggcagacgatatggtgagaaacaccgctagagatctgctgtactacgccgtgacccaggatgccatgctgatcttcgccaacctgagccggggcttcggccggcagggcaagcggaccttcatggccgagagacagtacacacggatggaggactggctgaccgccaagctggcctacgagggcctgagcaagacctacctgtccaagacactggcccagtacacctccaagacatgcagcaactgtgggtttaccatcaccagcgccgactacgacagggtgctggagaagctgaagaagacagcaacaggctggatgaccacaattaacggcaaggagctgaaggtggagggccagattacctactacaacagatacaagagacagaacgtagtcaaggacctgtccgtcgagctggatagactgagcgaagaatctgtgaacaacgacatctcctcctggacaaagggcagaagcggagaagctctgagcctcctgaagaaaagattctcccatagacccgtgcaggagaagttcgtgtgcctgaactgcggcttcgagacacacgcagccgagcaagccgccctgaacatcgccagatcctggctgttcctgcggagccaggagtacaagaaataccagacaaacaagacaaccggcaacaccgataagagagccttcgtcgagacctggcagtccttttaccggaagaagcttaaggaggtgtggaaacctgccgtgcggtctggcggatctggcggaggctccacaagcaccctgggcctgctgagcttcaacgacgtgagcctggagttcagctgggaggagtggcagctgctggacagcgcccagaggtacctgtacagggaggtgatcctggagaactacagcaacctgctgagcgtgggctaccacggcaccaagcccgacctgatcttcaggctggagcagggcgaggagccctggatcctgaacgccaagatgagcacccagaactgccccgaggtgtgggaggacaccagccccaagaaaaagagaaaagtctaagctgccttctgcggggcttgccttctggccatgcccttcttctctcccttgcacctgtacctcttggtctttgaataaagcctgagtaggaaggctagcaaaaaaaaaaaaaaaaaaaaaaaaaaaaaaaaaaaaaaaaaaaaaaaaaaaaaaaaaaaaaaaaaaaaaaaaaaaaaaaa

SEQ ID NO: 3897 - RNA, 5419 nt, synthetic construct
  source 1..5419: mol_type = other RNA
aggaaataagagagaaaagaagagtaagaagaaatataagagccaccatggcccctaagaagaagcgtaaagtgagccgggtgaacggcagcggcagcggcggcggcatgaaccacgaccaggagttcgacccccctaaggtgtaccctcccgtccccgccgagaagagaaagcccatccgggtcctgagcctgttcgatggcatcgccaccggtctgctggtgctgaaggacctgggcatccaggtggataggtacattgcctccgaggtgtgcgaggactccatcaccgtgggaatggtgcgtcatcagggcaagatcatgtacgtgggcgacgtgcggagcgtgacacagaagcatatccaggagtggggccctttcgacctggtgatcggcggcagcccttgcaatgacctgagcatcgtgaacccagcccggaagggcctgtacgagggaaccggcagactgttcttcgagttttacagactgctgcacgacgcccggcctaaggaaggcgacgaccggcccttcttttggctgttcgagaatgtggtggccatgggagtcagcgacaagcgggatattagccggttcctggagagcaaccccgtgatgatcgatgccaaggaagtgagcgccgcccaccgggccagatacttctggggcaatctgcctggcatgaacagacccctggccagcaccgtgaacgacaagctggagctgcaggagtgcctggagcacggccggatcgccaagttcagcaaggtgagaaccatcaccacccgaagcaacagcatcaaacaaggcaaggaccagcactttcctgtgttcatgaacgagaaggaggacatcctgtggtgtaccgagatggagagagtgttcgggttcccagtccactacacagatgtcagcaacatgtctagactggccagacagagactgctgggaagaagctggtccgtccctgtgatcagacacctgttcgcccctctgaaggagtacttcgcctgcgtgagcagcggcaacagcaacgccaacagccggggccccagcttctctagcggcctggtgccactgtccctgagagggagccacatgggccccatggagatctacaaaaccgtgagcgcctggaagcggcagcctgtgcgcgtgctgagcctgtttcggaatatcgataaagtcctgaaaagcctgggattcctggagagcggctctggctccggcggtggcaccctgaagtacgtggaggatgtgacaaacgtggtcagacgggatgtggagaagtggggccccttcgatctggtgtacggcagcacccaacccctgggcagctcttgtgaccggtgccctggctggtacatgtttcagttccaccggatcctgcagtacgccctgccgagacaggagtcccagcggccattcttttggattttcatggacaacttgctgctgaccgaggatgaccaggaaactaccactcggttcctgcagaccgaagccgtgaccctgcaggacgtgagaggccgggactaccagaacgccatgcgggtgtggtccaacatccctggactgaaaagcaagcacgcacctctgacccctaaagaagaggagtacctgcaggcccaggtgcggagcagaagcaagctggacgcccctaaggtggatctgctggtgaagaattgcctcctgcccctgagagagtacttcaagtatttcagccagaatagtctgcccctgggcggcccaagcagcggcgcccctcctcccagcggcggcagcccagccggctccccaacctctaccgaggagggcacctctgagtccgccacccccgagagcggccctggcacctccaccgagcccagcgagggcagcgcacccggcagccctgccggcagccccacctccacagaggagggaaccagcaccgagcccagcgaaggcagcgccccaggcaccagcaccgagcctagtgagggcggctctggcggcggcagcgcccaggagattaaacggatcaacaagatcagaagaagacttgtgaaagacagcaacaccaagaaggccggcaagacaggccccatgaaaaccctgctggttagagtgatgacacccgatctgagagagcggctggaaaacctgagaaagaagcctgaaaatatcccccagcccatcagcaatacatctagagccaacctgaataagctgctgaccgattacaccgaaatgaagaaggcgatcctgcatgtgtactgggaagagttccagaaggaccctgtgggcctgatgagccgggtggcccagcctgccagcaagaagatcgatcagaacaagctgaaacctgagatggacgagaagggcaacctgaccaccgccggctttgcctgctctcagtgtggccagcccctgttcgtgtacaagctggagcaggtgtctgagaagggcaaggcttacaccaactacttcggacggtgcaatgtggccgagcacgaaaagctgatcctgctggcccagctgaagcccgagaaggatagcgacgaagccgtgacatatagcctgggaaagtttgggcagagggccctggatttctacagcattcatgtgaccaaggagtccacccaccccgtgaagcccctggcccagatcgccggaaacagatacgcctccggacctgtgggaaaggccctgagcgacgcatgtatgggcacaatcgcctccttcctgtctaagtaccaggacatcatcatcgaacaccagaaggtggtgaagggcaaccagaagagactggagagcctgcgggagctggccggcaaggaaaacctggaataccctagcgtgaccctgccacctcagcctcacaccaaggagggcgttgatgcctacaacgaagtgatcgcccgggtgcgaatgtgggtgaacctgaacctgtggcagaagctgaagctaagcagagatgatgccaagcctctgctgagactgaagggattcccttcctttcctctggtcgagagacaggccaacgaagtggactggtgggacatggtgtgtaacgtgaagaagctgatcaacgagaaaaaggaggatggcaaggtgttttggcagaatctggctggctacaagagacaggaagccctgagaccatacctgagcagcgaggaagatcggaagaagggaaagaaattcgctcggtaccagctgggcgacctgctgctgcacctggaaaagaagcacggcgaggactggggaaaggtgtacgacgaggcctgggagcggattgacaagaaagtggaaggcctgagcaagcacatcaagctggaagaggaacggagaagcgaggacgcccagagcaaggccgccctgaccgactggctgcgggctaaggccagcttcgtgatcgagggcctgaaggaggccgacaaggacgagttctgcagatgcgagctgaagctgcagaagtggtacggggacctgcggggaaagcccttcgccatcgaagccgagaacagcatcctggacatcagcggcttcagcaagcagtacaactgtgccttcatctggcagaaggacggcgtgaagaagctgaacctgtacctgatcatcaactacttcaagggcggcaagctgcggttcaagaagatcaaacctgaagccttcgaagccaacagattctacaccgtgatcaacaaaaagagcggcgagatcgtgcccatggaggtgaacttcaacttcgacgaccccaacctgatcatcctgcctctggcctttggcaagagacagggcagagaattcatctggaacgacctgctgtccctggaaaccggcagcctgaagctggccaacggaagagtgatcgagaagacactgtacaacagaagaacccggcaggatgagcctgccctgttcgtggccctgaccttcgagcggcgggaggtcctggactcctccaatatcaaaccaatgaacctgatcggcgtggcaagaggcgaaaacatccccgccgtgatcgccctgaccgaccccgagggctgcccactgagccggtttaaggatagcctgggaaacccaacccacatcctgagaatcggcgagagctataaggagaagcagcggaccatccaggccaagaaggaggtggagcagcggagagccggcggctacagccggaagtacgccagcaaagccaagaatctggcagacgatatggtgagaaacaccgctagagatctgctgtactacgccgtgacccaggatgccatgctgatcttcgccaacctgagccggggcttcggccggcagggcaagcggaccttcatggccgagagacagtacacacggatggaggactggctgaccgccaagctggcctacgagggcctgagcaagacctacctgtccaagacactggcccagtacacctccaagacatgcagcaactgtgggtttaccatcaccagcgccgactacgacagggtgctggagaagctgaagaagacagcaacaggctggatgaccacaattaacggcaaggagctgaaggtggagggccagattacctactacaacagatacaagagacagaacgtagtcaaggacctgtccgtcgagctggatagactgagcgaagaatctgtgaacaacgacatctcctcctggacaaagggcagaagcggagaagctctgagcctcctgaagaaaagattctcccatagacccgtgcaggagaagttcgtgtgcctgaactgcggcttcgagacacacgcagccgagcaagccgccctgaacatcgccagatcctggctgttcctgcggagccaggagtacaagaaataccagacaaacaagacaaccggcaacaccgataagagagccttcgtcgagacctggcagtccttttaccggaagaagcttaaggaggtgtggaaacctgccgtgcggtctggcggatctggcggaggctccacaagcgcccagggccacgtgaccttcgaggacgtggccgtgtacttcagctgggaggagtggggcctgctggacgaggcccagaggctgctgtacagggacgtgatgctggagaacttcagcctgatggccagcctgggcctggccagcagcatgacccacgagatcacccagctggagtggtggagggagcccttcctgcccccctgcggcgtgatgaccgccgccatgcccagggacggcaggcagaccagccccaagaaaaagagaaaagtctaagctgccttctgcggggcttgccttctggccatgcccttcttctctcccttgcacctgtacctcttggtctttgaataaagcctgagtaggaaggctagcaaaaaaaaaaaaaaaaaaaaaaaaaaaaaaaaaaaaaaaaaaaaaaaaaaaaaaaaaaaaaaaaaaaaaaaaaaaaaaaa

SEQ ID NO: 3898 - RNA, 5419 nt, synthetic construct
  source 1..5419: mol_type = other RNA
aggaaataagagagaaaagaagagtaagaagaaatataagagccaccatggcccctaagaagaagcgtaaagtgagccgggtgaacggcagcggcagcggcggcggcatgaaccacgaccaggagttcgacccccctaaggtgtaccctcccgtccccgccgagaagagaaagcccatccgggtcctgagcctgttcgatggcatcgccaccggtctgctggtgctgaaggacctgggcatccaggtggataggtacattgcctccgaggtgtgcgaggactccatcaccgtgggaatggtgcgtcatcagggcaagatcatgtacgtgggcgacgtgcggagcgtgacacagaagcatatccaggagtggggccctttcgacctggtgatcggcggcagcccttgcaatgacctgagcatcgtgaacccagcccggaagggcctgtacgagggaaccggcagactgttcttcgagttttacagactgctgcacgacgcccggcctaaggaaggcgacgaccggcccttcttttggctgttcgagaatgtggtggccatgggagtcagcgacaagcgggatattagccggttcctggagagcaaccccgtgatgatcgatgccaaggaagtgagcgccgcccaccgggccagatacttctggggcaatctgcctggcatgaacagacccctggccagcaccgtgaacgacaagctggagctgcaggagtgcctggagcacggccggatcgccaagttcagcaaggtgagaaccatcaccacccgaagcaacagcatcaaacaaggcaaggaccagcactttcctgtgttcatgaacgagaaggaggacatcctgtggtgtaccgagatggagagagtgttcgggttcccagtccactacacagatgtcagcaacatgtctagactggccagacagagactgctgggaagaagctggtccgtccctgtgatcagacacctgttcgcccctctgaaggagtacttcgcctgcgtgagcagcggcaacagcaacgccaacagccggggccccagcttctctagcggcctggtgccactgtccctgagagggagccacatgggccccatggagatctacaaaaccgtgagcgcctggaagcggcagcctgtgcgcgtgctgagcctgtttcggaatatcgataaagtcctgaaaagcctgggattcctggagagcggctctggctccggcggtggcaccctgaagtacgtggaggatgtgacaaacgtggtcagacgggatgtggagaagtggggccccttcgatctggtgtacggcagcacccaacccctgggcagctcttgtgaccggtgccctggctggtacatgtttcagttccaccggatcctgcagtacgccctgccgagacaggagtcccagcggccattcttttggattttcatggacaacttgctgctgaccgaggatgaccaggaaactaccactcggttcctgcagaccgaagccgtgaccctgcaggacgtgagaggccgggactaccagaacgccatgcgggtgtggtccaacatccctggactgaaaagcaagcacgcacctctgacccctaaagaagaggagtacctgcaggcccaggtgcggagcagaagcaagctggacgcccctaaggtggatctgctggtgaagaattgcctcctgcccctgagagagtacttcaagtatttcagccagaatagtctgcccctgggcggcccaagcagcggcgcccctcctcccagcggcggcagcccagccggctccccaacctctaccgaggagggcacctctgagtccgccacccccgagagcggccctggcacctccaccgagcccagcgagggcagcgcacccggcagccctgccggcagccccacctccacagaggagggaaccagcaccgagcccagcgaaggcagcgccccaggcaccagcaccgagcctagtgagggcggctctggcggcggcagcgcccaggagattaaacggatcaacaagatcagaagaagacttgtgaaagacagcaacaccaagaaggccggcaagacaggccccatgaaaaccctgctggttagagtgatgacacccgatctgagagagcggctggaaaacctgagaaagaagcctgaaaatatcccccagcccatcagcaatacatctagagccaacctgaataagctgctgaccgattacaccgaaatgaagaaggcgatcctgcatgtgtactgggaagagttccagaaggaccctgtgggcctgatgagccgggtggcccagcctgccagcaagaagatcgatcagaacaagctgaaacctgagatggacgagaagggcaacctgaccaccgccggctttgcctgctctcagtgtggccagcccctgttcgtgtacaagctggagcaggtgtctgagaagggcaaggcttacaccaactacttcggacggtgcaatgtggccgagcacgaaaagctgatcctgctggcccagctgaagcccgagaaggatagcgacgaagccgtgacatatagcctgggaaagtttgggcagagggccctggatttctacagcattcatgtgaccaaggagtccacccaccccgtgaagcccctggcccagatcgccggaaacagatacgcctccggacctgtgggaaaggccctgagcgacgcatgtatgggcacaatcgcctccttcctgtctaagtaccaggacatcatcatcgaacaccagaaggtggtgaagggcaaccagaagagactggagagcctgcgggagctggccggcaaggaaaacctggaataccctagcgtgaccctgccacctcagcctcacaccaaggagggcgttgatgcctacaacgaagtgatcgcccgggtgcgaatgtgggtgaacctgaacctgtggcagaagctgaagctaagcagagatgatgccaagcctctgctgagactgaagggattcccttcctttcctctggtcgagagacaggccaacgaagtggactggtgggacatggtgtgtaacgtgaagaagctgatcaacgagaaaaaggaggatggcaaggtgttttggcagaatctggctggctacaagagacaggaagccctgagaccatacctgagcagcgaggaagatcggaagaagggaaagaaattcgctcggtaccagctgggcgacctgctgctgcacctggaaaagaagcacggcgaggactggggaaaggtgtacgacgaggcctgggagcggattgacaagaaagtggaaggcctgagcaagcacatcaagctggaagaggaacggagaagcgaggacgcccagagcaaggccgccctgaccgactggctgcgggctaaggccagcttcgtgatcgagggcctgaaggaggccgacaaggacgagttctgcagatgcgagctgaagctgcagaagtggtacggggacctgcggggaaagcccttcgccatcgaagccgagaacagcatcctggacatcagcggcttcagcaagcagtacaactgtgccttcatctggcagaaggacggcgtgaagaagctgaacctgtacctgatcatcaactacttcaagggcggcaagctgcggttcaagaagatcaaacctgaagccttcgaagccaacagattctacaccgtgatcaacaaaaagagcggcgagatcgtgcccatggaggtgaacttcaacttcgacgaccccaacctgatcatcctgcctctggcctttggcaagagacagggcagagaattcatctggaacgacctgctgtccctggaaaccggcagcctgaagctggccaacggaagagtgatcgagaagacactgtacaacagaagaacccggcaggatgagcctgccctgttcgtggccctgaccttcgagcggcgggaggtcctggactcctccaatatcaaaccaatgaacctgatcggcgtggcaagaggcgaaaacatccccgccgtgatcgccctgaccgaccccgagggctgcccactgagccggtttaaggatagcctgggaaacccaacccacatcctgagaatcggcgagagctataaggagaagcagcggaccatccaggccaagaaggaggtggagcagcggagagccggcggctacagccggaagtacgccagcaaagccaagaatctggcagacgatatggtgagaaacaccgctagagatctgctgtactacgccgtgacccaggatgccatgctgatcttcgccaacctgagccggggcttcggccggcagggcaagcggaccttcatggccgagagacagtacacacggatggaggactggctgaccgccaagctggcctacgagggcctgagcaagacctacctgtccaagacactggcccagtacacctccaagacatgcagcaactgtgggtttaccatcaccagcgccgactacgacagggtgctggagaagctgaagaagacagcaacaggctggatgaccacaattaacggcaaggagctgaaggtggagggccagattacctactacaacagatacaagagacagaacgtagtcaaggacctgtccgtcgagctggatagactgagcgaagaatctgtgaacaacgacatctcctcctggacaaagggcagaagcggagaagctctgagcctcctgaagaaaagattctcccatagacccgtgcaggagaagttcgtgtgcctgaactgcggcttcgagacacacgcagccgagcaagccgccctgaacatcgccagatcctggctgttcctgcggagccaggagtacaagaaataccagacaaacaagacaaccggcaacaccgataagagagccttcgtcgagacctggcagtccttttaccggaagaagcttaaggaggtgtggaaacctgccgtgcggtctggcggatctggcggaggctccacaagcatggcccccggcctgctgaccaccagggaggaggccctgatggccttcagggacgtggccgtggccttcacccagaaggagtggaagctgctgagcagcgcccagaggaccctgtacagggaggtgatgctggagaactacagccacctggtgagcctgggcatcgccttcagcaagcccaagctgatcgagcagctggagcagggcaacgagccctggagggaggagaacgagcacctgctgaccagccccaagaaaaagagaaaagtctaagctgccttctgcggggcttgccttctggccatgcccttcttctctcccttgcacctgtacctcttggtctttgaataaagcctgagtaggaaggctagcaaaaaaaaaaaaaaaaaaaaaaaaaaaaaaaaaaaaaaaaaaaaaaaaaaaaaaaaaaaaaaaaaaaaaaaaaaaaaaaa

SEQ ID NO: 3899 - RNA, 5419 nt, synthetic construct
  source 1..5419: mol_type = other RNA
aggaaataagagagaaaagaagagtaagaagaaatataagagccaccatggcccctaagaagaagcgtaaagtgagccgggtgaacggcagcggcagcggcggcggcatgaaccacgaccaggagttcgacccccctaaggtgtaccctcccgtccccgccgagaagagaaagcccatccgggtcctgagcctgttcgatggcatcgccaccggtctgctggtgctgaaggacctgggcatccaggtggataggtacattgcctccgaggtgtgcgaggactccatcaccgtgggaatggtgcgtcatcagggcaagatcatgtacgtgggcgacgtgcggagcgtgacacagaagcatatccaggagtggggccctttcgacctggtgatcggcggcagcccttgcaatgacctgagcatcgtgaacccagcccggaagggcctgtacgagggaaccggcagactgttcttcgagttttacagactgctgcacgacgcccggcctaaggaaggcgacgaccggcccttcttttggctgttcgagaatgtggtggccatgggagtcagcgacaagcgggatattagccggttcctggagagcaaccccgtgatgatcgatgccaaggaagtgagcgccgcccaccgggccagatacttctggggcaatctgcctggcatgaacagacccctggccagcaccgtgaacgacaagctggagctgcaggagtgcctggagcacggccggatcgccaagttcagcaaggtgagaaccatcaccacccgaagcaacagcatcaaacaaggcaaggaccagcactttcctgtgttcatgaacgagaaggaggacatcctgtggtgtaccgagatggagagagtgttcgggttcccagtccactacacagatgtcagcaacatgtctagactggccagacagagactgctgggaagaagctggtccgtccctgtgatcagacacctgttcgcccctctgaaggagtacttcgcctgcgtgagcagcggcaacagcaacgccaacagccggggccccagcttctctagcggcctggtgccactgtccctgagagggagccacatgggccccatggagatctacaaaaccgtgagcgcctggaagcggcagcctgtgcgcgtgctgagcctgtttcggaatatcgataaagtcctgaaaagcctgggattcctggagagcggctctggctccggcggtggcaccctgaagtacgtggaggatgtgacaaacgtggtcagacgggatgtggagaagtggggccccttcgatctggtgtacggcagcacccaacccctgggcagctcttgtgaccggtgccctggctggtacatgtttcagttccaccggatcctgcagtacgccctgccgagacaggagtcccagcggccattcttttggattttcatggacaacttgctgctgaccgaggatgaccaggaaactaccactcggttcctgcagaccgaagccgtgaccctgcaggacgtgagaggccgggactaccagaacgccatgcgggtgtggtccaacatccctggactgaaaagcaagcacgcacctctgacccctaaagaagaggagtacctgcaggcccaggtgcggagcagaagcaagctggacgcccctaaggtggatctgctggtgaagaattgcctcctgcccctgagagagtacttcaagtatttcagccagaatagtctgcccctgggcggcccaagcagcggcgcccctcctcccagcggcggcagcccagccggctccccaacctctaccgaggagggcacctctgagtccgccacccccgagagcggccctggcacctccaccgagcccagcgagggcagcgcacccggcagccctgccggcagccccacctccacagaggagggaaccagcaccgagcccagcgaaggcagcgccccaggcaccagcaccgagcctagtgagggcggctctggcggcggcagcgcccaggagattaaacggatcaacaagatcagaagaagacttgtgaaagacagcaacaccaagaaggccggcaagacaggccccatgaaaaccctgctggttagagtgatgacacccgatctgagagagcggctggaaaacctgagaaagaagcctgaaaatatcccccagcccatcagcaatacatctagagccaacctgaataagctgctgaccgattacaccgaaatgaagaaggcgatcctgcatgtgtactgggaagagttccagaaggaccctgtgggcctgatgagccgggtggcccagcctgccagcaagaagatcgatcagaacaagctgaaacctgagatggacgagaagggcaacctgaccaccgccggctttgcctgctctcagtgtggccagcccctgttcgtgtacaagctggagcaggtgtctgagaagggcaaggcttacaccaactacttcggacggtgcaatgtggccgagcacgaaaagctgatcctgctggcccagctgaagcccgagaaggatagcgacgaagccgtgacatatagcctgggaaagtttgggcagagggccctggatttctacagcattcatgtgaccaaggagtccacccaccccgtgaagcccctggcccagatcgccggaaacagatacgcctccggacctgtgggaaaggccctgagcgacgcatgtatgggcacaatcgcctccttcctgtctaagtaccaggacatcatcatcgaacaccagaaggtggtgaagggcaaccagaagagactggagagcctgcgggagctggccggcaaggaaaacctggaataccctagcgtgaccctgccacctcagcctcacaccaaggagggcgttgatgcctacaacgaagtgatcgcccgggtgcgaatgtgggtgaacctgaacctgtggcagaagctgaagctaagcagagatgatgccaagcctctgctgagactgaagggattcccttcctttcctctggtcgagagacaggccaacgaagtggactggtgggacatggtgtgtaacgtgaagaagctgatcaacgagaaaaaggaggatggcaaggtgttttggcagaatctggctggctacaagagacaggaagccctgagaccatacctgagcagcgaggaagatcggaagaagggaaagaaattcgctcggtaccagctgggcgacctgctgctgcacctggaaaagaagcacggcgaggactggggaaaggtgtacgacgaggcctgggagcggattgacaagaaagtggaaggcctgagcaagcacatcaagctggaagaggaacggagaagcgaggacgcccagagcaaggccgccctgaccgactggctgcgggctaaggccagcttcgtgatcgagggcctgaaggaggccgacaaggacgagttctgcagatgcgagctgaagctgcagaagtggtacggggacctgcggggaaagcccttcgccatcgaagccgagaacagcatcctggacatcagcggcttcagcaagcagtacaactgtgccttcatctggcagaaggacggcgtgaagaagctgaacctgtacctgatcatcaactacttcaagggcggcaagctgcggttcaagaagatcaaacctgaagccttcgaagccaacagattctacaccgtgatcaacaaaaagagcggcgagatcgtgcccatggaggtgaacttcaacttcgacgaccccaacctgatcatcctgcctctggcctttggcaagagacagggcagagaattcatctggaacgacctgctgtccctggaaaccggcagcctgaagctggccaacggaagagtgatcgagaagacactgtacaacagaagaacccggcaggatgagcctgccctgttcgtggccctgaccttcgagcggcgggaggtcctggactcctccaatatcaaaccaatgaacctgatcggcgtggcaagaggcgaaaacatccccgccgtgatcgccctgaccgaccccgagggctgcccactgagccggtttaaggatagcctgggaaacccaacccacatcctgagaatcggcgagagctataaggagaagcagcggaccatccaggccaagaaggaggtggagcagcggagagccggcggctacagccggaagtacgccagcaaagccaagaatctggcagacgatatggtgagaaacaccgctagagatctgctgtactacgccgtgacccaggatgccatgctgatcttcgccaacctgagccggggcttcggccggcagggcaagcggaccttcatggccgagagacagtacacacggatggaggactggctgaccgccaagctggcctacgagggcctgagcaagacctacctgtccaagacactggcccagtacacctccaagacatgcagcaactgtgggtttaccatcaccagcgccgactacgacagggtgctggagaagctgaagaagacagcaacaggctggatgaccacaattaacggcaaggagctgaaggtggagggccagattacctactacaacagatacaagagacagaacgtagtcaaggacctgtccgtcgagctggatagactgagcgaagaatctgtgaacaacgacatctcctcctggacaaagggcagaagcggagaagctctgagcctcctgaagaaaagattctcccatagacccgtgcaggagaagttcgtgtgcctgaactgcggcttcgagacacacgcagccgagcaagccgccctgaacatcgccagatcctggctgttcctgcggagccaggagtacaagaaataccagacaaacaagacaaccggcaacaccgataagagagccttcgtcgagacctggcagtccttttaccggaagaagcttaaggaggtgtggaaacctgccgtgcggtctggcggatctggcggaggctccacaagcaagccctgggccgtgaacttcgccgacgtggccgtgtacttcagccccgaggagtggaggtacctgaggcccgcccagagggccctgtacagggaggtgatgagggagacctacggcctgctggcctacctggacgtgggctgcgccaagcccgccctgatctgctgggtggaggaggagagcgaggtgtggggcccctgcgcccaggaccccgaggtggccatgtgcaggaccgaggtgcacaccagccccaagaaaaagagaaaagtctaagctgccttctgcggggcttgccttctggccatgcccttcttctctcccttgcacctgtacctcttggtctttgaataaagcctgagtaggaaggctagcaaaaaaaaaaaaaaaaaaaaaaaaaaaaaaaaaaaaaaaaaaaaaaaaaaaaaaaaaaaaaaaaaaaaaaaaaaaaaaaa

SEQ ID NO: 3900 - RNA, 5419 nt, synthetic construct
  source 1..5419: mol_type = other RNA
aggaaataagagagaaaagaagagtaagaagaaatataagagccaccatggcccctaagaagaagcgtaaagtgagccgggtgaacggcagcggcagcggcggcggcatgaaccacgaccaggagttcgacccccctaaggtgtaccctcccgtccccgccgagaagagaaagcccatccgggtcctgagcctgttcgatggcatcgccaccggtctgctggtgctgaaggacctgggcatccaggtggataggtacattgcctccgaggtgtgcgaggactccatcaccgtgggaatggtgcgtcatcagggcaagatcatgtacgtgggcgacgtgcggagcgtgacacagaagcatatccaggagtggggccctttcgacctggtgatcggcggcagcccttgcaatgacctgagcatcgtgaacccagcccggaagggcctgtacgagggaaccggcagactgttcttcgagttttacagactgctgcacgacgcccggcctaaggaaggcgacgaccggcccttcttttggctgttcgagaatgtggtggccatgggagtcagcgacaagcgggatattagccggttcctggagagcaaccccgtgatgatcgatgccaaggaagtgagcgccgcccaccgggccagatacttctggggcaatctgcctggcatgaacagacccctggccagcaccgtgaacgacaagctggagctgcaggagtgcctggagcacggccggatcgccaagttcagcaaggtgagaaccatcaccacccgaagcaacagcatcaaacaaggcaaggaccagcactttcctgtgttcatgaacgagaaggaggacatcctgtggtgtaccgagatggagagagtgttcgggttcccagtccactacacagatgtcagcaacatgtctagactggccagacagagactgctgggaagaagctggtccgtccctgtgatcagacacctgttcgcccctctgaaggagtacttcgcctgcgtgagcagcggcaacagcaacgccaacagccggggccccagcttctctagcggcctggtgccactgtccctgagagggagccacatgggccccatggagatctacaaaaccgtgagcgcctggaagcggcagcctgtgcgcgtgctgagcctgtttcggaatatcgataaagtcctgaaaagcctgggattcctggagagcggctctggctccggcggtggcaccctgaagtacgtggaggatgtgacaaacgtggtcagacgggatgtggagaagtggggccccttcgatctggtgtacggcagcacccaacccctgggcagctcttgtgaccggtgccctggctggtacatgtttcagttccaccggatcctgcagtacgccctgccgagacaggagtcccagcggccattcttttggattttcatggacaacttgctgctgaccgaggatgaccaggaaactaccactcggttcctgcagaccgaagccgtgaccctgcaggacgtgagaggccgggactaccagaacgccatgcgggtgtggtccaacatccctggactgaaaagcaagcacgcacctctgacccctaaagaagaggagtacctgcaggcccaggtgcggagcagaagcaagctggacgcccctaaggtggatctgctggtgaagaattgcctcctgcccctgagagagtacttcaagtatttcagccagaatagtctgcccctgggcggcccaagcagcggcgcccctcctcccagcggcggcagcccagccggctccccaacctctaccgaggagggcacctctgagtccgccacccccgagagcggccctggcacctccaccgagcccagcgagggcagcgcacccggcagccctgccggcagccccacctccacagaggagggaaccagcaccgagcccagcgaaggcagcgccccaggcaccagcaccgagcctagtgagggcggctctggcggcggcagcgcccaggagattaaacggatcaacaagatcagaagaagacttgtgaaagacagcaacaccaagaaggccggcaagacaggccccatgaaaaccctgctggttagagtgatgacacccgatctgagagagcggctggaaaacctgagaaagaagcctgaaaatatcccccagcccatcagcaatacatctagagccaacctgaataagctgctgaccgattacaccgaaatgaagaaggcgatcctgcatgtgtactgggaagagttccagaaggaccctgtgggcctgatgagccgggtggcccagcctgccagcaagaagatcgatcagaacaagctgaaacctgagatggacgagaagggcaacctgaccaccgccggctttgcctgctctcagtgtggccagcccctgttcgtgtacaagctggagcaggtgtctgagaagggcaaggcttacaccaactacttcggacggtgcaatgtggccgagcacgaaaagctgatcctgctggcccagctgaagcccgagaaggatagcgacgaagccgtgacatatagcctgggaaagtttgggcagagggccctggatttctacagcattcatgtgaccaaggagtccacccaccccgtgaagcccctggcccagatcgccggaaacagatacgcctccggacctgtgggaaaggccctgagcgacgcatgtatgggcacaatcgcctccttcctgtctaagtaccaggacatcatcatcgaacaccagaaggtggtgaagggcaaccagaagagactggagagcctgcgggagctggccggcaaggaaaacctggaataccctagcgtgaccctgccacctcagcctcacaccaaggagggcgttgatgcctacaacgaagtgatcgcccgggtgcgaatgtgggtgaacctgaacctgtggcagaagctgaagctaagcagagatgatgccaagcctctgctgagactgaagggattcccttcctttcctctggtcgagagacaggccaacgaagtggactggtgggacatggtgtgtaacgtgaagaagctgatcaacgagaaaaaggaggatggcaaggtgttttggcagaatctggctggctacaagagacaggaagccctgagaccatacctgagcagcgaggaagatcggaagaagggaaagaaattcgctcggtaccagctgggcgacctgctgctgcacctggaaaagaagcacggcgaggactggggaaaggtgtacgacgaggcctgggagcggattgacaagaaagtggaaggcctgagcaagcacatcaagctggaagaggaacggagaagcgaggacgcccagagcaaggccgccctgaccgactggctgcgggctaaggccagcttcgtgatcgagggcctgaaggaggccgacaaggacgagttctgcagatgcgagctgaagctgcagaagtggtacggggacctgcggggaaagcccttcgccatcgaagccgagaacagcatcctggacatcagcggcttcagcaagcagtacaactgtgccttcatctggcagaaggacggcgtgaagaagctgaacctgtacctgatcatcaactacttcaagggcggcaagctgcggttcaagaagatcaaacctgaagccttcgaagccaacagattctacaccgtgatcaacaaaaagagcggcgagatcgtgcccatggaggtgaacttcaacttcgacgaccccaacctgatcatcctgcctctggcctttggcaagagacagggcagagaattcatctggaacgacctgctgtccctggaaaccggcagcctgaagctggccaacggaagagtgatcgagaagacactgtacaacagaagaacccggcaggatgagcctgccctgttcgtggccctgaccttcgagcggcgggaggtcctggactcctccaatatcaaaccaatgaacctgatcggcgtggcaagaggcgaaaacatccccgccgtgatcgccctgaccgaccccgagggctgcccactgagccggtttaaggatagcctgggaaacccaacccacatcctgagaatcggcgagagctataaggagaagcagcggaccatccaggccaagaaggaggtggagcagcggagagccggcggctacagccggaagtacgccagcaaagccaagaatctggcagacgatatggtgagaaacaccgctagagatctgctgtactacgccgtgacccaggatgccatgctgatcttcgccaacctgagccggggcttcggccggcagggcaagcggaccttcatggccgagagacagtacacacggatggaggactggctgaccgccaagctggcctacgagggcctgagcaagacctacctgtccaagacactggcccagtacacctccaagacatgcagcaactgtgggtttaccatcaccagcgccgactacgacagggtgctggagaagctgaagaagacagcaacaggctggatgaccacaattaacggcaaggagctgaaggtggagggccagattacctactacaacagatacaagagacagaacgtagtcaaggacctgtccgtcgagctggatagactgagcgaagaatctgtgaacaacgacatctcctcctggacaaagggcagaagcggagaagctctgagcctcctgaagaaaagattctcccatagacccgtgcaggagaagttcgtgtgcctgaactgcggcttcgagacacacgcagccgagcaagccgccctgaacatcgccagatcctggctgttcctgcggagccaggagtacaagaaataccagacaaacaagacaaccggcaacaccgataagagagccttcgtcgagacctggcagtccttttaccggaagaagcttaaggaggtgtggaaacctgccgtgcggtctggcggatctggcggaggctccacaagcagccagatccccctgaccttccaggacgtggccgtggacttcacctgggaggagtggggcctgctggagcccagccagaaggacatgtactgggacgtgatgctggagaactacgagaacttcgtgagcctgggcggcatccccgtgagcttccccgacgtgatcagccagatggagaggatcgaggccccctggatgaccgagaggggcgtgctggtgagcgccttcctggacagccccaacaccagccccaagaaaaagagaaaagtctaagctgccttctgcggggcttgccttctggccatgcccttcttctctcccttgcacctgtacctcttggtctttgaataaagcctgagtaggaaggctagcaaaaaaaaaaaaaaaaaaaaaaaaaaaaaaaaaaaaaaaaaaaaaaaaaaaaaaaaaaaaaaaaaaaaaaaaaaaaaaaa

SEQ ID NO: 3901 - RNA, 5419 nt, synthetic construct
  source 1..5419: mol_type = other RNA
aggaaataagagagaaaagaagagtaagaagaaatataagagccaccatggcccctaagaagaagcgtaaagtgagccgggtgaacggcagcggcagcggcggcggcatgaaccacgaccaggagttcgacccccctaaggtgtaccctcccgtccccgccgagaagagaaagcccatccgggtcctgagcctgttcgatggcatcgccaccggtctgctggtgctgaaggacctgggcatccaggtggataggtacattgcctccgaggtgtgcgaggactccatcaccgtgggaatggtgcgtcatcagggcaagatcatgtacgtgggcgacgtgcggagcgtgacacagaagcatatccaggagtggggccctttcgacctggtgatcggcggcagcccttgcaatgacctgagcatcgtgaacccagcccggaagggcctgtacgagggaaccggcagactgttcttcgagttttacagactgctgcacgacgcccggcctaaggaaggcgacgaccggcccttcttttggctgttcgagaatgtggtggccatgggagtcagcgacaagcgggatattagccggttcctggagagcaaccccgtgatgatcgatgccaaggaagtgagcgccgcccaccgggccagatacttctggggcaatctgcctggcatgaacagacccctggccagcaccgtgaacgacaagctggagctgcaggagtgcctggagcacggccggatcgccaagttcagcaaggtgagaaccatcaccacccgaagcaacagcatcaaacaaggcaaggaccagcactttcctgtgttcatgaacgagaaggaggacatcctgtggtgtaccgagatggagagagtgttcgggttcccagtccactacacagatgtcagcaacatgtctagactggccagacagagactgctgggaagaagctggtccgtccctgtgatcagacacctgttcgcccctctgaaggagtacttcgcctgcgtgagcagcggcaacagcaacgccaacagccggggccccagcttctctagcggcctggtgccactgtccctgagagggagccacatgggccccatggagatctacaaaaccgtgagcgcctggaagcggcagcctgtgcgcgtgctgagcctgtttcggaatatcgataaagtcctgaaaagcctgggattcctggagagcggctctggctccggcggtggcaccctgaagtacgtggaggatgtgacaaacgtggtcagacgggatgtggagaagtggggccccttcgatctggtgtacggcagcacccaacccctgggcagctcttgtgaccggtgccctggctggtacatgtttcagttccaccggatcctgcagtacgccctgccgagacaggagtcccagcggccattcttttggattttcatggacaacttgctgctgaccgaggatgaccaggaaactaccactcggttcctgcagaccgaagccgtgaccctgcaggacgtgagaggccgggactaccagaacgccatgcgggtgtggtccaacatccctggactgaaaagcaagcacgcacctctgacccctaaagaagaggagtacctgcaggcccaggtgcggagcagaagcaagctggacgcccctaaggtggatctgctggtgaagaattgcctcctgcccctgagagagtacttcaagtatttcagccagaatagtctgcccctgggcggcccaagcagcggcgcccctcctcccagcggcggcagcccagccggctccccaacctctaccgaggagggcacctctgagtccgccacccccgagagcggccctggcacctccaccgagcccagcgagggcagcgcacccggcagccctgccggcagccccacctccacagaggagggaaccagcaccgagcccagcgaaggcagcgccccaggcaccagcaccgagcctagtgagggcggctctggcggcggcagcgcccaggagattaaacggatcaacaagatcagaagaagacttgtgaaagacagcaacaccaagaaggccggcaagacaggccccatgaaaaccctgctggttagagtgatgacacccgatctgagagagcggctggaaaacctgagaaagaagcctgaaaatatcccccagcccatcagcaatacatctagagccaacctgaataagctgctgaccgattacaccgaaatgaagaaggcgatcctgcatgtgtactgggaagagttccagaaggaccctgtgggcctgatgagccgggtggcccagcctgccagcaagaagatcgatcagaacaagctgaaacctgagatggacgagaagggcaacctgaccaccgccggctttgcctgctctcagtgtggccagcccctgttcgtgtacaagctggagcaggtgtctgagaagggcaaggcttacaccaactacttcggacggtgcaatgtggccgagcacgaaaagctgatcctgctggcccagctgaagcccgagaaggatagcgacgaagccgtgacatatagcctgggaaagtttgggcagagggccctggatttctacagcattcatgtgaccaaggagtccacccaccccgtgaagcccctggcccagatcgccggaaacagatacgcctccggacctgtgggaaaggccctgagcgacgcatgtatgggcacaatcgcctccttcctgtctaagtaccaggacatcatcatcgaacaccagaaggtggtgaagggcaaccagaagagactggagagcctgcgggagctggccggcaaggaaaacctggaataccctagcgtgaccctgccacctcagcctcacaccaaggagggcgttgatgcctacaacgaagtgatcgcccgggtgcgaatgtgggtgaacctgaacctgtggcagaagctgaagctaagcagagatgatgccaagcctctgctgagactgaagggattcccttcctttcctctggtcgagagacaggccaacgaagtggactggtgggacatggtgtgtaacgtgaagaagctgatcaacgagaaaaaggaggatggcaaggtgttttggcagaatctggctggctacaagagacaggaagccctgagaccatacctgagcagcgaggaagatcggaagaagggaaagaaattcgctcggtaccagctgggcgacctgctgctgcacctggaaaagaagcacggcgaggactggggaaaggtgtacgacgaggcctgggagcggattgacaagaaagtggaaggcctgagcaagcacatcaagctggaagaggaacggagaagcgaggacgcccagagcaaggccgccctgaccgactggctgcgggctaaggccagcttcgtgatcgagggcctgaaggaggccgacaaggacgagttctgcagatgcgagctgaagctgcagaagtggtacggggacctgcggggaaagcccttcgccatcgaagccgagaacagcatcctggacatcagcggcttcagcaagcagtacaactgtgccttcatctggcagaaggacggcgtgaagaagctgaacctgtacctgatcatcaactacttcaagggcggcaagctgcggttcaagaagatcaaacctgaagccttcgaagccaacagattctacaccgtgatcaacaaaaagagcggcgagatcgtgcccatggaggtgaacttcaacttcgacgaccccaacctgatcatcctgcctctggcctttggcaagagacagggcagagaattcatctggaacgacctgctgtccctggaaaccggcagcctgaagctggccaacggaagagtgatcgagaagacactgtacaacagaagaacccggcaggatgagcctgccctgttcgtggccctgaccttcgagcggcgggaggtcctggactcctccaatatcaaaccaatgaacctgatcggcgtggcaagaggcgaaaacatccccgccgtgatcgccctgaccgaccccgagggctgcccactgagccggtttaaggatagcctgggaaacccaacccacatcctgagaatcggcgagagctataaggagaagcagcggaccatccaggccaagaaggaggtggagcagcggagagccggcggctacagccggaagtacgccagcaaagccaagaatctggcagacgatatggtgagaaacaccgctagagatctgctgtactacgccgtgacccaggatgccatgctgatcttcgccaacctgagccggggcttcggccggcagggcaagcggaccttcatggccgagagacagtacacacggatggaggactggctgaccgccaagctggcctacgagggcctgagcaagacctacctgtccaagacactggcccagtacacctccaagacatgcagcaactgtgggtttaccatcaccagcgccgactacgacagggtgctggagaagctgaagaagacagcaacaggctggatgaccacaattaacggcaaggagctgaaggtggagggccagattacctactacaacagatacaagagacagaacgtagtcaaggacctgtccgtcgagctggatagactgagcgaagaatctgtgaacaacgacatctcctcctggacaaagggcagaagcggagaagctctgagcctcctgaagaaaagattctcccatagacccgtgcaggagaagttcgtgtgcctgaactgcggcttcgagacacacgcagccgagcaagccgccctgaacatcgccagatcctggctgttcctgcggagccaggagtacaagaaataccagacaaacaagacaaccggcaacaccgataagagagccttcgtcgagacctggcagtccttttaccggaagaagcttaaggaggtgtggaaacctgccgtgcggtctggcggatctggcggaggctccacaagcttccaggaggccgtgaccttcaaggacgtggccgtggccttcaccgaggaggagctgggcctgctggacagcgcccagaggaagctgtacagggacgtgatgctggagaacttcaggaacctggtgagcgtgggccaccagagcttcaagcccgacatgatcagccagctggagagggaggagaagctgtggatgaaggagttccagacccagaggggcaagcacagcggcttcctgtgcttcaccagccccaagaaaaagagaaaagtctaagctgccttctgcggggcttgccttctggccatgcccttcttctctcccttgcacctgtacctcttggtctttgaataaagcctgagtaggaaggctagcaaaaaaaaaaaaaaaaaaaaaaaaaaaaaaaaaaaaaaaaaaaaaaaaaaaaaaaaaaaaaaaaaaaaaaaaaaaaaaaa

SEQ ID NO: 3902 - RNA, 5419 nt, synthetic construct
  source 1..5419: mol_type = other RNA
aggaaataagagagaaaagaagagtaagaagaaatataagagccaccatggcccctaagaagaagcgtaaagtgagccgggtgaacggcagcggcagcggcggcggcatgaaccacgaccaggagttcgacccccctaaggtgtaccctcccgtccccgccgagaagagaaagcccatccgggtcctgagcctgttcgatggcatcgccaccggtctgctggtgctgaaggacctgggcatccaggtggataggtacattgcctccgaggtgtgcgaggactccatcaccgtgggaatggtgcgtcatcagggcaagatcatgtacgtgggcgacgtgcggagcgtgacacagaagcatatccaggagtggggccctttcgacctggtgatcggcggcagcccttgcaatgacctgagcatcgtgaacccagcccggaagggcctgtacgagggaaccggcagactgttcttcgagttttacagactgctgcacgacgcccggcctaaggaaggcgacgaccggcccttcttttggctgttcgagaatgtggtggccatgggagtcagcgacaagcgggatattagccggttcctggagagcaaccccgtgatgatcgatgccaaggaagtgagcgccgcccaccgggccagatacttctggggcaatctgcctggcatgaacagacccctggccagcaccgtgaacgacaagctggagctgcaggagtgcctggagcacggccggatcgccaagttcagcaaggtgagaaccatcaccacccgaagcaacagcatcaaacaaggcaaggaccagcactttcctgtgttcatgaacgagaaggaggacatcctgtggtgtaccgagatggagagagtgttcgggttcccagtccactacacagatgtcagcaacatgtctagactggccagacagagactgctgggaagaagctggtccgtccctgtgatcagacacctgttcgcccctctgaaggagtacttcgcctgcgtgagcagcggcaacagcaacgccaacagccggggccccagcttctctagcggcctggtgccactgtccctgagagggagccacatgggccccatggagatctacaaaaccgtgagcgcctggaagcggcagcctgtgcgcgtgctgagcctgtttcggaatatcgataaagtcctgaaaagcctgggattcctggagagcggctctggctccggcggtggcaccctgaagtacgtggaggatgtgacaaacgtggtcagacgggatgtggagaagtggggccccttcgatctggtgtacggcagcacccaacccctgggcagctcttgtgaccggtgccctggctggtacatgtttcagttccaccggatcctgcagtacgccctgccgagacaggagtcccagcggccattcttttggattttcatggacaacttgctgctgaccgaggatgaccaggaaactaccactcggttcctgcagaccgaagccgtgaccctgcaggacgtgagaggccgggactaccagaacgccatgcgggtgtggtccaacatccctggactgaaaagcaagcacgcacctctgacccctaaagaagaggagtacctgcaggcccaggtgcggagcagaagcaagctggacgcccctaaggtggatctgctggtgaagaattgcctcctgcccctgagagagtacttcaagtatttcagccagaatagtctgcccctgggcggcccaagcagcggcgcccctcctcccagcggcggcagcccagccggctccccaacctctaccgaggagggcacctctgagtccgccacccccgagagcggccctggcacctccaccgagcccagcgagggcagcgcacccggcagccctgccggcagccccacctccacagaggagggaaccagcaccgagcccagcgaaggcagcgccccaggcaccagcaccgagcctagtgagggcggctctggcggcggcagcgcccaggagattaaacggatcaacaagatcagaagaagacttgtgaaagacagcaacaccaagaaggccggcaagacaggccccatgaaaaccctgctggttagagtgatgacacccgatctgagagagcggctggaaaacctgagaaagaagcctgaaaatatcccccagcccatcagcaatacatctagagccaacctgaataagctgctgaccgattacaccgaaatgaagaaggcgatcctgcatgtgtactgggaagagttccagaaggaccctgtgggcctgatgagccgggtggcccagcctgccagcaagaagatcgatcagaacaagctgaaacctgagatggacgagaagggcaacctgaccaccgccggctttgcctgctctcagtgtggccagcccctgttcgtgtacaagctggagcaggtgtctgagaagggcaaggcttacaccaactacttcggacggtgcaatgtggccgagcacgaaaagctgatcctgctggcccagctgaagcccgagaaggatagcgacgaagccgtgacatatagcctgggaaagtttgggcagagggccctggatttctacagcattcatgtgaccaaggagtccacccaccccgtgaagcccctggcccagatcgccggaaacagatacgcctccggacctgtgggaaaggccctgagcgacgcatgtatgggcacaatcgcctccttcctgtctaagtaccaggacatcatcatcgaacaccagaaggtggtgaagggcaaccagaagagactggagagcctgcgggagctggccggcaaggaaaacctggaataccctagcgtgaccctgccacctcagcctcacaccaaggagggcgttgatgcctacaacgaagtgatcgcccgggtgcgaatgtgggtgaacctgaacctgtggcagaagctgaagctaagcagagatgatgccaagcctctgctgagactgaagggattcccttcctttcctctggtcgagagacaggccaacgaagtggactggtgggacatggtgtgtaacgtgaagaagctgatcaacgagaaaaaggaggatggcaaggtgttttggcagaatctggctggctacaagagacaggaagccctgagaccatacctgagcagcgaggaagatcggaagaagggaaagaaattcgctcggtaccagctgggcgacctgctgctgcacctggaaaagaagcacggcgaggactggggaaaggtgtacgacgaggcctgggagcggattgacaagaaagtggaaggcctgagcaagcacatcaagctggaagaggaacggagaagcgaggacgcccagagcaaggccgccctgaccgactggctgcgggctaaggccagcttcgtgatcgagggcctgaaggaggccgacaaggacgagttctgcagatgcgagctgaagctgcagaagtggtacggggacctgcggggaaagcccttcgccatcgaagccgagaacagcatcctggacatcagcggcttcagcaagcagtacaactgtgccttcatctggcagaaggacggcgtgaagaagctgaacctgtacctgatcatcaactacttcaagggcggcaagctgcggttcaagaagatcaaacctgaagccttcgaagccaacagattctacaccgtgatcaacaaaaagagcggcgagatcgtgcccatggaggtgaacttcaacttcgacgaccccaacctgatcatcctgcctctggcctttggcaagagacagggcagagaattcatctggaacgacctgctgtccctggaaaccggcagcctgaagctggccaacggaagagtgatcgagaagacactgtacaacagaagaacccggcaggatgagcctgccctgttcgtggccctgaccttcgagcggcgggaggtcctggactcctccaatatcaaaccaatgaacctgatcggcgtggcaagaggcgaaaacatccccgccgtgatcgccctgaccgaccccgagggctgcccactgagccggtttaaggatagcctgggaaacccaacccacatcctgagaatcggcgagagctataaggagaagcagcggaccatccaggccaagaaggaggtggagcagcggagagccggcggctacagccggaagtacgccagcaaagccaagaatctggcagacgatatggtgagaaacaccgctagagatctgctgtactacgccgtgacccaggatgccatgctgatcttcgccaacctgagccggggcttcggccggcagggcaagcggaccttcatggccgagagacagtacacacggatggaggactggctgaccgccaagctggcctacgagggcctgagcaagacctacctgtccaagacactggcccagtacacctccaagacatgcagcaactgtgggtttaccatcaccagcgccgactacgacagggtgctggagaagctgaagaagacagcaacaggctggatgaccacaattaacggcaaggagctgaaggtggagggccagattacctactacaacagatacaagagacagaacgtagtcaaggacctgtccgtcgagctggatagactgagcgaagaatctgtgaacaacgacatctcctcctggacaaagggcagaagcggagaagctctgagcctcctgaagaaaagattctcccatagacccgtgcaggagaagttcgtgtgcctgaactgcggcttcgagacacacgcagccgagcaagccgccctgaacatcgccagatcctggctgttcctgcggagccaggagtacaagaaataccagacaaacaagacaaccggcaacaccgataagagagccttcgtcgagacctggcagtccttttaccggaagaagcttaaggaggtgtggaaacctgccgtgcggtctggcggatctggcggaggctccacaagcagcctgggcagcgtgaccttcaccgacgtggccatcgacttcagccaggacgagtgggagtggctgaacctggcccagaggagcctgtacaagaaggtgatgctggagaactacaggaacctggtgagcgtgggcctgtgcatcagcaagcccgtggtgatcagcctgctggagcaggagaaggacccctgggtgatcaagggcggcatgaacaggggcctgtgccccgacctggagtgcgtgaccagccccaagaaaaagagaaaagtctaagctgccttctgcggggcttgccttctggccatgcccttcttctctcccttgcacctgtacctcttggtctttgaataaagcctgagtaggaaggctagcaaaaaaaaaaaaaaaaaaaaaaaaaaaaaaaaaaaaaaaaaaaaaaaaaaaaaaaaaaaaaaaaaaaaaaaaaaaaaaaa

SEQ ID NO: 3903 - RNA, 5419 nt, synthetic construct
  source 1..5419: mol_type = other RNA
aggaaataagagagaaaagaagagtaagaagaaatataagagccaccatggcccctaagaagaagcgtaaagtgagccgggtgaacggcagcggcagcggcggcggcatgaaccacgaccaggagttcgacccccctaaggtgtaccctcccgtccccgccgagaagagaaagcccatccgggtcctgagcctgttcgatggcatcgccaccggtctgctggtgctgaaggacctgggcatccaggtggataggtacattgcctccgaggtgtgcgaggactccatcaccgtgggaatggtgcgtcatcagggcaagatcatgtacgtgggcgacgtgcggagcgtgacacagaagcatatccaggagtggggccctttcgacctggtgatcggcggcagcccttgcaatgacctgagcatcgtgaacccagcccggaagggcctgtacgagggaaccggcagactgttcttcgagttttacagactgctgcacgacgcccggcctaaggaaggcgacgaccggcccttcttttggctgttcgagaatgtggtggccatgggagtcagcgacaagcgggatattagccggttcctggagagcaaccccgtgatgatcgatgccaaggaagtgagcgccgcccaccgggccagatacttctggggcaatctgcctggcatgaacagacccctggccagcaccgtgaacgacaagctggagctgcaggagtgcctggagcacggccggatcgccaagttcagcaaggtgagaaccatcaccacccgaagcaacagcatcaaacaaggcaaggaccagcactttcctgtgttcatgaacgagaaggaggacatcctgtggtgtaccgagatggagagagtgttcgggttcccagtccactacacagatgtcagcaacatgtctagactggccagacagagactgctgggaagaagctggtccgtccctgtgatcagacacctgttcgcccctctgaaggagtacttcgcctgcgtgagcagcggcaacagcaacgccaacagccggggccccagcttctctagcggcctggtgccactgtccctgagagggagccacatgggccccatggagatctacaaaaccgtgagcgcctggaagcggcagcctgtgcgcgtgctgagcctgtttcggaatatcgataaagtcctgaaaagcctgggattcctggagagcggctctggctccggcggtggcaccctgaagtacgtggaggatgtgacaaacgtggtcagacgggatgtggagaagtggggccccttcgatctggtgtacggcagcacccaacccctgggcagctcttgtgaccggtgccctggctggtacatgtttcagttccaccggatcctgcagtacgccctgccgagacaggagtcccagcggccattcttttggattttcatggacaacttgctgctgaccgaggatgaccaggaaactaccactcggttcctgcagaccgaagccgtgaccctgcaggacgtgagaggccgggactaccagaacgccatgcgggtgtggtccaacatccctggactgaaaagcaagcacgcacctctgacccctaaagaagaggagtacctgcaggcccaggtgcggagcagaagcaagctggacgcccctaaggtggatctgctggtgaagaattgcctcctgcccctgagagagtacttcaagtatttcagccagaatagtctgcccctgggcggcccaagcagcggcgcccctcctcccagcggcggcagcccagccggctccccaacctctaccgaggagggcacctctgagtccgccacccccgagagcggccctggcacctccaccgagcccagcgagggcagcgcacccggcagccctgccggcagccccacctccacagaggagggaaccagcaccgagcccagcgaaggcagcgccccaggcaccagcaccgagcctagtgagggcggctctggcggcggcagcgcccaggagattaaacggatcaacaagatcagaagaagacttgtgaaagacagcaacaccaagaaggccggcaagacaggccccatgaaaaccctgctggttagagtgatgacacccgatctgagagagcggctggaaaacctgagaaagaagcctgaaaatatcccccagcccatcagcaatacatctagagccaacctgaataagctgctgaccgattacaccgaaatgaagaaggcgatcctgcatgtgtactgggaagagttccagaaggaccctgtgggcctgatgagccgggtggcccagcctgccagcaagaagatcgatcagaacaagctgaaacctgagatggacgagaagggcaacctgaccaccgccggctttgcctgctctcagtgtggccagcccctgttcgtgtacaagctggagcaggtgtctgagaagggcaaggcttacaccaactacttcggacggtgcaatgtggccgagcacgaaaagctgatcctgctggcccagctgaagcccgagaaggatagcgacgaagccgtgacatatagcctgggaaagtttgggcagagggccctggatttctacagcattcatgtgaccaaggagtccacccaccccgtgaagcccctggcccagatcgccggaaacagatacgcctccggacctgtgggaaaggccctgagcgacgcatgtatgggcacaatcgcctccttcctgtctaagtaccaggacatcatcatcgaacaccagaaggtggtgaagggcaaccagaagagactggagagcctgcgggagctggccggcaaggaaaacctggaataccctagcgtgaccctgccacctcagcctcacaccaaggagggcgttgatgcctacaacgaagtgatcgcccgggtgcgaatgtgggtgaacctgaacctgtggcagaagctgaagctaagcagagatgatgccaagcctctgctgagactgaagggattcccttcctttcctctggtcgagagacaggccaacgaagtggactggtgggacatggtgtgtaacgtgaagaagctgatcaacgagaaaaaggaggatggcaaggtgttttggcagaatctggctggctacaagagacaggaagccctgagaccatacctgagcagcgaggaagatcggaagaagggaaagaaattcgctcggtaccagctgggcgacctgctgctgcacctggaaaagaagcacggcgaggactggggaaaggtgtacgacgaggcctgggagcggattgacaagaaagtggaaggcctgagcaagcacatcaagctggaagaggaacggagaagcgaggacgcccagagcaaggccgccctgaccgactggctgcgggctaaggccagcttcgtgatcgagggcctgaaggaggccgacaaggacgagttctgcagatgcgagctgaagctgcagaagtggtacggggacctgcggggaaagcccttcgccatcgaagccgagaacagcatcctggacatcagcggcttcagcaagcagtacaactgtgccttcatctggcagaaggacggcgtgaagaagctgaacctgtacctgatcatcaactacttcaagggcggcaagctgcggttcaagaagatcaaacctgaagccttcgaagccaacagattctacaccgtgatcaacaaaaagagcggcgagatcgtgcccatggaggtgaacttcaacttcgacgaccccaacctgatcatcctgcctctggcctttggcaagagacagggcagagaattcatctggaacgacctgctgtccctggaaaccggcagcctgaagctggccaacggaagagtgatcgagaagacactgtacaacagaagaacccggcaggatgagcctgccctgttcgtggccctgaccttcgagcggcgggaggtcctggactcctccaatatcaaaccaatgaacctgatcggcgtggcaagaggcgaaaacatccccgccgtgatcgccctgaccgaccccgagggctgcccactgagccggtttaaggatagcctgggaaacccaacccacatcctgagaatcggcgagagctataaggagaagcagcggaccatccaggccaagaaggaggtggagcagcggagagccggcggctacagccggaagtacgccagcaaagccaagaatctggcagacgatatggtgagaaacaccgctagagatctgctgtactacgccgtgacccaggatgccatgctgatcttcgccaacctgagccggggcttcggccggcagggcaagcggaccttcatggccgagagacagtacacacggatggaggactggctgaccgccaagctggcctacgagggcctgagcaagacctacctgtccaagacactggcccagtacacctccaagacatgcagcaactgtgggtttaccatcaccagcgccgactacgacagggtgctggagaagctgaagaagacagcaacaggctggatgaccacaattaacggcaaggagctgaaggtggagggccagattacctactacaacagatacaagagacagaacgtagtcaaggacctgtccgtcgagctggatagactgagcgaagaatctgtgaacaacgacatctcctcctggacaaagggcagaagcggagaagctctgagcctcctgaagaaaagattctcccatagacccgtgcaggagaagttcgtgtgcctgaactgcggcttcgagacacacgcagccgagcaagccgccctgaacatcgccagatcctggctgttcctgcggagccaggagtacaagaaataccagacaaacaagacaaccggcaacaccgataagagagccttcgtcgagacctggcagtccttttaccggaagaagcttaaggaggtgtggaaacctgccgtgcggtctggcggatctggcggaggctccacaagcatgggccccctgcagttcagggacgtggccatcgagttcagcctggaggagtggcactgcctggacaccgcccagaggaacctgtacaggaacgtgatgctggagaactacagcaacctggtgttcctgggcatcgtggtgagcaagcccgacctgatcaccaggctggagcagggcaagaagcccctgaccatgaagaggcacgagatggtggccaaccccagcggccccggcgtgttcgtgaccagccccaagaaaaagagaaaagtctaagctgccttctgcggggcttgccttctggccatgcccttcttctctcccttgcacctgtacctcttggtctttgaataaagcctgagtaggaaggctagcaaaaaaaaaaaaaaaaaaaaaaaaaaaaaaaaaaaaaaaaaaaaaaaaaaaaaaaaaaaaaaaaaaaaaaaaaaaaaaaa

SEQ ID NO: 3904 - RNA, 5419 nt, synthetic construct
  source 1..5419: mol_type = other RNA
aggaaataagagagaaaagaagagtaagaagaaatataagagccaccatggcccctaagaagaagcgtaaagtgagccgggtgaacggcagcggcagcggcggcggcatgaaccacgaccaggagttcgacccccctaaggtgtaccctcccgtccccgccgagaagagaaagcccatccgggtcctgagcctgttcgatggcatcgccaccggtctgctggtgctgaaggacctgggcatccaggtggataggtacattgcctccgaggtgtgcgaggactccatcaccgtgggaatggtgcgtcatcagggcaagatcatgtacgtgggcgacgtgcggagcgtgacacagaagcatatccaggagtggggccctttcgacctggtgatcggcggcagcccttgcaatgacctgagcatcgtgaacccagcccggaagggcctgtacgagggaaccggcagactgttcttcgagttttacagactgctgcacgacgcccggcctaaggaaggcgacgaccggcccttcttttggctgttcgagaatgtggtggccatgggagtcagcgacaagcgggatattagccggttcctggagagcaaccccgtgatgatcgatgccaaggaagtgagcgccgcccaccgggccagatacttctggggcaatctgcctggcatgaacagacccctggccagcaccgtgaacgacaagctggagctgcaggagtgcctggagcacggccggatcgccaagttcagcaaggtgagaaccatcaccacccgaagcaacagcatcaaacaaggcaaggaccagcactttcctgtgttcatgaacgagaaggaggacatcctgtggtgtaccgagatggagagagtgttcgggttcccagtccactacacagatgtcagcaacatgtctagactggccagacagagactgctgggaagaagctggtccgtccctgtgatcagacacctgttcgcccctctgaaggagtacttcgcctgcgtgagcagcggcaacagcaacgccaacagccggggccccagcttctctagcggcctggtgccactgtccctgagagggagccacatgggccccatggagatctacaaaaccgtgagcgcctggaagcggcagcctgtgcgcgtgctgagcctgtttcggaatatcgataaagtcctgaaaagcctgggattcctggagagcggctctggctccggcggtggcaccctgaagtacgtggaggatgtgacaaacgtggtcagacgggatgtggagaagtggggccccttcgatctggtgtacggcagcacccaacccctgggcagctcttgtgaccggtgccctggctggtacatgtttcagttccaccggatcctgcagtacgccctgccgagacaggagtcccagcggccattcttttggattttcatggacaacttgctgctgaccgaggatgaccaggaaactaccactcggttcctgcagaccgaagccgtgaccctgcaggacgtgagaggccgggactaccagaacgccatgcgggtgtggtccaacatccctggactgaaaagcaagcacgcacctctgacccctaaagaagaggagtacctgcaggcccaggtgcggagcagaagcaagctggacgcccctaaggtggatctgctggtgaagaattgcctcctgcccctgagagagtacttcaagtatttcagccagaatagtctgcccctgggcggcccaagcagcggcgcccctcctcccagcggcggcagcccagccggctccccaacctctaccgaggagggcacctctgagtccgccacccccgagagcggccctggcacctccaccgagcccagcgagggcagcgcacccggcagccctgccggcagccccacctccacagaggagggaaccagcaccgagcccagcgaaggcagcgccccaggcaccagcaccgagcctagtgagggcggctctggcggcggcagcgcccaggagattaaacggatcaacaagatcagaagaagacttgtgaaagacagcaacaccaagaaggccggcaagacaggccccatgaaaaccctgctggttagagtgatgacacccgatctgagagagcggctggaaaacctgagaaagaagcctgaaaatatcccccagcccatcagcaatacatctagagccaacctgaataagctgctgaccgattacaccgaaatgaagaaggcgatcctgcatgtgtactgggaagagttccagaaggaccctgtgggcctgatgagccgggtggcccagcctgccagcaagaagatcgatcagaacaagctgaaacctgagatggacgagaagggcaacctgaccaccgccggctttgcctgctctcagtgtggccagcccctgttcgtgtacaagctggagcaggtgtctgagaagggcaaggcttacaccaactacttcggacggtgcaatgtggccgagcacgaaaagctgatcctgctggcccagctgaagcccgagaaggatagcgacgaagccgtgacatatagcctgggaaagtttgggcagagggccctggatttctacagcattcatgtgaccaaggagtccacccaccccgtgaagcccctggcccagatcgccggaaacagatacgcctccggacctgtgggaaaggccctgagcgacgcatgtatgggcacaatcgcctccttcctgtctaagtaccaggacatcatcatcgaacaccagaaggtggtgaagggcaaccagaagagactggagagcctgcgggagctggccggcaaggaaaacctggaataccctagcgtgaccctgccacctcagcctcacaccaaggagggcgttgatgcctacaacgaagtgatcgcccgggtgcgaatgtgggtgaacctgaacctgtggcagaagctgaagctaagcagagatgatgccaagcctctgctgagactgaagggattcccttcctttcctctggtcgagagacaggccaacgaagtggactggtgggacatggtgtgtaacgtgaagaagctgatcaacgagaaaaaggaggatggcaaggtgttttggcagaatctggctggctacaagagacaggaagccctgagaccatacctgagcagcgaggaagatcggaagaagggaaagaaattcgctcggtaccagctgggcgacctgctgctgcacctggaaaagaagcacggcgaggactggggaaaggtgtacgacgaggcctgggagcggattgacaagaaagtggaaggcctgagcaagcacatcaagctggaagaggaacggagaagcgaggacgcccagagcaaggccgccctgaccgactggctgcgggctaaggccagcttcgtgatcgagggcctgaaggaggccgacaaggacgagttctgcagatgcgagctgaagctgcagaagtggtacggggacctgcggggaaagcccttcgccatcgaagccgagaacagcatcctggacatcagcggcttcagcaagcagtacaactgtgccttcatctggcagaaggacggcgtgaagaagctgaacctgtacctgatcatcaactacttcaagggcggcaagctgcggttcaagaagatcaaacctgaagccttcgaagccaacagattctacaccgtgatcaacaaaaagagcggcgagatcgtgcccatggaggtgaacttcaacttcgacgaccccaacctgatcatcctgcctctggcctttggcaagagacagggcagagaattcatctggaacgacctgctgtccctggaaaccggcagcctgaagctggccaacggaagagtgatcgagaagacactgtacaacagaagaacccggcaggatgagcctgccctgttcgtggccctgaccttcgagcggcgggaggtcctggactcctccaatatcaaaccaatgaacctgatcggcgtggcaagaggcgaaaacatccccgccgtgatcgccctgaccgaccccgagggctgcccactgagccggtttaaggatagcctgggaaacccaacccacatcctgagaatcggcgagagctataaggagaagcagcggaccatccaggccaagaaggaggtggagcagcggagagccggcggctacagccggaagtacgccagcaaagccaagaatctggcagacgatatggtgagaaacaccgctagagatctgctgtactacgccgtgacccaggatgccatgctgatcttcgccaacctgagccggggcttcggccggcagggcaagcggaccttcatggccgagagacagtacacacggatggaggactggctgaccgccaagctggcctacgagggcctgagcaagacctacctgtccaagacactggcccagtacacctccaagacatgcagcaactgtgggtttaccatcaccagcgccgactacgacagggtgctggagaagctgaagaagacagcaacaggctggatgaccacaattaacggcaaggagctgaaggtggagggccagattacctactacaacagatacaagagacagaacgtagtcaaggacctgtccgtcgagctggatagactgagcgaagaatctgtgaacaacgacatctcctcctggacaaagggcagaagcggagaagctctgagcctcctgaagaaaagattctcccatagacccgtgcaggagaagttcgtgtgcctgaactgcggcttcgagacacacgcagccgagcaagccgccctgaacatcgccagatcctggctgttcctgcggagccaggagtacaagaaataccagacaaacaagacaaccggcaacaccgataagagagccttcgtcgagacctggcagtccttttaccggaagaagcttaaggaggtgtggaaacctgccgtgcggtctggcggatctggcggaggctccacaagctgctggggcctgctgagcttcaaggacatcagcatggacttcacctgggaggagtggcagctgctggacagcgcccagaagtacctgtacagggacgtgatcctggagaactacaggaacctggtgagcgtgggctaccacggcaccaagcccgacctgatcttcaagctggagcagggcgaggagccctggatcaggaacgccaagatcagcaggcccaggtgcagcgagggctggaaggagaccagccccaagaaaaagagaaaagtctaagctgccttctgcggggcttgccttctggccatgcccttcttctctcccttgcacctgtacctcttggtctttgaataaagcctgagtaggaaggctagcaaaaaaaaaaaaaaaaaaaaaaaaaaaaaaaaaaaaaaaaaaaaaaaaaaaaaaaaaaaaaaaaaaaaaaaaaaaaaaaa

SEQ ID NO: 3905 - RNA, 5419 nt, synthetic construct
  source 1..5419: mol_type = other RNA
aggaaataagagagaaaagaagagtaagaagaaatataagagccaccatggcccctaagaagaagcgtaaagtgagccgggtgaacggcagcggcagcggcggcggcatgaaccacgaccaggagttcgacccccctaaggtgtaccctcccgtccccgccgagaagagaaagcccatccgggtcctgagcctgttcgatggcatcgccaccggtctgctggtgctgaaggacctgggcatccaggtggataggtacattgcctccgaggtgtgcgaggactccatcaccgtgggaatggtgcgtcatcagggcaagatcatgtacgtgggcgacgtgcggagcgtgacacagaagcatatccaggagtggggccctttcgacctggtgatcggcggcagcccttgcaatgacctgagcatcgtgaacccagcccggaagggcctgtacgagggaaccggcagactgttcttcgagttttacagactgctgcacgacgcccggcctaaggaaggcgacgaccggcccttcttttggctgttcgagaatgtggtggccatgggagtcagcgacaagcgggatattagccggttcctggagagcaaccccgtgatgatcgatgccaaggaagtgagcgccgcccaccgggccagatacttctggggcaatctgcctggcatgaacagacccctggccagcaccgtgaacgacaagctggagctgcaggagtgcctggagcacggccggatcgccaagttcagcaaggtgagaaccatcaccacccgaagcaacagcatcaaacaaggcaaggaccagcactttcctgtgttcatgaacgagaaggaggacatcctgtggtgtaccgagatggagagagtgttcgggttcccagtccactacacagatgtcagcaacatgtctagactggccagacagagactgctgggaagaagctggtccgtccctgtgatcagacacctgttcgcccctctgaaggagtacttcgcctgcgtgagcagcggcaacagcaacgccaacagccggggccccagcttctctagcggcctggtgccactgtccctgagagggagccacatgggccccatggagatctacaaaaccgtgagcgcctggaagcggcagcctgtgcgcgtgctgagcctgtttcggaatatcgataaagtcctgaaaagcctgggattcctggagagcggctctggctccggcggtggcaccctgaagtacgtggaggatgtgacaaacgtggtcagacgggatgtggagaagtggggccccttcgatctggtgtacggcagcacccaacccctgggcagctcttgtgaccggtgccctggctggtacatgtttcagttccaccggatcctgcagtacgccctgccgagacaggagtcccagcggccattcttttggattttcatggacaacttgctgctgaccgaggatgaccaggaaactaccactcggttcctgcagaccgaagccgtgaccctgcaggacgtgagaggccgggactaccagaacgccatgcgggtgtggtccaacatccctggactgaaaagcaagcacgcacctctgacccctaaagaagaggagtacctgcaggcccaggtgcggagcagaagcaagctggacgcccctaaggtggatctgctggtgaagaattgcctcctgcccctgagagagtacttcaagtatttcagccagaatagtctgcccctgggcggcccaagcagcggcgcccctcctcccagcggcggcagcccagccggctccccaacctctaccgaggagggcacctctgagtccgccacccccgagagcggccctggcacctccaccgagcccagcgagggcagcgcacccggcagccctgccggcagccccacctccacagaggagggaaccagcaccgagcccagcgaaggcagcgccccaggcaccagcaccgagcctagtgagggcggctctggcggcggcagcgcccaggagattaaacggatcaacaagatcagaagaagacttgtgaaagacagcaacaccaagaaggccggcaagacaggccccatgaaaaccctgctggttagagtgatgacacccgatctgagagagcggctggaaaacctgagaaagaagcctgaaaatatcccccagcccatcagcaatacatctagagccaacctgaataagctgctgaccgattacaccgaaatgaagaaggcgatcctgcatgtgtactgggaagagttccagaaggaccctgtgggcctgatgagccgggtggcccagcctgccagcaagaagatcgatcagaacaagctgaaacctgagatggacgagaagggcaacctgaccaccgccggctttgcctgctctcagtgtggccagcccctgttcgtgtacaagctggagcaggtgtctgagaagggcaaggcttacaccaactacttcggacggtgcaatgtggccgagcacgaaaagctgatcctgctggcccagctgaagcccgagaaggatagcgacgaagccgtgacatatagcctgggaaagtttgggcagagggccctggatttctacagcattcatgtgaccaaggagtccacccaccccgtgaagcccctggcccagatcgccggaaacagatacgcctccggacctgtgggaaaggccctgagcgacgcatgtatgggcacaatcgcctccttcctgtctaagtaccaggacatcatcatcgaacaccagaaggtggtgaagggcaaccagaagagactggagagcctgcgggagctggccggcaaggaaaacctggaataccctagcgtgaccctgccacctcagcctcacaccaaggagggcgttgatgcctacaacgaagtgatcgcccgggtgcgaatgtgggtgaacctgaacctgtggcagaagctgaagctaagcagagatgatgccaagcctctgctgagactgaagggattcccttcctttcctctggtcgagagacaggccaacgaagtggactggtgggacatggtgtgtaacgtgaagaagctgatcaacgagaaaaaggaggatggcaaggtgttttggcagaatctggctggctacaagagacaggaagccctgagaccatacctgagcagcgaggaagatcggaagaagggaaagaaattcgctcggtaccagctgggcgacctgctgctgcacctggaaaagaagcacggcgaggactggggaaaggtgtacgacgaggcctgggagcggattgacaagaaagtggaaggcctgagcaagcacatcaagctggaagaggaacggagaagcgaggacgcccagagcaaggccgccctgaccgactggctgcgggctaaggccagcttcgtgatcgagggcctgaaggaggccgacaaggacgagttctgcagatgcgagctgaagctgcagaagtggtacggggacctgcggggaaagcccttcgccatcgaagccgagaacagcatcctggacatcagcggcttcagcaagcagtacaactgtgccttcatctggcagaaggacggcgtgaagaagctgaacctgtacctgatcatcaactacttcaagggcggcaagctgcggttcaagaagatcaaacctgaagccttcgaagccaacagattctacaccgtgatcaacaaaaagagcggcgagatcgtgcccatggaggtgaacttcaacttcgacgaccccaacctgatcatcctgcctctggcctttggcaagagacagggcagagaattcatctggaacgacctgctgtccctggaaaccggcagcctgaagctggccaacggaagagtgatcgagaagacactgtacaacagaagaacccggcaggatgagcctgccctgttcgtggccctgaccttcgagcggcgggaggtcctggactcctccaatatcaaaccaatgaacctgatcggcgtggcaagaggcgaaaacatccccgccgtgatcgccctgaccgaccccgagggctgcccactgagccggtttaaggatagcctgggaaacccaacccacatcctgagaatcggcgagagctataaggagaagcagcggaccatccaggccaagaaggaggtggagcagcggagagccggcggctacagccggaagtacgccagcaaagccaagaatctggcagacgatatggtgagaaacaccgctagagatctgctgtactacgccgtgacccaggatgccatgctgatcttcgccaacctgagccggggcttcggccggcagggcaagcggaccttcatggccgagagacagtacacacggatggaggactggctgaccgccaagctggcctacgagggcctgagcaagacctacctgtccaagacactggcccagtacacctccaagacatgcagcaactgtgggtttaccatcaccagcgccgactacgacagggtgctggagaagctgaagaagacagcaacaggctggatgaccacaattaacggcaaggagctgaaggtggagggccagattacctactacaacagatacaagagacagaacgtagtcaaggacctgtccgtcgagctggatagactgagcgaagaatctgtgaacaacgacatctcctcctggacaaagggcagaagcggagaagctctgagcctcctgaagaaaagattctcccatagacccgtgcaggagaagttcgtgtgcctgaactgcggcttcgagacacacgcagccgagcaagccgccctgaacatcgccagatcctggctgttcctgcggagccaggagtacaagaaataccagacaaacaagacaaccggcaacaccgataagagagccttcgtcgagacctggcagtccttttaccggaagaagcttaaggaggtgtggaaacctgccgtgcggtctggcggatctggcggaggctccacaagccccatcaccttcgacgacgtggccatcatcttcagccccgaggagtgggagtgcctggacagcgcccagagggacctgtacagggacgtgatggtggagaactgcaggaacctgctgagcgtggaggccagcaggcacggcaccaagggcttcagcagcaagaaggacatgaagaggagcttccaggaggagctgagcaggaggctgagcaagtgcggcgccgacatcttccaccccaggaagaccagccccaagaaaaagagaaaagtctaagctgccttctgcggggcttgccttctggccatgcccttcttctctcccttgcacctgtacctcttggtctttgaataaagcctgagtaggaaggctagcaaaaaaaaaaaaaaaaaaaaaaaaaaaaaaaaaaaaaaaaaaaaaaaaaaaaaaaaaaaaaaaaaaaaaaaaaaaaaaaa

SEQ ID NO: 3906 - RNA, 5419 nt, synthetic construct
  source 1..5419: mol_type = other RNA
aggaaataagagagaaaagaagagtaagaagaaatataagagccaccatggcccctaagaagaagcgtaaagtgagccgggtgaacggcagcggcagcggcggcggcatgaaccacgaccaggagttcgacccccctaaggtgtaccctcccgtccccgccgagaagagaaagcccatccgggtcctgagcctgttcgatggcatcgccaccggtctgctggtgctgaaggacctgggcatccaggtggataggtacattgcctccgaggtgtgcgaggactccatcaccgtgggaatggtgcgtcatcagggcaagatcatgtacgtgggcgacgtgcggagcgtgacacagaagcatatccaggagtggggccctttcgacctggtgatcggcggcagcccttgcaatgacctgagcatcgtgaacccagcccggaagggcctgtacgagggaaccggcagactgttcttcgagttttacagactgctgcacgacgcccggcctaaggaaggcgacgaccggcccttcttttggctgttcgagaatgtggtggccatgggagtcagcgacaagcgggatattagccggttcctggagagcaaccccgtgatgatcgatgccaaggaagtgagcgccgcccaccgggccagatacttctggggcaatctgcctggcatgaacagacccctggccagcaccgtgaacgacaagctggagctgcaggagtgcctggagcacggccggatcgccaagttcagcaaggtgagaaccatcaccacccgaagcaacagcatcaaacaaggcaaggaccagcactttcctgtgttcatgaacgagaaggaggacatcctgtggtgtaccgagatggagagagtgttcgggttcccagtccactacacagatgtcagcaacatgtctagactggccagacagagactgctgggaagaagctggtccgtccctgtgatcagacacctgttcgcccctctgaaggagtacttcgcctgcgtgagcagcggcaacagcaacgccaacagccggggccccagcttctctagcggcctggtgccactgtccctgagagggagccacatgggccccatggagatctacaaaaccgtgagcgcctggaagcggcagcctgtgcgcgtgctgagcctgtttcggaatatcgataaagtcctgaaaagcctgggattcctggagagcggctctggctccggcggtggcaccctgaagtacgtggaggatgtgacaaacgtggtcagacgggatgtggagaagtggggccccttcgatctggtgtacggcagcacccaacccctgggcagctcttgtgaccggtgccctggctggtacatgtttcagttccaccggatcctgcagtacgccctgccgagacaggagtcccagcggccattcttttggattttcatggacaacttgctgctgaccgaggatgaccaggaaactaccactcggttcctgcagaccgaagccgtgaccctgcaggacgtgagaggccgggactaccagaacgccatgcgggtgtggtccaacatccctggactgaaaagcaagcacgcacctctgacccctaaagaagaggagtacctgcaggcccaggtgcggagcagaagcaagctggacgcccctaaggtggatctgctggtgaagaattgcctcctgcccctgagagagtacttcaagtatttcagccagaatagtctgcccctgggcggcccaagcagcggcgcccctcctcccagcggcggcagcccagccggctccccaacctctaccgaggagggcacctctgagtccgccacccccgagagcggccctggcacctccaccgagcccagcgagggcagcgcacccggcagccctgccggcagccccacctccacagaggagggaaccagcaccgagcccagcgaaggcagcgccccaggcaccagcaccgagcctagtgagggcggctctggcggcggcagcgcccaggagattaaacggatcaacaagatcagaagaagacttgtgaaagacagcaacaccaagaaggccggcaagacaggccccatgaaaaccctgctggttagagtgatgacacccgatctgagagagcggctggaaaacctgagaaagaagcctgaaaatatcccccagcccatcagcaatacatctagagccaacctgaataagctgctgaccgattacaccgaaatgaagaaggcgatcctgcatgtgtactgggaagagttccagaaggaccctgtgggcctgatgagccgggtggcccagcctgccagcaagaagatcgatcagaacaagctgaaacctgagatggacgagaagggcaacctgaccaccgccggctttgcctgctctcagtgtggccagcccctgttcgtgtacaagctggagcaggtgtctgagaagggcaaggcttacaccaactacttcggacggtgcaatgtggccgagcacgaaaagctgatcctgctggcccagctgaagcccgagaaggatagcgacgaagccgtgacatatagcctgggaaagtttgggcagagggccctggatttctacagcattcatgtgaccaaggagtccacccaccccgtgaagcccctggcccagatcgccggaaacagatacgcctccggacctgtgggaaaggccctgagcgacgcatgtatgggcacaatcgcctccttcctgtctaagtaccaggacatcatcatcgaacaccagaaggtggtgaagggcaaccagaagagactggagagcctgcgggagctggccggcaaggaaaacctggaataccctagcgtgaccctgccacctcagcctcacaccaaggagggcgttgatgcctacaacgaagtgatcgcccgggtgcgaatgtgggtgaacctgaacctgtggcagaagctgaagctaagcagagatgatgccaagcctctgctgagactgaagggattcccttcctttcctctggtcgagagacaggccaacgaagtggactggtgggacatggtgtgtaacgtgaagaagctgatcaacgagaaaaaggaggatggcaaggtgttttggcagaatctggctggctacaagagacaggaagccctgagaccatacctgagcagcgaggaagatcggaagaagggaaagaaattcgctcggtaccagctgggcgacctgctgctgcacctggaaaagaagcacggcgaggactggggaaaggtgtacgacgaggcctgggagcggattgacaagaaagtggaaggcctgagcaagcacatcaagctggaagaggaacggagaagcgaggacgcccagagcaaggccgccctgaccgactggctgcgggctaaggccagcttcgtgatcgagggcctgaaggaggccgacaaggacgagttctgcagatgcgagctgaagctgcagaagtggtacggggacctgcggggaaagcccttcgccatcgaagccgagaacagcatcctggacatcagcggcttcagcaagcagtacaactgtgccttcatctggcagaaggacggcgtgaagaagctgaacctgtacctgatcatcaactacttcaagggcggcaagctgcggttcaagaagatcaaacctgaagccttcgaagccaacagattctacaccgtgatcaacaaaaagagcggcgagatcgtgcccatggaggtgaacttcaacttcgacgaccccaacctgatcatcctgcctctggcctttggcaagagacagggcagagaattcatctggaacgacctgctgtccctggaaaccggcagcctgaagctggccaacggaagagtgatcgagaagacactgtacaacagaagaacccggcaggatgagcctgccctgttcgtggccctgaccttcgagcggcgggaggtcctggactcctccaatatcaaaccaatgaacctgatcggcgtggcaagaggcgaaaacatccccgccgtgatcgccctgaccgaccccgagggctgcccactgagccggtttaaggatagcctgggaaacccaacccacatcctgagaatcggcgagagctataaggagaagcagcggaccatccaggccaagaaggaggtggagcagcggagagccggcggctacagccggaagtacgccagcaaagccaagaatctggcagacgatatggtgagaaacaccgctagagatctgctgtactacgccgtgacccaggatgccatgctgatcttcgccaacctgagccggggcttcggccggcagggcaagcggaccttcatggccgagagacagtacacacggatggaggactggctgaccgccaagctggcctacgagggcctgagcaagacctacctgtccaagacactggcccagtacacctccaagacatgcagcaactgtgggtttaccatcaccagcgccgactacgacagggtgctggagaagctgaagaagacagcaacaggctggatgaccacaattaacggcaaggagctgaaggtggagggccagattacctactacaacagatacaagagacagaacgtagtcaaggacctgtccgtcgagctggatagactgagcgaagaatctgtgaacaacgacatctcctcctggacaaagggcagaagcggagaagctctgagcctcctgaagaaaagattctcccatagacccgtgcaggagaagttcgtgtgcctgaactgcggcttcgagacacacgcagccgagcaagccgccctgaacatcgccagatcctggctgttcctgcggagccaggagtacaagaaataccagacaaacaagacaaccggcaacaccgataagagagccttcgtcgagacctggcagtccttttaccggaagaagcttaaggaggtgtggaaacctgccgtgcggtctggcggatctggcggaggctccacaagcccccaggagagcgtggccttcgacgacgtggccgtgtacttcaccaagaaggagtgggccatcatggtgcccgaccagagggccctgtacagggacgtgatgctggagaactacgaggccgtggccttcgtggtgccccccaccagcaagcccgccctggtgagccacctggagcagggcaaggagccctgcttcacccagccccagggcgtgctgagcaggagcaactggagggccggcttcaccagccccaagaaaaagagaaaagtctaagctgccttctgcggggcttgccttctggccatgcccttcttctctcccttgcacctgtacctcttggtctttgaataaagcctgagtaggaaggctagcaaaaaaaaaaaaaaaaaaaaaaaaaaaaaaaaaaaaaaaaaaaaaaaaaaaaaaaaaaaaaaaaaaaaaaaaaaaaaaaa

SEQ ID NO: 3907 - RNA, 5419 nt, synthetic construct
  source 1..5419: mol_type = other RNA
aggaaataagagagaaaagaagagtaagaagaaatataagagccaccatggcccctaagaagaagcgtaaagtgagccgggtgaacggcagcggcagcggcggcggcatgaaccacgaccaggagttcgacccccctaaggtgtaccctcccgtccccgccgagaagagaaagcccatccgggtcctgagcctgttcgatggcatcgccaccggtctgctggtgctgaaggacctgggcatccaggtggataggtacattgcctccgaggtgtgcgaggactccatcaccgtgggaatggtgcgtcatcagggcaagatcatgtacgtgggcgacgtgcggagcgtgacacagaagcatatccaggagtggggccctttcgacctggtgatcggcggcagcccttgcaatgacctgagcatcgtgaacccagcccggaagggcctgtacgagggaaccggcagactgttcttcgagttttacagactgctgcacgacgcccggcctaaggaaggcgacgaccggcccttcttttggctgttcgagaatgtggtggccatgggagtcagcgacaagcgggatattagccggttcctggagagcaaccccgtgatgatcgatgccaaggaagtgagcgccgcccaccgggccagatacttctggggcaatctgcctggcatgaacagacccctggccagcaccgtgaacgacaagctggagctgcaggagtgcctggagcacggccggatcgccaagttcagcaaggtgagaaccatcaccacccgaagcaacagcatcaaacaaggcaaggaccagcactttcctgtgttcatgaacgagaaggaggacatcctgtggtgtaccgagatggagagagtgttcgggttcccagtccactacacagatgtcagcaacatgtctagactggccagacagagactgctgggaagaagctggtccgtccctgtgatcagacacctgttcgcccctctgaaggagtacttcgcctgcgtgagcagcggcaacagcaacgccaacagccggggccccagcttctctagcggcctggtgccactgtccctgagagggagccacatgggccccatggagatctacaaaaccgtgagcgcctggaagcggcagcctgtgcgcgtgctgagcctgtttcggaatatcgataaagtcctgaaaagcctgggattcctggagagcggctctggctccggcggtggcaccctgaagtacgtggaggatgtgacaaacgtggtcagacgggatgtggagaagtggggccccttcgatctggtgtacggcagcacccaacccctgggcagctcttgtgaccggtgccctggctggtacatgtttcagttccaccggatcctgcagtacgccctgccgagacaggagtcccagcggccattcttttggattttcatggacaacttgctgctgaccgaggatgaccaggaaactaccactcggttcctgcagaccgaagccgtgaccctgcaggacgtgagaggccgggactaccagaacgccatgcgggtgtggtccaacatccctggactgaaaagcaagcacgcacctctgacccctaaagaagaggagtacctgcaggcccaggtgcggagcagaagcaagctggacgcccctaaggtggatctgctggtgaagaattgcctcctgcccctgagagagtacttcaagtatttcagccagaatagtctgcccctgggcggcccaagcagcggcgcccctcctcccagcggcggcagcccagccggctccccaacctctaccgaggagggcacctctgagtccgccacccccgagagcggccctggcacctccaccgagcccagcgagggcagcgcacccggcagccctgccggcagccccacctccacagaggagggaaccagcaccgagcccagcgaaggcagcgccccaggcaccagcaccgagcctagtgagggcggctctggcggcggcagcgcccaggagattaaacggatcaacaagatcagaagaagacttgtgaaagacagcaacaccaagaaggccggcaagacaggccccatgaaaaccctgctggttagagtgatgacacccgatctgagagagcggctggaaaacctgagaaagaagcctgaaaatatcccccagcccatcagcaatacatctagagccaacctgaataagctgctgaccgattacaccgaaatgaagaaggcgatcctgcatgtgtactgggaagagttccagaaggaccctgtgggcctgatgagccgggtggcccagcctgccagcaagaagatcgatcagaacaagctgaaacctgagatggacgagaagggcaacctgaccaccgccggctttgcctgctctcagtgtggccagcccctgttcgtgtacaagctggagcaggtgtctgagaagggcaaggcttacaccaactacttcggacggtgcaatgtggccgagcacgaaaagctgatcctgctggcccagctgaagcccgagaaggatagcgacgaagccgtgacatatagcctgggaaagtttgggcagagggccctggatttctacagcattcatgtgaccaaggagtccacccaccccgtgaagcccctggcccagatcgccggaaacagatacgcctccggacctgtgggaaaggccctgagcgacgcatgtatgggcacaatcgcctccttcctgtctaagtaccaggacatcatcatcgaacaccagaaggtggtgaagggcaaccagaagagactggagagcctgcgggagctggccggcaaggaaaacctggaataccctagcgtgaccctgccacctcagcctcacaccaaggagggcgttgatgcctacaacgaagtgatcgcccgggtgcgaatgtgggtgaacctgaacctgtggcagaagctgaagctaagcagagatgatgccaagcctctgctgagactgaagggattcccttcctttcctctggtcgagagacaggccaacgaagtggactggtgggacatggtgtgtaacgtgaagaagctgatcaacgagaaaaaggaggatggcaaggtgttttggcagaatctggctggctacaagagacaggaagccctgagaccatacctgagcagcgaggaagatcggaagaagggaaagaaattcgctcggtaccagctgggcgacctgctgctgcacctggaaaagaagcacggcgaggactggggaaaggtgtacgacgaggcctgggagcggattgacaagaaagtggaaggcctgagcaagcacatcaagctggaagaggaacggagaagcgaggacgcccagagcaaggccgccctgaccgactggctgcgggctaaggccagcttcgtgatcgagggcctgaaggaggccgacaaggacgagttctgcagatgcgagctgaagctgcagaagtggtacggggacctgcggggaaagcccttcgccatcgaagccgagaacagcatcctggacatcagcggcttcagcaagcagtacaactgtgccttcatctggcagaaggacggcgtgaagaagctgaacctgtacctgatcatcaactacttcaagggcggcaagctgcggttcaagaagatcaaacctgaagccttcgaagccaacagattctacaccgtgatcaacaaaaagagcggcgagatcgtgcccatggaggtgaacttcaacttcgacgaccccaacctgatcatcctgcctctggcctttggcaagagacagggcagagaattcatctggaacgacctgctgtccctggaaaccggcagcctgaagctggccaacggaagagtgatcgagaagacactgtacaacagaagaacccggcaggatgagcctgccctgttcgtggccctgaccttcgagcggcgggaggtcctggactcctccaatatcaaaccaatgaacctgatcggcgtggcaagaggcgaaaacatccccgccgtgatcgccctgaccgaccccgagggctgcccactgagccggtttaaggatagcctgggaaacccaacccacatcctgagaatcggcgagagctataaggagaagcagcggaccatccaggccaagaaggaggtggagcagcggagagccggcggctacagccggaagtacgccagcaaagccaagaatctggcagacgatatggtgagaaacaccgctagagatctgctgtactacgccgtgacccaggatgccatgctgatcttcgccaacctgagccggggcttcggccggcagggcaagcggaccttcatggccgagagacagtacacacggatggaggactggctgaccgccaagctggcctacgagggcctgagcaagacctacctgtccaagacactggcccagtacacctccaagacatgcagcaactgtgggtttaccatcaccagcgccgactacgacagggtgctggagaagctgaagaagacagcaacaggctggatgaccacaattaacggcaaggagctgaaggtggagggccagattacctactacaacagatacaagagacagaacgtagtcaaggacctgtccgtcgagctggatagactgagcgaagaatctgtgaacaacgacatctcctcctggacaaagggcagaagcggagaagctctgagcctcctgaagaaaagattctcccatagacccgtgcaggagaagttcgtgtgcctgaactgcggcttcgagacacacgcagccgagcaagccgccctgaacatcgccagatcctggctgttcctgcggagccaggagtacaagaaataccagacaaacaagacaaccggcaacaccgataagagagccttcgtcgagacctggcagtccttttaccggaagaagcttaaggaggtgtggaaacctgccgtgcggtctggcggatctggcggaggctccacaagcagccagggccacgtgaccttcgaggacatcgccgtgtacttcagccaggaggagtggggcctgctggacgaggcccagaggtgcctgtaccacgacgtgatgctggagaacttcagcctgatgaccagcgtggccggcctgagccagaacaaccacaaggacagctgcctgcagtggaaggtgcccgtgagcatgaacaacgtggcccagtgcagccccgacgaggtgcactacacccccatgaccagccccaagaaaaagagaaaagtctaagctgccttctgcggggcttgccttctggccatgcccttcttctctcccttgcacctgtacctcttggtctttgaataaagcctgagtaggaaggctagcaaaaaaaaaaaaaaaaaaaaaaaaaaaaaaaaaaaaaaaaaaaaaaaaaaaaaaaaaaaaaaaaaaaaaaaaaaaaaaaa

SEQ ID NO: 3908 - RNA, 5419 nt, synthetic construct
  source 1..5419: mol_type = other RNA
aggaaataagagagaaaagaagagtaagaagaaatataagagccaccatggcccctaagaagaagcgtaaagtgagccgggtgaacggcagcggcagcggcggcggcatgaaccacgaccaggagttcgacccccctaaggtgtaccctcccgtccccgccgagaagagaaagcccatccgggtcctgagcctgttcgatggcatcgccaccggtctgctggtgctgaaggacctgggcatccaggtggataggtacattgcctccgaggtgtgcgaggactccatcaccgtgggaatggtgcgtcatcagggcaagatcatgtacgtgggcgacgtgcggagcgtgacacagaagcatatccaggagtggggccctttcgacctggtgatcggcggcagcccttgcaatgacctgagcatcgtgaacccagcccggaagggcctgtacgagggaaccggcagactgttcttcgagttttacagactgctgcacgacgcccggcctaaggaaggcgacgaccggcccttcttttggctgttcgagaatgtggtggccatgggagtcagcgacaagcgggatattagccggttcctggagagcaaccccgtgatgatcgatgccaaggaagtgagcgccgcccaccgggccagatacttctggggcaatctgcctggcatgaacagacccctggccagcaccgtgaacgacaagctggagctgcaggagtgcctggagcacggccggatcgccaagttcagcaaggtgagaaccatcaccacccgaagcaacagcatcaaacaaggcaaggaccagcactttcctgtgttcatgaacgagaaggaggacatcctgtggtgtaccgagatggagagagtgttcgggttcccagtccactacacagatgtcagcaacatgtctagactggccagacagagactgctgggaagaagctggtccgtccctgtgatcagacacctgttcgcccctctgaaggagtacttcgcctgcgtgagcagcggcaacagcaacgccaacagccggggccccagcttctctagcggcctggtgccactgtccctgagagggagccacatgggccccatggagatctacaaaaccgtgagcgcctggaagcggcagcctgtgcgcgtgctgagcctgtttcggaatatcgataaagtcctgaaaagcctgggattcctggagagcggctctggctccggcggtggcaccctgaagtacgtggaggatgtgacaaacgtggtcagacgggatgtggagaagtggggccccttcgatctggtgtacggcagcacccaacccctgggcagctcttgtgaccggtgccctggctggtacatgtttcagttccaccggatcctgcagtacgccctgccgagacaggagtcccagcggccattcttttggattttcatggacaacttgctgctgaccgaggatgaccaggaaactaccactcggttcctgcagaccgaagccgtgaccctgcaggacgtgagaggccgggactaccagaacgccatgcgggtgtggtccaacatccctggactgaaaagcaagcacgcacctctgacccctaaagaagaggagtacctgcaggcccaggtgcggagcagaagcaagctggacgcccctaaggtggatctgctggtgaagaattgcctcctgcccctgagagagtacttcaagtatttcagccagaatagtctgcccctgggcggcccaagcagcggcgcccctcctcccagcggcggcagcccagccggctccccaacctctaccgaggagggcacctctgagtccgccacccccgagagcggccctggcacctccaccgagcccagcgagggcagcgcacccggcagccctgccggcagccccacctccacagaggagggaaccagcaccgagcccagcgaaggcagcgccccaggcaccagcaccgagcctagtgagggcggctctggcggcggcagcgcccaggagattaaacggatcaacaagatcagaagaagacttgtgaaagacagcaacaccaagaaggccggcaagacaggccccatgaaaaccctgctggttagagtgatgacacccgatctgagagagcggctggaaaacctgagaaagaagcctgaaaatatcccccagcccatcagcaatacatctagagccaacctgaataagctgctgaccgattacaccgaaatgaagaaggcgatcctgcatgtgtactgggaagagttccagaaggaccctgtgggcctgatgagccgggtggcccagcctgccagcaagaagatcgatcagaacaagctgaaacctgagatggacgagaagggcaacctgaccaccgccggctttgcctgctctcagtgtggccagcccctgttcgtgtacaagctggagcaggtgtctgagaagggcaaggcttacaccaactacttcggacggtgcaatgtggccgagcacgaaaagctgatcctgctggcccagctgaagcccgagaaggatagcgacgaagccgtgacatatagcctgggaaagtttgggcagagggccctggatttctacagcattcatgtgaccaaggagtccacccaccccgtgaagcccctggcccagatcgccggaaacagatacgcctccggacctgtgggaaaggccctgagcgacgcatgtatgggcacaatcgcctccttcctgtctaagtaccaggacatcatcatcgaacaccagaaggtggtgaagggcaaccagaagagactggagagcctgcgggagctggccggcaaggaaaacctggaataccctagcgtgaccctgccacctcagcctcacaccaaggagggcgttgatgcctacaacgaagtgatcgcccgggtgcgaatgtgggtgaacctgaacctgtggcagaagctgaagctaagcagagatgatgccaagcctctgctgagactgaagggattcccttcctttcctctggtcgagagacaggccaacgaagtggactggtgggacatggtgtgtaacgtgaagaagctgatcaacgagaaaaaggaggatggcaaggtgttttggcagaatctggctggctacaagagacaggaagccctgagaccatacctgagcagcgaggaagatcggaagaagggaaagaaattcgctcggtaccagctgggcgacctgctgctgcacctggaaaagaagcacggcgaggactggggaaaggtgtacgacgaggcctgggagcggattgacaagaaagtggaaggcctgagcaagcacatcaagctggaagaggaacggagaagcgaggacgcccagagcaaggccgccctgaccgactggctgcgggctaaggccagcttcgtgatcgagggcctgaaggaggccgacaaggacgagttctgcagatgcgagctgaagctgcagaagtggtacggggacctgcggggaaagcccttcgccatcgaagccgagaacagcatcctggacatcagcggcttcagcaagcagtacaactgtgccttcatctggcagaaggacggcgtgaagaagctgaacctgtacctgatcatcaactacttcaagggcggcaagctgcggttcaagaagatcaaacctgaagccttcgaagccaacagattctacaccgtgatcaacaaaaagagcggcgagatcgtgcccatggaggtgaacttcaacttcgacgaccccaacctgatcatcctgcctctggcctttggcaagagacagggcagagaattcatctggaacgacctgctgtccctggaaaccggcagcctgaagctggccaacggaagagtgatcgagaagacactgtacaacagaagaacccggcaggatgagcctgccctgttcgtggccctgaccttcgagcggcgggaggtcctggactcctccaatatcaaaccaatgaacctgatcggcgtggcaagaggcgaaaacatccccgccgtgatcgccctgaccgaccccgagggctgcccactgagccggtttaaggatagcctgggaaacccaacccacatcctgagaatcggcgagagctataaggagaagcagcggaccatccaggccaagaaggaggtggagcagcggagagccggcggctacagccggaagtacgccagcaaagccaagaatctggcagacgatatggtgagaaacaccgctagagatctgctgtactacgccgtgacccaggatgccatgctgatcttcgccaacctgagccggggcttcggccggcagggcaagcggaccttcatggccgagagacagtacacacggatggaggactggctgaccgccaagctggcctacgagggcctgagcaagacctacctgtccaagacactggcccagtacacctccaagacatgcagcaactgtgggtttaccatcaccagcgccgactacgacagggtgctggagaagctgaagaagacagcaacaggctggatgaccacaattaacggcaaggagctgaaggtggagggccagattacctactacaacagatacaagagacagaacgtagtcaaggacctgtccgtcgagctggatagactgagcgaagaatctgtgaacaacgacatctcctcctggacaaagggcagaagcggagaagctctgagcctcctgaagaaaagattctcccatagacccgtgcaggagaagttcgtgtgcctgaactgcggcttcgagacacacgcagccgagcaagccgccctgaacatcgccagatcctggctgttcctgcggagccaggagtacaagaaataccagacaaacaagacaaccggcaacaccgataagagagccttcgtcgagacctggcagtccttttaccggaagaagcttaaggaggtgtggaaacctgccgtgcggtctggcggatctggcggaggctccacaagcgtgcacggcagcgtgaccttcagggacgtggccatcgacttctgccaggaggagtgggagtgcctgggccccatccagagggacctgtacagggacgtgatgctggagaactacagcaacctgatcgccgtgggcagcaccatcagcaagcccgacgtgatcgccctgctggagcagggcaccgagccctggatgggcgtgaggaaggacaggagcaggtggtaccccggcctgaacagcggcaccagccccaagaaaaagagaaaagtctaagctgccttctgcggggcttgccttctggccatgcccttcttctctcccttgcacctgtacctcttggtctttgaataaagcctgagtaggaaggctagcaaaaaaaaaaaaaaaaaaaaaaaaaaaaaaaaaaaaaaaaaaaaaaaaaaaaaaaaaaaaaaaaaaaaaaaaaaaaaaaa

SEQ ID NO: 3909 - RNA, 5419 nt, synthetic construct
  source 1..5419: mol_type = other RNA
aggaaataagagagaaaagaagagtaagaagaaatataagagccaccatggcccctaagaagaagcgtaaagtgagccgggtgaacggcagcggcagcggcggcggcatgaaccacgaccaggagttcgacccccctaaggtgtaccctcccgtccccgccgagaagagaaagcccatccgggtcctgagcctgttcgatggcatcgccaccggtctgctggtgctgaaggacctgggcatccaggtggataggtacattgcctccgaggtgtgcgaggactccatcaccgtgggaatggtgcgtcatcagggcaagatcatgtacgtgggcgacgtgcggagcgtgacacagaagcatatccaggagtggggccctttcgacctggtgatcggcggcagcccttgcaatgacctgagcatcgtgaacccagcccggaagggcctgtacgagggaaccggcagactgttcttcgagttttacagactgctgcacgacgcccggcctaaggaaggcgacgaccggcccttcttttggctgttcgagaatgtggtggccatgggagtcagcgacaagcgggatattagccggttcctggagagcaaccccgtgatgatcgatgccaaggaagtgagcgccgcccaccgggccagatacttctggggcaatctgcctggcatgaacagacccctggccagcaccgtgaacgacaagctggagctgcaggagtgcctggagcacggccggatcgccaagttcagcaaggtgagaaccatcaccacccgaagcaacagcatcaaacaaggcaaggaccagcactttcctgtgttcatgaacgagaaggaggacatcctgtggtgtaccgagatggagagagtgttcgggttcccagtccactacacagatgtcagcaacatgtctagactggccagacagagactgctgggaagaagctggtccgtccctgtgatcagacacctgttcgcccctctgaaggagtacttcgcctgcgtgagcagcggcaacagcaacgccaacagccggggccccagcttctctagcggcctggtgccactgtccctgagagggagccacatgggccccatggagatctacaaaaccgtgagcgcctggaagcggcagcctgtgcgcgtgctgagcctgtttcggaatatcgataaagtcctgaaaagcctgggattcctggagagcggctctggctccggcggtggcaccctgaagtacgtggaggatgtgacaaacgtggtcagacgggatgtggagaagtggggccccttcgatctggtgtacggcagcacccaacccctgggcagctcttgtgaccggtgccctggctggtacatgtttcagttccaccggatcctgcagtacgccctgccgagacaggagtcccagcggccattcttttggattttcatggacaacttgctgctgaccgaggatgaccaggaaactaccactcggttcctgcagaccgaagccgtgaccctgcaggacgtgagaggccgggactaccagaacgccatgcgggtgtggtccaacatccctggactgaaaagcaagcacgcacctctgacccctaaagaagaggagtacctgcaggcccaggtgcggagcagaagcaagctggacgcccctaaggtggatctgctggtgaagaattgcctcctgcccctgagagagtacttcaagtatttcagccagaatagtctgcccctgggcggcccaagcagcggcgcccctcctcccagcggcggcagcccagccggctccccaacctctaccgaggagggcacctctgagtccgccacccccgagagcggccctggcacctccaccgagcccagcgagggcagcgcacccggcagccctgccggcagccccacctccacagaggagggaaccagcaccgagcccagcgaaggcagcgccccaggcaccagcaccgagcctagtgagggcggctctggcggcggcagcgcccaggagattaaacggatcaacaagatcagaagaagacttgtgaaagacagcaacaccaagaaggccggcaagacaggccccatgaaaaccctgctggttagagtgatgacacccgatctgagagagcggctggaaaacctgagaaagaagcctgaaaatatcccccagcccatcagcaatacatctagagccaacctgaataagctgctgaccgattacaccgaaatgaagaaggcgatcctgcatgtgtactgggaagagttccagaaggaccctgtgggcctgatgagccgggtggcccagcctgccagcaagaagatcgatcagaacaagctgaaacctgagatggacgagaagggcaacctgaccaccgccggctttgcctgctctcagtgtggccagcccctgttcgtgtacaagctggagcaggtgtctgagaagggcaaggcttacaccaactacttcggacggtgcaatgtggccgagcacgaaaagctgatcctgctggcccagctgaagcccgagaaggatagcgacgaagccgtgacatatagcctgggaaagtttgggcagagggccctggatttctacagcattcatgtgaccaaggagtccacccaccccgtgaagcccctggcccagatcgccggaaacagatacgcctccggacctgtgggaaaggccctgagcgacgcatgtatgggcacaatcgcctccttcctgtctaagtaccaggacatcatcatcgaacaccagaaggtggtgaagggcaaccagaagagactggagagcctgcgggagctggccggcaaggaaaacctggaataccctagcgtgaccctgccacctcagcctcacaccaaggagggcgttgatgcctacaacgaagtgatcgcccgggtgcgaatgtgggtgaacctgaacctgtggcagaagctgaagctaagcagagatgatgccaagcctctgctgagactgaagggattcccttcctttcctctggtcgagagacaggccaacgaagtggactggtgggacatggtgtgtaacgtgaagaagctgatcaacgagaaaaaggaggatggcaaggtgttttggcagaatctggctggctacaagagacaggaagccctgagaccatacctgagcagcgaggaagatcggaagaagggaaagaaattcgctcggtaccagctgggcgacctgctgctgcacctggaaaagaagcacggcgaggactggggaaaggtgtacgacgaggcctgggagcggattgacaagaaagtggaaggcctgagcaagcacatcaagctggaagaggaacggagaagcgaggacgcccagagcaaggccgccctgaccgactggctgcgggctaaggccagcttcgtgatcgagggcctgaaggaggccgacaaggacgagttctgcagatgcgagctgaagctgcagaagtggtacggggacctgcggggaaagcccttcgccatcgaagccgagaacagcatcctggacatcagcggcttcagcaagcagtacaactgtgccttcatctggcagaaggacggcgtgaagaagctgaacctgtacctgatcatcaactacttcaagggcggcaagctgcggttcaagaagatcaaacctgaagccttcgaagccaacagattctacaccgtgatcaacaaaaagagcggcgagatcgtgcccatggaggtgaacttcaacttcgacgaccccaacctgatcatcctgcctctggcctttggcaagagacagggcagagaattcatctggaacgacctgctgtccctggaaaccggcagcctgaagctggccaacggaagagtgatcgagaagacactgtacaacagaagaacccggcaggatgagcctgccctgttcgtggccctgaccttcgagcggcgggaggtcctggactcctccaatatcaaaccaatgaacctgatcggcgtggcaagaggcgaaaacatccccgccgtgatcgccctgaccgaccccgagggctgcccactgagccggtttaaggatagcctgggaaacccaacccacatcctgagaatcggcgagagctataaggagaagcagcggaccatccaggccaagaaggaggtggagcagcggagagccggcggctacagccggaagtacgccagcaaagccaagaatctggcagacgatatggtgagaaacaccgctagagatctgctgtactacgccgtgacccaggatgccatgctgatcttcgccaacctgagccggggcttcggccggcagggcaagcggaccttcatggccgagagacagtacacacggatggaggactggctgaccgccaagctggcctacgagggcctgagcaagacctacctgtccaagacactggcccagtacacctccaagacatgcagcaactgtgggtttaccatcaccagcgccgactacgacagggtgctggagaagctgaagaagacagcaacaggctggatgaccacaattaacggcaaggagctgaaggtggagggccagattacctactacaacagatacaagagacagaacgtagtcaaggacctgtccgtcgagctggatagactgagcgaagaatctgtgaacaacgacatctcctcctggacaaagggcagaagcggagaagctctgagcctcctgaagaaaagattctcccatagacccgtgcaggagaagttcgtgtgcctgaactgcggcttcgagacacacgcagccgagcaagccgccctgaacatcgccagatcctggctgttcctgcggagccaggagtacaagaaataccagacaaacaagacaaccggcaacaccgataagagagccttcgtcgagacctggcagtccttttaccggaagaagcttaaggaggtgtggaaacctgccgtgcggtctggcggatctggcggaggctccacaagcttccaggaggccgtgaccttcaaggacgtggccgtggtgttcagcgaggaggagctgggcctgctggaccccacccagaggaagctgtacagggacgtgatgctggagaacttcaggaacctggtgagcctgggccacagcagcagcaagcccgacgtgatcagccagctggagagggaggagaagctgtgcaccaaggagttccacacccagggcggcggcaggaaccagaaggagatggagaccagccccaagaaaaagagaaaagtctaagctgccttctgcggggcttgccttctggccatgcccttcttctctcccttgcacctgtacctcttggtctttgaataaagcctgagtaggaaggctagcaaaaaaaaaaaaaaaaaaaaaaaaaaaaaaaaaaaaaaaaaaaaaaaaaaaaaaaaaaaaaaaaaaaaaaaaaaaaaaaa
